(19) United States
(12) Patent Application Publication
(10) Pub. No.: US 2007/0015145 A1
(43) Pub. Date: Jan. 18, 2007

(54) Nucleic acid and amino acid sequences involved in pain

(76) Inventors: Clifford Woolf, Newton, MA (US); Donatella D'Urso, Duesseldorf (DE); Katia Befort, Strasbourg (FR); Michael Costigan, Somerville, MA (US)

Correspondence Address: PALMER & DODGE, LLP;KATHLEEN M. WILLIAMS, 111 HUNTINGTON AVENUE, BOSTON, MA, 02199, US

(21) Appl. No.: 10/219,051

(22) Filed: Aug. 14, 2002

Related U.S. Application Data
(60) Provisional application No. 60/312,147, filed on Aug. 14, 2001.
(60) Provisional application No. 60/346,382, filed on Nov. 1, 2001.
(60) Provisional application No. 60/333,347, filed on Nov. 26, 2001.

(51) Int. Cl. C12Q 1/68; C12P 19/34; C12M 1/34

(52) U.S. Cl. 435/6; 435/91.2; 435/320.1; 435/287.2

(57) ABSTRACT

The present invention relates to nucleic acid sequences which are related to pain and which are differentially expressed during pain. The invention further relates to methods of identifying nucleic acid sequences which are differentially expressed during pain, microarrays comprising such differentially expressed sequences and methods of screening agents for the ability to regulate the expression of such differentially expressed sequences.

### PRIORITY

[0001] This application claims priority under 35 U.S.C. § 19(e) to U.S. Provisional Application Nos. 60/312,147, filed Aug. 14, 2001; 60/346,382, filed Nov. 1, 2001; and 60/333,347, filed Nov. 26, 2001. The contents of each application are incorporated herin in their entirety.

### SEQUENCE LISTING

[0002] The present application includes a Sequence Listing submitted herewith on three identical CD-ROM disks pursuant to 37 C.F.R. § 1.53(e). The information on each CD-ROM is identical. Submitted are the Computer Readable Copy (disk 1) of the sequence listing, and Copy 1 (disk 2) and Copy 2 (disk 3). The following information is identical for each CD-ROM submitted:Machine Format: IBM-PC; Operating System: MS-Windows; Files Contained: Formal_sequence_listing.txt; Size: 46,682,797 bytes; Date of Creation: Aug. 13, 2002. The information on each CD-ROM is incorporated herein by reference in its entirety.

### BACKGROUND OF THE INVENTION

[0003] Pain is a state-dependent sensory experience which can be represented by a constellation of distinct types of pain including chronic pain, neuropathic pain, inflammatory pain, and physiological pain. Current therapy is, however, either relatively ineffective or accompanies by substantial side effects (Sindrup and Jensen, 1999 Pain 83: 389). All of the primary forms of pain therapy have been discovered wither empirically through folk medicine, or serendipitously. These forms of treatment include opiates, non-steroidal anti-inflammatory drugs (NSAIDS), local anesthetics, anticonvulsants, and tricyclic antidepressants (TCAs).

[0004] Recently there has been a great deal of progress in understanding the mechanisms that produce pain (McCleskey and Gold, 1999, Annu. Rev. Physiol. 61: 835; Woolf and Salter, 2000, Science 288: 1765; Mogil et al., 2000, Annu. Rev. Neurosci. 23: 777). It is increasingly clear that multiple mechanisms operating at different sites, and with different temporal profiles, are involved. In consequence, there is a need in the art for a shift in pain management from treatment essentially by trial and error to a strategy that attempts to identify and treat the mechanisms present in a given patient (Woolf and Mannion, 1999, Lancet 353: 1959; Woolf and Decosterd, 1999, Pain 82: 1). Accordingly, there is a need in the art for techniques which enable the identification of the genes responsible for these mechanisms.

[0005] The present invention, in an effort to meet such a need, provides a plurality of genes which are differentially expressed in animals which have been subjected to pain. The present invention provides advantages over existing measurements of differential expression in that the invention provides lower thresholds of differential expression. The present invention thus encompasses a much larger number of genes which show differential expression, and therefore provides a much improved method for identifying a larger number of genes whose expression may be directly related to the mechanisms which underlie pain.

### SUMMARY OF THE INVENTION

[0006] The present invention provides a composition comprising two or more isolated polynucleotides, wherein each of said two or more isolated polynucleoitdes is selected from the polynucleotides of Tables 1 or 2 or a sequence which hybridizes under high stringency conditions thereto, and wherein at least one of said two or more isolated polynucleotides is unique to Table 2, or a sequence which hybridizes under high stringency conditions thereto.

[0007] The invention also provides a composition comprising two or more isolated polynucleotides, wherein each of said two or more isolated polynucleotides is selected from the group consisting of: a polynucleotide comprising any of the polynucleotides specified in Table 1 or 2 in the columns designated “rat gene” and “human gene”, and wherein at least one of said two or more isolated polynucleotides is unique to Table 2 in the columns designated “rat gene” and “human gene”; a polynucleotide encoding an amino acid sequence selected from the group consisting of: amino acid sequences which are homologue to any of the amino acid specified in Table 2 in the columns designated “rat protein” and “human protein” by at least the homology as specified for the respective sequence in Table 2 in the column designated “% homology” and encodes a polypeptide exhibiting the biological function as specified for the respective sequence in Table 2 in the column designated “identifier”; and the amino acid specified in Table 2 in the columns designated “rat protein” and “human protein”; a polynucleotide which hybridizes under high stringency conditions to a polynucleotide specified in (a) to (b) and encodes a polypeptide exhibiting the biological function as specified for the respective sequence in Table 2 in the column designated “identifier”; a polynucleotide the nucleic acid sequence or which deviates from the nucleic acid sequences specified in (a) to (c) due to the degeneration of the genetic code and encodes a polypeptide exhibiting the biological function as specified for the respective sequence in Table 2 in the column designated “identifier”; and a polynucleotide which represents a fragment, derivative or allelic variation of a nucleic acid sequence specified in (a) to (d) and encodes a polypeptide exhibiting the biological function as specified for the respective sequence in Table 2 in the column designated “identifier”.

[0008] The invention further provides polypeptide sequences, indicated by Accession no. in Table 2, which are encoded by the polynucleotide sequences shown in Tables 2 which are differentially expressed by at least 1.2 fold across at least three replicate screens of neuronal tissue obtained from an animal subjected to pain relative to an animal not subjected to the same pain, with a P-value of less than 0.05.

[0009] The invention further provides human polypeptide sequences, indicated by Accession no. in Table 2, which are encoded by the human polynucleotide sequences shown in Tables 2 which are differentially expressed by at least 1.2 fold across at least three replicate screens of neuronal tissue obtained from an animal subjected to pain relative to an animal not subjected to the same pain, with a P-value of less than 0.05.

[0010] The invention further provides polypeptide sequences, indicated by Accession no. in Tables 2 or 3, which are encoded by the polynucleotide sequences shown in Tables 2 or 3 which are differentially expressed by at least 1.4 fold in an animal subjected to pain relative to an animal not subjected to the same pain.

[0011] The invention further provides human polypeptide sequences, indicated by Accession no. in Tables 2 or 3, which are encoded by the human polynucleotide sequences shown in Tables 2 or 3 which are differentially expressed by at least 1.4 fold in an animal subjected to pain relative to an animal not subjected to the same pain.

[0012] The invention further provides human polynucleotide seqences, indicated by Accession no. in Table 2 or 3 which are differentially expressed by greater than 1.4 fold in an animal subjected to pain relative to an animal not subjected to pain and polypeptide sequences encoded thereby. Preferably, the animal is a human.

[0013] The invention further provides human polynucleotide sequences, indicated by Accession no. in Table 2, which are differentially expressed by at least 1.2 fold across at least three replicate screens of neuronal tissue obtained from an animal subjected to pain relative to an animal not subjected to the same pain, with a p-value of less than 0.05.

[0014] Table 1 of the present invention includes polynucleotide sequences which have been examined using the methods described herein, and have been previously individually described in the art as being regulated in animal models of pain. Not all of the polynucleotides shown in Table 1, however, are “differentially expressed” according to the present invention. The invention is based, in part, upon the discovery that certain polynucleotides shown in Table 1 are differentially expressed in nerve tissue. Those polynucleotides indicated as having a Fold change of +/−1.4 or greater are differentially expressed.

[0015] Table 2 and 3 of the present invention include polynucleotide sequences which have not been previously described in the art as being regulated in animal pain models and which have been analyzed in at least three replicate screens of neuronal tissue from animals subjected to pain, and have attained a statistical significance of p<0.05. Table 2 and 3, however, also include one or more of the sequence indicated in Table 1. Accordingly, the phrase “unique to Table x” refers to a sequence which is indicated in Table x, and is not indicated in Table 1. Therefore, the invention also is based, in part, upon the discovery that polynucleotides (listed in Tables 2 and 3) are differentially expressed in nerve tissue obtained from an animal subjected to pain relative to an animal not subjected to the same pain. This discovery is demonstrated in nerve injury models of pain: e.g., spared nerve injury, axotomy, chronic constriction, and nerve ligation, and inflammation pain models. Each of tables 2 and 3 represents a polynucletoide sequence which is identified herien as being differentially expressed in an animal subjected to pain by at least 1.4 fold relative to the expression of the same sequence in an animal which has not beed subjected to the same pain. Table 2 represents sequences which have been analyzed in at least three replicate assays of differential expression and are differentially expressed by at least 1.4 fold in an animal subjected to pain relative to an animal not subjected to pain, and have a statistical significance of P<0.05. Thus, each of the polynucleotides shown in Tables 2 or 3 is differentially expressed in an animal subjected to pain according to the present invention.

[0016] Table 4 and 5 of the present invention include polynucleotide sequences which have not been previously described in the art as being regulated in an animal pain model, and which have been identified herein as being differentially expressed in an animal subjected to inflammatory pain by at least 1.4 fold. All of the sequences in Tables 4 and 5 are identified herein as being differentially expressed, and a number of the polynucleotides indicated in Tables 4 and 5 have also been included in Table 2, as having attained a statistical significance of p<0.05 in three replicate analyses of gene expression.

[0017] Accordingly, the present invention provides a composition comprising polynucleotides which are differentially expressed by at least +/−1.2 fold in at least three replicate assays of nerve tissue obtained from a nerve injury or inflammation pain model, with a p-value of less than 0.05, wherein each of the polynucleotides is selected from the polynucletoides listed in Tables 1 or 2, and wherein at least one of the polynucleotides is selected from the polynucleotides listed in Table 2.

[0018] In one embodiment, each of the two or more isolated polynucleotides is differentially expressed by at least 1.4 fold in the nerve tissue of an animal subjected to pain relative to the animal not subjected to the pain, and alternatively, are differentially expressed by at least 1.4 fold across three replicate assays of expression in nerve tissue obtained from a nerve injury pain model with a p-value of less than 0.05.

[0019] In an alternate embodiment, each of the two or more isolated polynucleotides is differentially expressed by at least 2 fold in the neurons of an animal subjected to pain relative to the animal not subjected to the pain.

[0020] In one embodiment, the nerve tissue is the sensory neurons of the dorsal root ganglion, or dorsal horn of the spinal cord.

[0021] The invention also provides a plurality of vectors each comprising an isolated polynucleotide, wherein each of the isolated polynucleotides is selected from Table 1, 2, 3, 4, or 5, or a sequence which hybridizes under high stringency conditions thereto, and wherein at least one of the isolated polynucleotides is unique to Table 2, 3, 4, or 5, or a sequence which hybridizes under high stringency conditions thereto.

[0022] The invention further provides a plurality of viral vectors each comprising an isolated polynucleotide, wherein each of the isolated polynucleotides is selected from Table 1, 2, 3, 4, or 5, or a sequence which hybridizes under high stringency conditions thereto, and wherein at least one of the isolated polynucleotides is unique to Table 2, 3, 4, or 5 or a sequence which hybridizes under high stringency conditions thereto.

[0023] The invnetion further provides a plurality of vectors each comprising an isolated polynucleotide, wherein each of said two or more isolated polynucleotides is selected from the group consisting of: (a) a polynucleotide comprising any of the polynucleotides specified in Table 1-2 in the columns designated “rat gene” and “human gene”, and wherein at least one of said two or more isolated polynucleotides is unique to Table 2 in the columns designated “rat gene” and “human gene”; (b) a polynucleotide encoding an amino acid sequence selected from the group consisting of: (i) amino acid sequences which are homologue to any of the amino acid specified in Table 2 in the columns designated “rat protein” and “human protein” by at least the homology as specified for the respective sequence in Table 2 in the column designated “% homology” and encodes a polypeptide exhibiting the biological function as specified for the respective sequence in Table 2 in the column designated “identifier”; (ii) the amino acid specified in Table 2 in the columns designated “rat protein” and “human protein”; (c) a polynucleotide which hybridizes under high stringency conditions to a polynucleotide specified in (a) to (b) and encodes a polypeptide exhibiting the biological function as specified for the respective sequence in Table 2 in the column designated “identifier”; (d) a polynucleotide the nucleic acid sequence or which deviates from the nucleic acid sequences specified in (a) to (c) due to the degeneration of the genetic code and encodes a polypeptide exhibiting the biological function as specified for the respective sequence in Table 2 in the column designated “identifier”; (e) a polynucleotide which represents a fragment, derivative or allelic variation of a nucleic acid sequence specified in (a) to (d) and encodes a polypeptide exhibiting the biological function as specified for the respective sequence in Table 2 in the column designated “identifier”.

[0024] In one embodiment, the vectors described above are contained within a host cell.

[0025] The invention further provides a method for identifying a nucleotide sequence which is differentially regulated in an animal subjected to pain, comprising: hybridizing a nucleic acid sample corresponding to RNA obtained from the animal to at least three replicates of a nucleic acid sample comprising one or more nucleic acid molecules of known identity; measuring the hybridization of the nucleic acid sample to the one or more nucleic acid molecules of known identity for each of the replicates, wherein a 1.2 fold difference in the hybridization, and a p-value of less than 0.05 across the at least three replicates, of the nucleic acid sample to the one or more nucleic acid molecules of known identity relative to a nucleic acid sample obtained from an animal which has not been subjected to the pain is indicative of the differential expression of the nucleotide sequence in the animal subjected to pain.

[0026] The present invention also provides a method for identifying a nucleotide sequence which is differentially regulated in an animal subjected to pain, comprising: hybridizing a nucleic acid sample corresponding to RNA obtained from the animal to a nucleic acid sample comprising one or more nucleic acid molecules of known identity; measuring the hybridization of the nucleic acid sample to the one or more nucleic acid molecules of known identity, wherein a 1.4 fold difference in the hybridization of the nucleic acid sample to the one or more nucleic acid molecules of known identity relative to a nucleic acid sample obtained from an animal which has not been subjected to the pain is indicative of the differential expression of the nucleotide sequence in the animal subjected to pain.

[0027] The invention further provides a method for identifying a nucleotide sequence which is differentially regulated in an animal subjected to pain, comprising: hybridizing a nucleic acid sample corresponding to RNA obtained from the animal to at least three replicates of an array comprising a solid substrate and one or more nucleic acid molecules of known identity; wherein each nucleic acid member has a unique position and is stably associated with the solid substrate; and measuring the hybridization of the nucleic acid sample to the at least three replicates of the array, wherein a 1.2 fold difference in the hybridization, and a p-value of less than 0.05 across the at least three replicates, of the nucleic acid sample to the one or more nucleic acid molecules of known identity comprising the array relative to a nucleic acid sample obtained from an animal which has not been subjected to the pain is indicative of the differential expression of the nucleotide sequence in the animal subjected to pain.

[0028] The invention still further provides a method for identifying a nucleotide sequence which is differentially regulated in an animal subjected to pain, comprising: hybridizing a nucleic acid sample corresponding to RNA obtained from an animal which has been subjected to pain to an array comprising a solid substrate and a plurality of nucleic acid members; wherein each nucleic acid member has a unique position and is stably associated with the solid substrate; and measuring the hybridization of the nucleic acid sample to the array, wherein a 1.4 fold difference in the hybridization of the nucleic acid sample to one or more nucleic acid members comprising the array relative to a nucleic acid sample obtained from an animal which has not been subjected to the pain is indicative of the differential expression of the nucleotide sequence in the animal subjected to pain.

[0029] In one embodiment, any of the preceeding methods for identifying a nucleotide sequence which is differentially regulated in an animal subjected to pain may further comprise the step of verifying the differential expression of the nucleotide sequence by a molecular procedure selected from the group consisting of Northern analysis, in situ hybridization, and PCR.

[0030] The invention provides a method for identifying a nucleotide sequence which is differentially regulated in an animal subjected to pain, comprising: hybridizing a nucleic acid sample corresponding to RNA obtained from an animal which has been subjected to pain to an array comprising a solid substrate and a plurality of nucleic acid members; wherein each nucleic acid member has a unique position and is stably associated with the solid substrate; measuring the hybridization of the nucleic acid sample to the array, wherein a 1.4 fold difference in the hybridization of the nucleic acid sample to one or more nucleic acid members comprising the array relative to a nucleic acid sample obtained from an animal which has not been subjected to the pain is indicative of the differential expression of the nucleotide sequence in the animal subjected to pain; and verifying the differential expression of the nucleotide sequence by a molecular procedure selected from the group consisting of Northern analysis, in situ hybridization, and PCR.

[0031] In one embodiment, a 1.4 fold change in the hybridization of the nucleic acid sample to one or more nucleic acid members comprising the array relative to a nucleic acid sample obtained from an animal which has not been subjected to the pain is indicative of the differential expression of the nucleotide sequence following pain.

[0032] In a further embodiment, a 2 fold change in the hybridization of the nucleic acid sample to one or more nucleic acid members comprising the array relative to a nucleic acid sample obtained from an animal which has not been subjected to the pain is indicative of the differential expression of the nucleotide sequence following pain.

[0033] In one embodiment, the nucleic acid sample is labeled with a detectable label prior to the hybridization to the array.

[0034] In a further embodiment, the above methods for identifiying a nucleic acid seuqence which is differentially regulated in an animal subjected to pain further comprises the step of isolating the nucleic acid sample from the animal.

[0035] In one embodiment, nucleic acid sample is cRNA.

[0036] The present invention also provides an array comprising: a plurality of polynucleotide members, wherein each of the polynucleotide members is selected from Table 1, 2, 3, 4, or 5 and wherein at least one of the isolated polynucleotides is unique to Table 2, 3, 4, or 5; and a solid substrate, wherein each polynucleotide member has a unique position on the array and is stably associated with the solid substrate. Such an array will be referred to herein as a “pain specific array”.

[0037] The invention still further provides an array comprising: a plurality of polynucleotide members, wherein each of the polynucleotide members is selected from Table 1, 2, 3, 4, or 5, and wherein at least one of the isolated polynucleotides is unique to Table 2, 3, 4, or 5 and wherein the plurality of polynucleotide members are obtained from neuronal tissue obtained from at least two different species of animal; and a solid substrate, wherein each polynucleotide member obtained from each of the two different species has a unique position on the array and is stably associated with the solid substrate. Such an array will be referred to herein as a “pain specific array”.

[0038] The invention also comprises an array comprising: (a) a plurality of polynucleotide members, wherein each of said plurality of polynucleotides is selected from the group consisting of: (i) a polynucleotide comprising any of the polynucleotides specified in Table 1-2 in the columns designated “rat gene” and “human gene”, and wherein at least one of said two or more isolated polynucleotides is unique to Table 2 in the columns designated “rat gene” and “human gene”; (ii) a polynucleotide encoding an amino acid sequence selected from the group consisting of: (1) amino acid sequences which are homologue to any of the amino acid specified in Table 2 in the columns designated “rat protein” and “human protein” by at least the homology as specified for the respective sequence in Table 2 in the column designated “% homology” and encodes a polypeptide exhibiting the biological function as specified for the respective sequence in Table 2 in the column designated “identifier”; (2) the amino acid specified in Table 2 in the columns designated “rat protein” and “human protein”; (iii) a polynucleotide which hybridizes under high stringency conditions to a polynucleotide specified in (i) to (ii) and encodes a polypeptide exhibiting the biological function as specified for the respective sequence in Table 2 in the column designated “identifier”; (iv) a polynucleotide the nucleic acid sequence or which deviates from the nucleic acid sequences specified in (i) to (iii) due to the degeneration of the genetic code and encodes a polypeptide exhibiting the biological function as specified for the respective sequence in Table 2 in the column designated “identifier”; (v) a polynucleotide which represents a fragment, derivative or allelic variation of a nucleic acid sequence specified in (i) to (iv) and encodes a polypeptide exhibiting the biological function as specified for the respective sequence in Table 2 in the column designated “identifier”; and (b) a solid substrate, wherein each polynucleotide member has a unique position on said array and is stably associated with said solid substrate.

[0039] In one embodiment, the plurality of polynucleotide members is differentially expressed by at least 1.2 fold across at least three replicate assays of expression in neuronal tissue of an animal subjected to pain with a p-value of less than 0.05 relative to an animal not subjected to the pain.

[0040] In one embodiment, the plurality of polynucleotide members is differentially expressed by at least 1.4 fold in the neurons of the animal subjected to pain relative to an animal not subjected to the pain.

[0041] In a further embodiment, the array comprises from 10 to 20,000 polynucleotide members.

[0042] In one embodiment, the array further comprises negative and positive control sequences and quality control sequences selected from the group consisting of cDNA sequences encoded by housekeeping genes, plant gene sequences, bacterial sequences, PCR products and vector sequences.

[0043] The invention further provides a method of identifying an agent that increases or decreases the expression of a polynucleotide sequence that is differentially expressed in neuronal tissue of a first animal which is subjected to pain comprising: administering the agent to the first animal; hybridizing nucleic acid isolated from one or more sensory neurons of the first and a second animal to a pain specific array; and measuring the hybridization of the nucleic acid isolated from the neuronal tissue of the first and second animal to the array; wherein an increase in hybridization of the nucleic acid from the first animal to one or more nucleic acid members of the array relative to hybridization of the nucleic acid from a second animal which is subjected to pain but to which is not administered the agent to one or more nucleic acid members of the array identifies the agent as increasing the expression of the polynucleotide sequence, and wherein a decrease in hybridization of the nucleic acid from the first animal to one or more nucleic acid members of the array relative to the hybridization of the nucleic acid from second animal to one or more nucleic acid members of the array identifies the agent as decreasing the expression of the polynucleotide sequence.

[0044] In one embodiment, the preceeding method further comprises the step of verifying the increase or decrease in the hybridization by a molecular procedure selected from the group consisting of Northern analysis, in situ hybridization, and PCR.

[0045] In one embodiment, the nucleic acid sample isolated from the first and second animal is labeled with a detectable label prior to the hybridization to the array.

[0046] In a further embodiment, the nucleic acid sample isolated from the first animal is labeled with a different detectable label than the nucleic acid sample isolated from the second animal.

[0047] The invention also provides a method for identifying a compound which regulates the expression of a polynucleotide sequence which is differentially expressed in an animal subjected to pain, comprising: (a) providing a cell comprising and capable of expressing one or more of the polynucleotide selected from the group consisting of: (i) a polynucleotide comprising any of the polynucleotides specified in Table 1-2 in the columns designated “rat gene” and “human gene”, and wherein at least one of said two or more isolated polynucleotides is unique to Table 2 in the columns designated “rat gene” and “human gene”; (ii) a polynucleotide encoding an amino acid sequence selected from the group consisting of: (1) amino acid sequences which are homologue to any of the amino acid specified in Table 2 in the columns designated “rat protein” and “human protein” by at least the homology as specified for the respective sequence in Table 2 in the column designated “% homology” and encodes a polypeptide exhibiting the biological function as specified for the respective sequence in Table 2 in the column designated “identifier”; (2) the amino acid specified in Table 2 in the columns designated “rat protein” and “human protein”; (iii) a polynucleotide which hybridizes under high stringency conditions to a polynucleotide specified in (i) to (ii) and encodes a polypeptide exhibiting the biological function as specified for the respective sequence in Table 2 in the column designated “identifier”; (iv) a polynucleotide the nucleic acid sequence or which deviates from the nucleic acid sequences specified in (i) to (iii) due to the degeneration of the genetic code and encodes a polypeptide exhibiting the biological function as specified for the respective sequence in Table 2 in the column designated “identifier”; (v) a polynucleotide which represents a fragment, derivative or allelic variation of a nucleic acid sequence specified in (i) to (iv) and encodes a polypeptide exhibiting the biological function as specified for the respective sequence in Table 2 in the column designated “identifier”; (b) contacting said cell with a candidate compound; and (c) measuring the expression of said one or more of the polynucleotide specified supra, wherein if the expression of said differentially expressed polynucleotide sequence is increased in an animal which is subjected to pain, then said candidate modulator will be considered to regulate the expression of said polynucleotide if the expression of said polynucleotide is decreased by at least 10% in the presence of said candidate modulator, and wherein if the expression of said differentially expressed polynucleotide sequence is decreased in an animal subjected to pain, then said candidate modulator will be considered to regulate the expression of said polynucleotide if the expression of said polynucleotide is increased by at least 10% in the presence of said candidate modulator.

[0048] The invention also provides a method for identifying a compound which regulates the expression of a polynucleotide sequence which is differentially expressed in an animal subjected to pain, comprising: providing a cell comprising and capable of expressing one or more of the polynucleotide sequences shown in Tables 1, 2, 3, 4, or 5; contacting the cell with a candidate compound; and measuring the expression of the one or more of the polynucleotide sequences shown in Tables 1, 2, 3, 4, or 5, wherein an increase or decrease in the expression of the one or more of the polynucleotide sequences shown in Table 1, 2, 3, 4, or 5 of at least 10% is indicative of regulation of the differentially expressed polynucleotide sequence.

[0049] The invention still further provides a method for identifying a compound which regulates the activity of one or more of the polypeptides shown in Table 1, 2, 3, 4, or 5, or the activity of a polypeptide encoded by a polynucleotide sequence indicated in Table 1, 2, 3, 4, or 5 comprising: providing a cell comprising the one or more polypeptides; contacting the cell with a candidate compound; and measuring the activity of the one or more polypeptides, wherein an increase or decrease of the activity of the one or more polypeptides of at least 10% relative to the activity of the one or more polypeptides in the cell, wherein the cell is not contacted with the candidate compound, identifies the candidate compound as a compound which regulates the activity of the one or more polypeptides.

[0050] In one embodiment, the candidate compound is selected from the group consisting of small molecule, protein, RNAi, and antisense.

[0051] In a further embodiment, the candidate compound is an antibody which binds to the polypeptide.

[0052] The invnetion also provides a method for producing a pharmaceutical formulation comprising: providing a cell comprising the one or more polypeptides; selecting a compound which regulates the activity of the one or more polypeptides; and mixing the compound with a carrier.

[0053] In one embodiment, the step of selecting comprises the steps of contacting the cell with a candidate compound; and measuring the activity of the one or more polypeptides, wherein an increase or decrease of the activity of the one or more polypeptides of at least 10% relative to the activity of the one or more polypeptides in the cell, wherein the cell is not contacted with the candidate compound, identifies the candidate compound as a compound which regulates the activity of the one or more polypeptides.

[0054] The invention also provides a method for producing a pharmaceutical formulation comprising: (a) providing a cell comprising said one or more polypeptides encoded by a polynucleotide selected from the group consisting of: (i) a polynucleotide comprising any of the polynucleotides specified in Table 1-2 in the columns designated “rat gene” and “human gene”, and wherein at least one of said two or more isolated polynucleotides is unique to Table 2 in the columns designated “rat gene” and “human gene”; (ii) a polynucleotide encoding an amino acid sequence selected from the group consisting of: (1) amino acid sequences which are homologue to any of the amino acid specified in Table 2 in the columns designated “rat protein” and “human protein” by at least the homology as specified for the respective sequence in Table 2 in the column designated “% homology” and encodes a polypeptide exhibiting the biological function as specified for the respective sequence in Table 2 in the column designated “identifier”; (2) the amino acid specified in Table 2 in the columns designated “rat protein” and “human protein”; (iii) a polynucleotide which hybridizes under high stringency conditions to a polynucleotide specified in (i) to (ii) and encodes a polypeptide exhibiting the biological function as specified for the respective sequence in Table 2 in the column designated “identifier”; (iv) a polynucleotide the nucleic acid sequence or which deviates from the nucleic acid sequences specified in (i) to (iii) due to the degeneration of the genetic code and encodes a polypeptide exhibiting the biological function as specified for the respective sequence in Table 2 in the column designated “identifier”; (v) a polynucleotide which represents a fragment, derivative or allelic variation of a nucleic acid sequence specified in (i) to (iv) and encodes a polypeptide exhibiting the biological function as specified for the respective sequence in Table 2 in the column designated “identifier”; (b) selecting a compound which regulates the activity of said one or more polypeptides; and (c) mixing said compound with a carrier.

[0055] In one embodiment, the step of selecting comprises the steps of contacting said cell with a candidate compound; and measuring the activity of said one or more polypeptides, wherein an increase or decrease of the activity of said one or more polypeptides of at least 10% relative to the activity of said one or more polypeptides in said cell, wherein the cell is not contacted with the candidate compound, identifies said candidate compound as a compound which regulates the activity of said one or more polypeptides

[0056] The invention also provides a method for identifying a compound which regulates the activity, in an animal, of one or more of the polypeptides shown in Table 1, 2, 3, 4, or 5, or a polypeptide encoded by one or more polynucleotide sequence indicated in Table 1, 2, 3, 4, or 5 comprising: administering a candidate compound to an animal comprising the one or more polypeptides; and measuring the activity of the one or more polypeptides wherein an increase or decrease of the activity of the polypeptide of at least 10% relative to the activity of the one or more polypeptides in an animal to which the candidate compound is not administered, identifies the candidate compound as a compound which regulates the activity of the one or more polypeptides.

[0057] Preferably, the candidate compound is selected from the group consisting of small molecule, protein, RNAi, and antisense.

[0058] In one embodiment, the candidate compound is an antibody which binds to the polypeptide.

[0059] The invnention still further provides a method for identifying a small molecule which regulates the activity of one or more of the polypeptides indicated in Table 1, 2, 3, 4, or 5, or a polypeptide encoded by one or more polynucleotides indicated in Table 1, 2, 3, 4, or 5 comprising: providing a cell comprising the one or more polypeptides; generating a small molecule library; providing a candidate small molecule, selected from the library; contacting the cell with the candidate small molecule; and measuring the activity of the one or more polypeptides, wherein an increase or decrease of the activity of the one or more polypeptides of at least 10% relative to the activity of the one or more polypeptides in the cell, wherein the cell is not contacted with the candidate small molecule, identifies the candidate small molecule as a small molecule which regulates the activity of the one or more polypeptides.

[0060] Preferably, the small molecule library comprises components selected from the group consisting of heterocyclics, aromatics, alicyclics, aliphatics, steroids, antibiotics, enzyme inhibitors, ligands, hormones, alkaloids, opioids, terpenes, porphyrins, toxins, and catalysts, and combinations thereof.

[0061] The invention also relates to a method for identifying a small molecule which regulates the activity of one or more of the polypeptides indicated in Table 2, comprising: (a) providing a cell comprising said one or more polypeptides encoded by a polynucleotide selected from the group consisting of: (i) a polynucleotide comprising any of the polynucleotides specified in Table 1-2 in the columns designated “rat gene” and “human gene”, and wherein at least one of said two or more isolated polynucleotides is unique to Table 2 in the columns designated “rat gene” and “human gene”; (ii) a polynucleotide encoding an amino acid sequence selected from the group consisting of: (1) amino acid sequences which are homologue to any of the amino acid specified in Table 2 in the columns designated “rat protein” and “human protein” by at least the homology as specified for the respective sequence in Table 2 in the column designated “% homology” and encodes a polypeptide exhibiting the biological function as specified for the respective sequence in Table 2 in the column designated “identifier”; (2) the amino acid specified in Table 2 in the columns designated “rat protein” and “human protein”; (iii) a polynucleotide which hybridizes under high stringency conditions to a polynucleotide specified in (i) to (ii) and encodes a polypeptide exhibiting the biological function as specified for the respective sequence in Table 2 in the column designated “identifier”; (iv) a polynucleotide the nucleic acid sequence or which deviates from the nucleic acid sequences specified in (i) to (iii) due to the degeneration of the genetic code and encodes a polypeptide exhibiting the biological function as specified for the respective sequence in Table 2 in the column designated “identifier”; (v) a polynucleotide which represents a fragment, derivative or allelic variation of a nucleic acid sequence specified in (i) to (iv) and encodes a polypeptide exhibiting the biological function as specified for the respective sequence in Table 2 in the column designated “identifier”; (b) generating a small molecule library; (c) providing a candidate small molecule, selected from said library; (d) contacting said cell with said candidate small molecule; and (e) measuring the activity of said one or more polypeptides, wherein an increase or decrease of the activity of said one or more polypeptides of at least 10% relative to the activity of said one or more polypeptides in said cell, wherein the cell is not contacted with the candidate small molecule, identifies said candidate small molecule as a small molecule which regulates the activity of said one or more polypeptides.

[0062] The invention further relates to a method for identifying a compound useful in the treatment of pain, comprising: providing a host cell comprising a vector comprising one or more of the polynucleotides identified in Table 1, 2, 3, 4, or 5; maintaining the host cell under conditions which permit the expression of the one or more polynucleotides; selecting a compound which regulates the activity of a polypeptide encoded by the one or more polynucleotides; administering the compound to an animal subjected to pain; and measuring the level of pain in the animal, wherein a decrease in the level of pain in the animal of at least 10%, identifies the compound as being useful for treating pain.

[0063] In one embodiment, the step of selecting includes the steps of contacting the cell with a candidate compound; and measuring the activity of the polypeptide encoded by the one or more polynucleotides, wherein an increase or decrease of the activity of the polypeptide of at least 10% relative to the activity of the polypeptide in the cell, wherein the cell is not contacted with the candidate compound, identifies the candidate compound as a compound which regulates the activity of the polypeptide.

[0064] The invention further provides a method for identifying a compound useful in the treatment of pain, comprising: (a) providing a host cell comprising a vector comprising one or more of the polynucleotides selected from the group consisting of: (i) a polynucleotide comprising any of the polynucleotides specified in Table 1-2 in the columns designated “rat gene” and “human gene”, and wherein at least one of said two or more isolated polynucleotides is unique to Table 2 in the columns designated “rat gene” and “human gene”; (ii) a polynucleotide encoding an amino acid sequence selected from the group consisting of: (1) amino acid sequences which are homologue to any of the amino acid specified in Table 2 in the columns designated “rat protein” and “human protein” by at least the homology as specified for the respective sequence in Table 2 in the column designated “% homology” and encodes a polypeptide exhibiting the biological function as specified for the respective sequence in Table 2 in the column designated “identifier”; (2) the amino acid specified in Table 2 in the columns designated “rat protein” and “human protein”; (iii) a polynucleotide which hybridizes under high stringency conditions to a polynucleotide specified in (i) to (ii) and encodes a polypeptide exhibiting the biological function as specified for the respective sequence in Table 2 in the column designated “identifier”; (iv) a polynucleotide the nucleic acid sequence or which deviates from the nucleic acid sequences specified in (i) to (iii) due to the degeneration of the genetic code and encodes a polypeptide exhibiting the biological function as specified for the respective sequence in Table 2 in the column designated “identifier”; (v) a polynucleotide which represents a fragment, derivative or allelic variation of a nucleic acid sequence specified in (i) to (iv) and encodes a polypeptide exhibiting the biological function as specified for the respective sequence in Table 2 in the column designated “identifier”; (b) maintaining said host cell under conditions which permit the expression of said one or more polynucleotides; (c) selecting a compound which regulates the activity of a polypeptide encoded by said one or more polynucleotides; (d) administering said compound to an animal subjected to pain; and (e) measuring the level of pain in said animal, wherein a decrease in the level of pain in said animal of at least 10%, identifies said compound as being useful for treating pain.

[0065] In one embodiment, the step of selecting includes the steps of contacting said cell with a candidate compound; and measuring the activity of the polypeptide encoded by said one or more polynucleotides, wherein an increase or decrease of the activity of said polypeptide of at least 10% relative to the activity of said polypeptide in said cell, wherein the cell is not contacted with the candidate compound, identifies said candidate compound as a compound which regulates the activity of said polypeptide.

[0066] The invention also provides a method of treating pain in an animal comprising administering to the animal an antisense polynucleotide capable of inhibiting the expression of one or more of the polynucleotide sequences indicated in Table 1, 2, 3, 4, or 5.

[0067] The invention further provides a method of treating pain in an animal comprising administering to the animal a double stranded RNA molecule wherein one of the strands of the double stranded RNA molecule is identical to a portion of an mRNA transcript obtained from one or more of the polynucleotide sequences indicated in Table 1, 2, 3, 4, or 5.

[0068] The invention still further provides a method of treating pain in an animal in need thereof, comprising: administering to the animal a therapeutically effective amount of an agent which modulates the activity of one or more of the polypeptides indicated in Table 1, 2, 3, 4, or 5, or a polypeptide encoded by one or more of the polynucleotides indicated in Table 1, 2, 3, 4, or 5.

[0069] The invention also provides a method of treating pain in an animal in need thereof, comprising: administering a therapeutically effective amount of an antibody which binds to one or more of the polypeptides indicated in Table 1, 2, 3, 4, or 5, or a polypeptide encoded by one or more of the polynucleotides indicated in Table 1, 2, 3, 4, or 5.

[0070] The invention still further provides a method of treating pain in an animal in need thereof, comprising: administering a therapeutically effective amount of one or more of the polypeptides indicated in Table 1, 2, 3, 4, or 5, or a polypeptide encoded by one or more of the polynucleotides indicated in Table 1, 2, 3, 4, or 5.

[0071] The invention also provides a pharmaceutical formulation comprising one or more polypeptides indicated in Table 1, 2, 3, 4, or 5, or a polypeptide encoded by one or more of the polynucleotides indicated in Table 1, 2, 3, 4, or 5, and a carrier.

[0072] The invention also provides a pharmaceutical formulation comprising one or more antibodies which bind to one or more of the polypeptides indicated in Table 1, 2, 3, 4, or 5, or a polypeptide encoded by one or more of the polynucleotides indicated in Table 1, 2, 3, 4, or 5, and a carrier.

[0073] The invention further relates to the use of: (a) a polynucleotide selected from the group consisting of: (i) a polynucleotide comprising any of the polynucleotides specified in Table 1-2 in the columns designated “rat gene” and “human gene”, and wherein at least one of said two or more isolated polynucleotides is unique to Table 2 in the columns designated “rat gene” and “human gene”; (ii) a polynucleotide encoding an amino acid sequence selected from the group consisting of: (1) amino acid sequences which are homologue to any of the amino acid specified in Table 2 in the columns designated “rat protein” and “human protein” by at least the homology as specified for the respective sequence in Table 2 in the column designated “% homology” and encodes a polypeptide exhibiting the biological function as specified for the respective sequence in Table 2 in the column designated “identifier”; (2) the amino acid specified in Table 2 in the columns designated “rat protein” and “human protein”; (iii) a polynucleotide which hybridizes under high stringency conditions to a polynucleotide specified in (a) to (b) and encodes a polypeptide exhibiting the biological function as specified for the respective sequence in Table 2 in the column designated “identifier”; (iv) a polynucleotide the nucleic acid sequence or which deviates from the nucleic acid sequences specified in (a) to (c) due to the degeneration of the genetic code and encodes a polypeptide exhibiting the biological function as specified for the respective sequence in Table 2 in the column designated “identifier”; (v) a polynucleotide which represents a fragment, derivative or allelic variation of a nucleic acid sequence specified in (a) to (d) and encodes a polypeptide exhibiting the biological function as specified for the respective sequence in Table 2 in the column designated “identifier”; (vi) a polypeptide encoded by any of the polynucleotides specified in (i) to (v); in the preparation of a medicament for the treatment of pain in an animal.

[0074] The present invention still further relates to the use of a compound which can modulate the activity of a polypeptide which is encoded by a polynucleotide selected from the group consisting of: (a) a polynucleotide comprising any of the polynucleotides specified in Table 1-2 in the columns designated “rat gene” and “human gene”, and wherein at least one of said two or more isolated polynucleotides is unique to Table 2 in the columns designated “rat gene” and “human gene”; (b) a polynucleotide encoding an amino acid sequence selected from the group consisting of: (i) amino acid sequences which are homologue to any of the amino acid specified in Table 2 in the columns designated “rat protein” and “human protein” by at least the homology as specified for the respective sequence in Table 2 in the column designated “% homology” and encodes a polypeptide exhibiting the biological function as specified for the respective sequence in Table 2 in the column designated “identifier”; (ii) the amino acid specified in Table 2 in the columns designated “rat protein” and “human protein”; (c) a polynucleotide which hybridizes under high stringency conditions to a polynucleotide specified in (a) to (b) and encodes a polypeptide exhibiting the biological function as specified for the respective sequence in Table 2 in the column designated “identifier”; (d) a polynucleotide the nucleic acid sequence or which deviates from the nucleic acid sequences specified in (a) to (c) due to the degeneration of the genetic code and encodes a polypeptide exhibiting the biological function as specified for the respective sequence in Table 2 in the column designated “identifier”; (e) a polynucleotide which represents a fragment, derivative or allelic variation of a nucleic acid sequence specified in (a) to (d) and encodes a polypeptide exhibiting the biological function as specified for the respective sequence in Table 2 in the column designated “identifier”; in the preparation of a medicament for the treatment of pain in an animal.

[0075] The present invention provies a pharmaceutical formulation comprising one or more polypeptides encoded by a polynucleotide selected from the group consisting of: (a) a polynucleotide comprising any of the polynucleotides specified in Table 1-2 in the columns designated “rat gene” and “human gene”, and wherein at least one of said two or more isolated polynucleotides is unique to Table 2 in the columns designated “rat gene” and “human gene”; (b) a polynucleotide encoding an amino acid sequence selected from the group consisting of: (i) amino acid sequences which are homologue to any of the amino acid specified in Table 2 in the columns designated “rat protein” and “human protein” by at least the homology as specified for the respective sequence in Table 2 in the column designated “% homology” and encodes a polypeptide exhibiting the biological function as specified for the respective sequence in Table 2 in the column designated “identifier”; (ii) the amino acid specified in Table 2 in the columns designated “rat protein” and “human protein”; (c) a polynucleotide which hybridizes under high stringency conditions to a polynucleotide specified in (a) to (b) and encodes a polypeptide exhibiting the biological function as specified for the respective sequence in Table 2 in the column designated “identifier”; (d) a polynucleotide the nucleic acid sequence or which deviates from the nucleic acid sequences specified in (a) to (c) due to the degeneration of the genetic code and encodes a polypeptide exhibiting the biological function as specified for the respective sequence in Table 2 in the column designated “identifier”; (e) a polynucleotide which represents a fragment, derivative or allelic variation of a nucleic acid sequence specified in (a) to (d) and encodes a polypeptide exhibiting the biological function as specified for the respective sequence in Table 2 in the column designated “identifier”; and a carrier.

[0076] The invention still further provides a pharmaceutical formulation comprising one or more antibodies which bind to one or more of the polypeptides encoded by a polynucleotide selected from the group consisting of: (a) a polynucleotide comprising any of the polynucleotides specified in Table 1-2 in the columns designated “rat gene” and “human gene”, and wherein at least one of said two or more isolated polynucleotides is unique to Table 2 in the columns designated “rat gene” and “human gene”; (b) a polynucleotide encoding an amino acid sequence selected from the group consisting of: (i) amino acid sequences which are homologue to any of the amino acid specified in Table 2 in the columns designated “rat protein” and “human protein” by at least the homology as specified for the respective sequence in Table 2 in the column designated “% homology” and encodes a polypeptide exhibiting the biological function as specified for the respective sequence in Table 2 in the column designated “identifier”; (ii) the amino acid specified in Table 2 in the columns designated “rat protein” and “human protein”; (c) a polynucleotide which hybridizes under high stringency conditions to a polynucleotide specified in (a) to (b) and encodes a polypeptide exhibiting the biological function as specified for the respective sequence in Table 2 in the column designated “identifier”; (d) a polynucleotide the nucleic acid sequence or which deviates from the nucleic acid sequences specified in (a) to (c) due to the degeneration of the genetic code and encodes a polypeptide exhibiting the biological function as specified for the respective sequence in Table 2 in the column designated “identifier”; (e) a polynucleotide which represents a fragment, derivative or allelic variation of a nucleic acid sequence specified in (a) to (d) and encodes a polypeptide exhibiting the biological function as specified for the respective sequence in Table 2 in the column designated “identifier”; and a carrier.

[0077] According to the invention, a sequence differentially expressed under pain conditions must be differentially expressed in the neurons of an animal subjected to nerve injury, or inflammatory pain, thus differential expression in an animal subjected to nerve injury pain is determined, according to the invention, in one or all of the following nerve injury pain models. A sequence which is differentially expressed according to the invention is a sequence which is differentially expressed in (1) an axotomy pain model, (2) a spared nerve injury pain model, (3) chronic constriction pain model, (4) spinal segmental nerve lesion pain model, or (5) an inflammation pain model, or may be differentially expressed in all five pain models.

[0078] As used herein differential expression of a sequence in nerve tissue is determined in either a “nerve injury pain model” or a “inflammation pain model”, or both. There are four alternate nerve injury pain models by which differential expression can be determined according to the invention: axotomy, spared nerve injury (SNI), spinal segmental nerve lesion, and chronic constriction.

[0079] As used herein, an “axotomy pain model” refers to a situation in which one or a plurality of peripheral nerve fibers is severed, either by traumatic injury or experimental or surgical manipulation. An “axotomy pain model” may further refer to an experimental model in which all of the axons of a given population of nerve cells are completely severed. For example, an “axotomy pain model” useful in the present invention may be a model in which all of the axons that comprise the sciatic nerve are surgically cut. All of the nerve cells in the dorsal root ganglion which gave rise to the axons of the sciatic nerve are thus said to be “axotomized”.

[0080] As used herein, a “spared nerve injury pain model” refers to a situation in which one of the terminal branches of the sciatic nerve is spared from axotomy (Decosterd and Woolf, 2000 Pain 87: 149). The SNI procedure comprises an axotomy and ligation of the tibial and common peronial nerves leaving the sural nerve intact.

[0081] As used herein, a “spinal segmental nerve lesion” and “chronic constriction” refer to two types of “neuropathic pain models” useful in the present invention. Both models are well known to those of skill in the art (See, for example Kim and Chung, 1992 Pain 50: 355; and Bennett, 1993 Muscle Nerve 16: 1040 for a description of the “segmental nerve lesion” and “chronic constriction” respectively). A “segmental nerve lesion” and/or “chronic constriction” neuropathic pain model may be evaluated for the presence of “pain” using any of the behavioral, electrophysiological, and/or neurochemical criteria described below.

[0082] As used herein, an “inflammatory pain model” refers to a situation in which an animal is subjected to pain, as defined herein, by the induction of peripheral tissue inflammation (Stein et al., (1988) Pharmacol Biochem Behav 31: 445-451; Woolf et al., (1994) Neurosci. 62, 327-331). The inflammation can be produced by injection of an irritant such as complete Freunds adjuvant (CFA), carrageenan, turpentine, croton oil, and the like into the skin, subcutaneously, into a muscle, into a joint, or into a visceral organ. In addition, an “inflammatory pain model” can be produced by the administration of cytokines or inflammatory mediators such as lippopolysoccharide (LPS), or nerve growth factor (NGF) which can mimic the effects of inflammation. An “inflammatory pain model” can be evaluated for the presence of “pain” using behavioral, electrophysiological, and/or neurochemical criteria as described below.

[0083] A polynucleotide is thus differentially expressed herein if it is differentially expressed in any or all of the axotomy, SNI, chronic constriction, segmental nerve lesion and inflammatory pain models.

[0084] As used herein, “nerve tissue” refers to animal tissue comprising nerve cells, the neuropil, glia, neural inflammatory cells, and endothelial cells in contact with “nerve tissue”. “Nerve cells” may be any type of nerve cell known to those of skill in the art including, but not limited to motor neurons, sensory neurons, enteric neurons, sympathetic neurons, parasympathetic neurons, association neurons, and central nervous system neurons. “Glial cells” useful in the present invention include, but are not limited to astrocytes, schwan cells, and oligodendrocytes. “Neural inflammatory cells” useful in the present invention include, but are not limited to microglia. Preferably, “nerve tissue” as used herein refers to nerve cells obtained from the dorsal root ganglion, or dorsal horn of the spinal cord.

[0085] As used herein, “sensory neuron” refers to any sensory neuron in an animal. A “sensory neuron” can be a peripheral sensory neuron, central sensory neuron, or enteric sensory neuron. A “sensory neuron” includes all parts of a neuron including, but not limited to the cell body, axon, and dendrite(s). A “sensory neuron” refers to a neuron which receives and transmits information (encoded by a combination of action potentials, neurotransmitters and neuropeptides) relating to sensory input, including, but not limited to pain, heat, touch, cold, pressure, vibration, etc. Examples of “sensory neurons” include, but are not limited to dorsal root ganglion neurons, dorsal horn neurons of the spinal cord, autonomic neurons, trigeminal ganglion neurons, and the like.

[0086] As used herein, “animal” refers to a organism classified within the phylogenetic kingdom Animalia. As used herein, an “animal” also refers to a mammal. Animals, useful in the present invention, include, but are not limited to mammals, marsupials, mice, dogs, cats, cows, humans, deer, horses, sheep, livestock, and the like.

[0087] As used herein, “subjected” refers to a state of being in which an animal is experiencing pain, wherein whether or not the animal is experiencing pain is determined using the behavioral, electrophysiological, and/or neurochemical criteria described above. As used herein, “subjected” does not refer to the past experience of pain only, but can also include the present experience of pain.

[0088] As used herein, “polynucleotide” refers to a polymeric form of nucleotides of 2 up to 1,000 bases in length, or even more, either ribonucleotides or deoxyribonucleotides or a modified form of either type of nucleotide. The term includes single and double stranded forms of DNA. The term is synonymous with “oligonucleotide”. Polynucleotides of the invention include those indicated by accession number in Tables 1, 2, 3, 4, or 5, or a portion thereof.

[0089] As used herein, “polypeptide” refers to any kind of polypeptide such as peptides, human proteins, fragments of human proteins, proteins or fragments of proteins from non-human sources, engineered versions proteins or fragments of proteins, enzymes, antigens, drugs, molecules involved in cell signalling, such as receptor molecules, antibodies, including polypeptides of the immunoglobulin superfamily, such as antibody polypeptides or T-cell receptor polypeptides. Preferably, a “polypeptide” useful according to the invention is indicated by accession number in Tables 1, 2, 3, 4, or 5. Also included, are a fragment, domain, or epitope of one or more of the polypeptides indicated in Tables 2, 3, 4, or 5 provided that the fragment, domain, or epitope maintains the same function as the protein indicated in Table 2, 3, 4, or 5, wherein the function of the polypeptide is known to those of skill in the art. Also included, are a fragment, domain, or epitope of one or more of the polypeptides indicated in Tables 2 or 3 provided that the fragment, domain, or epitope maintains the same function as the protein indicated in Table 2 or 3, under the column heading “identifier”, “description” or “protein type”

[0090] As used herein, the term “vector” refers to a nucleic acid molecule capable of transporting another nucleic acid to which it has been linked. One type of vector is a “plasmid”, which refers to a circular double stranded nucleic acid loop into which additional nucleic acid segments can be ligated. Another type of vector is a “viral vector”, wherein additional nucleic acid segments can be ligated into the viral genome. Certain vectors are capable of autonomous replication in a host cell into which they are introduced (e.g., bacterial vectors having a bacterial origin of replication and episomal mammalian vectors). Other vectors (e.g., non-episomal mammalian vectors) are integrated into the genome of a host cell upon introduction into the host cell, and thereby are replicated along with the host genome. Moreover, certain vectors are capable of directing the expression of genes to which they are operatively linked. Such vectors are referred to herein as “expression vectors”. In general, expression vectors of utility in recombinant nucleic acid techniques are often in the form of plasmids. In the present specification, “plasmid” and “vector” can be used interchangeably as the plasmid is the most commonly used form of vector. However, the invention is intended to include such other forms of expression vectors, such as viral vectors (e.g., replication defective retroviruses, adenoviruses and adeno-associated viruses), which serve equivalent functions.

[0091] As used herein, the term “hybridizing” or “hybridization” refers to the hydrogen binding with a complementary nucleic acid, via an interaction between for example, a target nucleic acid sequence and a nucleic acid member in an array.

[0092] Typically, selective hybridization occurs when two nucleic acid sequences are substantially complementary (at least about 65% complementary over a stretch of at least 14 to 25 nucleotides, preferably at least about 75%, more preferably at least about 90% complementary). See Kanehisa, M., 1984, Nucleic Acids Res. 12: 203, incorporated herein by reference. As a result, it is expected that a certain degree of mismatch is tolerated. Such mismatch may be small, such as a mono-, di- or tri-nucleotide. Alternatively, a region of mismatch may encompass loops, which are defined as regions in which there exists a mismatch in an uninterrupted series of four or more nucleotides.

[0093] Numerous factors influence the efficiency and selectivity of hybridization of two nucleic acids, for example a nucleic acid member to a target nucleic acid sequence. These factors include nucleic acid member length, nucleotide sequence and/or composition, hybridization temperature, buffer composition and potential for steric hindrance in the region to which the nucleic acid member is required to hybridize.

[0094] A positive correlation exists between the nucleic acid member length and both the efficiency and accuracy with which a nucleic acid member will anneal to a target sequence. In particular, longer sequences have a higher melting temperature (T_{M}) than do shorter ones, and are less likely to be repeated within a given target sequence, thereby minimizing promiscuous hybridization. Hybridization temperature varies inversely with nucleic acid member annealing efficiency, as does the concentration of organic solvents, e.g., formamide, that might be included in a hybridization mixture, while increases in salt concentration facilitate binding. Under stringent annealing conditions, longer nucleic acids, hybridize more efficiently than do shorter ones, which are sufficient under more permissive conditions. As herein used, the term “standard stringent conditions” means hybridization will occur only if there is at least 95% and preferably at least 97% identity between the sequences, wherein the region of identity comprises at least 10 nucleotides. In one embodiment, the sequences hybridize under stringent conditions following incubation of the sequences overnight at 42° C., followed by stringent washes (0.2×SSC at 65° C.). As several factors affect the stringency of hybridization, the combination of parameters is more important than the absolute measure of a single factor.

[0095] As defined herein, an “array” refers a plurality of unique nucleic acids attached to one surface of a solid support at a density exceeding 20 different nucleic acids/cm² wherein each of the nucleic acids is attached to the surface of the solid support in a non-identical preselected region. In one embodiment, the nucleic acid attached to the surface of the solid support is DNA. In a preferred embodiment, the nucleic acid attached to the surface of the solid support is cDNA. In another preferred embodiment, the nucleic acid attached to the surface of the solid support is cDNA synthesized by polymerase chain reaction (PCR). Preferably, a nucleic acid comprising an array, according to the invention, is at least 20 nucleotides in length. Preferably, a nucleic acid comprising an array is less than 6,000 nucleotides in length. More preferably, a nucleic acid comprising an array is less than 500 nucleotides in length. In one embodiment, the array comprises at least 500 different nucleic acids attached to one surface of the solid support. In another embodiment, the array comprises at least 10 different nucleic acids attached to one surface of the solid support. In yet another embodiment, the array comprises at least 10,000 different nucleic acids attached to one surface of the solid support. The term “nucleic acid”, as used herein, is interchangeable with the term “polynucleotide”.

[0096] As used herein, “plurality” refers to more than two. Plurality, according to the invention, can be 3 or more, 100 or more, or 1000 or more.

[0097] As used herein, “attaching” or “spotting” refers to a process of depositing a nucleic acid onto a solid substrate to form a nucleic acid array such that the nucleic acid is irreversibly bound to the solid substrate via covalent bonds, hydrogen bonds or ionic interactions.

[0098] As used herein, “stably associated” refers to a nucleic acid that is irreversibly bound to a solid substrate to form an array via covalent bonds, hydrogen bonds or ionic interactions such that the nucleic acid retains its unique preselected position relative to all other nucleic acids that are stably associated with an array, or to all other preselected regions on the solid substrate under conditions wherein an array is analyzed (i.e., hybridization and scanning).

[0099] As used herein, “solid substrate” or “solid support” refers to a material having a rigid or semi-rigid surface. The terms “substrate” and “support” are used interchangeable herein with the terms “solid substrate” and “solid support”. The solid support may be biological, non-biological, organic, inorganic, or a combination of any of these, existing as particles, strands, precipitates, gels, sheets, tubing, spheres, containers, capillaries, pads, slices, films, plates, slides, etc. Often, the substrate is a silicon or glass surface, (poly)tetrafluoroethylene, (poly)vinylidendifluoride, polystyrene, polycarbonate, a charged membrane, such as nylon 66 or nitrocellulose, or combinations thereof. In a preferred embodiment, the solid support is glass. Preferably, at least one surface of the substrate will be substantially flat. Preferably, the surface of the solid support will contain reactive groups, including, but not limited to, carboxyl, amino, hydroxyl, thiol, or the like. In one embodiment, the surface is optically transparent.

[0100] As used herein, “preselected region”, “predefined region”, or “unique position” refers to a localized area on a substrate which is, was, or is intended to be used for the deposit of a nucleic acid and is otherwise referred to herein in the alternative as a “selected region” or simply a “region.” The preselected region may have any convenient shape, e.g., circular, rectangular, elliptical, wedge-shaped, etc. In some embodiments, a preselected region is smaller than about 1 cm², more preferably less than 1 mm², still more preferably less than 0.5 mm², and in some embodiments about 0.125 to 0.5 mm².

[0101] As used herein, “unique to Table X”, where “X” is one or more of 2, 3, 4, or 5, refers to a polynucleotide or polypeptide sequence which is indicated in Table X, but is not indicated in Table 1.

[0102] As used herein, the term “level of expression” refers to the measurable expression level of a given nucleic acid. The level of expression of a nucleic acid is determined by methods well known in the art. The term “differentially expressed” or “differential expression” refers to an increase or decrease in the measurable expression level of a given nucleic acid. As used herein, “differentially expressed” or “differential expression” means the difference in the level of expression of a nucleic acid is at least 1.4-fold or more in two samples used for comparison, both of which are compared to the same normal standard sample. “Differentially expressed” or “differential expression” according to the invention also means a 1.4-fold, or more, up to and including 2-fold, 5-fold, 10-fold, 20-fold, 50-fold or more difference in the level of expression of a nucleic acid in two samples used for comparison. A nucleic acid is also said to be “differentially expressed” in two samples if one of the two samples contains no detectable expression of a given nucleic acid, provided that the detectably expressed nucleic acid is expressed at +/−at least 1.4 fold. Differential expression of a nucleic acid sequence is “inhibited” the difference in the level of expression of the nucleic acid in two or more samples used for comparison is altered such that it is no longer at least a 1.4 fold difference. Absolute quantification of the level of expression of a nucleic acid may be accomplished by including a known concentration(s) of one or more control nucleic acid species, generating a standard curve based on the amount of the control nucleic acid and extrapolating the expression level of the “unknown” nucleic acid species from the hybridization intensities of the unknown with respect to the standard curve.

[0103] Alternatively, “differential expression”, according to the invention, refers to a 1.2 fold increase or decrease in the level of expression of a nucleic acid in an animal subjected to pain compared to the level of expression in an animal not subjected to the same pain, combined with a statistical significance of p<0.05 in at least three replicate assays of gene expression. Calculation of a statistically significant 1.2 fold threshold in the increase or decrease in the difference of expression of a nucleic acid, when compared to a normal standard sample is based on a statistical analysis of triplicate array data points using, for example, a student's t-test. “Differential expression” of a polynucleotide sequence, as used herein, is established if the expression of a sequence measured in several types of animal pain model, such as nerve injury models or an inflammation model, is increased or decreased by at least 1.2 fold in at least one of the pain models, and if the differential expression is found to be significant across three replicate analyses of differential expression in an animal pain model. Alternatively, a differentially expressed polynucleotide may be differentially expressed in several animal pain models.

[0104] The “level of expression” is measured by hybridization analysis using labeled target nucleic acids according to methods well known in the art (see, for example, Ausubel et al., Short Protocols in Molecular Biology, 3^{rd} Ed. 1995, John Wiley and Sons, Inc.). The label on the target nucleic acid is a luminescent label, an enzymatic label, a radioactive label, a chemical label or a physical label. Preferably, the target nucleic acids are labeled with a fluorescent molecule. Preferred fluorescent labels include fluorescein, amino coumarin acetic acid, tetramethylrhodamine isothiocyanate (TRITC), Texas Red, Cy3 and Cy5.

[0105] As used herein, “differential expression” when measured using microarray hybridization as described herein, can be determined using one or more of three alternate measurements: (1) The hybridization intensity can be measured by comparing the level of hybridization of nucleic acid samples obtained from a naïve animal to the level of hybridization of nucleic acid samples from an animal subjected to any of the pain models described herein. This measurement is termed the “intensity ratio”. (2) Alternatively, a method of measuring “differential expression” is to utilize the “Affymetrix ratio” which is obtained by analyzing the hybridization levels obtained from nucleic acid samples obtained from a naïve animal and those obtained from nucleic acid samples obtained from an animal subjected to any of the pain models described herein, using the software provided with the Affymetrix Microarray software suite (Affymetrix, Santa Clara, Calif.). The Affymetrix ratio can be determined by following the protocols included with the Affymetrix brand software and microarray analysis equipment. Whether measured using the intensity ratio or the Affymetrix ratio, a nucleic acid molecule of the present invention is differentially expressed if it demonstrates at least a 1.4 fold change in expression levels in an animal subjected to the neuropathic or inflammation pain as described herein relative to an animal not subjected to the same pain. (3) Preferably, “differential expression” is measured in either a nerve injury model, or inflammation pain model, or both, at multiple time points after an animal has been subjected to pain. “Differential expression” is further measured in at least three replicate samples for each time point, and for multiple pain models (e.g. nerve injury models, an inflammation models), such that a statisitcal evaluation may be made of the significance of the differential expression. Accordingly, a polynucleotide sequence is “differentially expressed” if it is differentially expressed by at least 1.2 fold, with a p-value of less than 0.05 across at least three replicate expression assays. The fold differential expression, when paired with the statistical analysis of at least three replicate expression assays, can be measured using either of the “intensity ratio” or “affymetrix ratio” described above.

### DESCRIPTION OF THE DRAWINGS

[0106] FIG. 1 shows the data from a representative Northern analysis performed on target nucleic acid obtained from dorsal root ganglion neurons from a rat axotomy pain model.

[0107] FIG. 2 shows the in situ hybridization of dorsal root ganglion tissue sections with labeled oligonucleotide probes specific for SNAP, c-jun, or TrkA.

[0108] FIG. 3 shows the in situ hybridization of dorsal root ganglion tissue sections with labeled oligonucleotide probes specific for GTPcylco, IES-JE, CCHL2A, or VGF.

### DETAILED DESCRIPTION

[0109] The present invention is based, in part, on the discovery that the polynucleotides listed in Tables 1, 2, 3, 4, or 5 are differentially expressed by at least +/−1.4 fold in nerve injury and/or inflammation animal pain models. While the polynucleotides listed in Table 1 have been previously suggested to be regulated in pain models, the present invention is distinguished over the prior art in that only polynucleotides which demonstrate at least a +/−1.4 fold change in expression in a neuropathic and/or inflammation animal pain model are considered to be differentially expressed according to the invention. The invention further provides the polynucleotides listed in Tables 2, 3, 4, or 5 which are differentially expressed by at least +/−1.4 fold in a nerve injury or inflammation animal pain model, but which have not previously been suggested to be regulated in animal pain models (i.e., which are not indicate in Table 1). In addition, the invention provides the polynucleotides listed in Table 2 which have been identified herein as beind differentially expressed by at least +/−1.2 fold in triplicate assays in multiple nerve injury and inflammation pain models, with a p-value of less than 0.05. The invention further provides methods for identifying nucleic acid sequences which are differentially regulated in animals that have been subjected to pain, wherein differential expression is defined as an increase or decrease of the expression of the nucleic acid sequence by at least 1.2 fold compared to the same sequence in an animal which has not been subjected to pain, in triplicate assays with a statistical significance of p<0.05. The invention further provides methods for identifying nucleic acid sequences which are differentially regulated in animals that have been subjected to pain, wherein differential expression is defined as an increase or decrease of the expression of the nucleic acid sequence by at least 1.4 fold compared to the same sequence in an animal which has not been subjected to pain. The invention further provides methods of constructing arrays comprising isolated nucleic acid sequences which are differentially regulated in pain, and methods of screening for potential therapeutic compounds which may alter the expression of these sequences using the arrays. The invention also relates to methods for screening for candidate compounds which are capable of regulating the expression of one or more of the polynucleotide sequences of Tables 1, 2, 3, 4, or 5, or which are capable of regulating the activity of one or more of the polypeptides indicated in Table 1, 2, 3, 4, or 5, or a polypeptide encoded by one or more of the polynucleotides indicated in Table 1, 2, 3, 4, or 5, or which are capable of modulating pain in an animal. As described above, animals which have been subjected to pain include animal models of pain, in which the animal has been artificially manipulated to mimic one or more types of pain, including physiological, inflammatory, or neuropathic pain. Animals subjected to pain also include animals which have experienced pain as the result of a traumatic injury, or animals which have experienced physiological, inflammatory, or neuropathic pain not induced in the setting of an animal model.

Pain

[0110] The present invention relates to polynucleotides which are differentially expressed in (a) an animal that is subjected to pain relative to (b) an animal not subjected to pain. According to the invention, the pain to which the animals of (a) and (b) are subjected is the same pain, that is, if a polynucleotide is differentially expressed in an axotomy pain model then the differential expression is relative to the expression of the polynucleotide in an animal which is not an axotomy pain model.

[0111] As used herein, “pain” refers to a state-dependent sensory experience generated by the activation of peripheral sensory neurons, the nociceptors. As used herein, “pain” refers to several different types of pain, including physiological or protective pain, inflammatory pain that occurs after tissue damage, and neuropathic pain which occurs after damage to the nervous system. Physiological pain is initiated by sensory nociceptor fibers innervating the peripheral tissues and activated only by noxious stimuli, and is characterized by a high threshold to mechanical and thermal stimuli and rapid, transient responses to such stimuli. Inflammatory and neuropathic pain are characterized by displays of behavior indicating either spontaneous pain, measured by spontaneous flexion, vocalization, biting, or even self mutilation, or abnormal hypersensitivity to normally innocuous stimuli or to noxious stimuli, such as mechanical or thermal stimuli. Regardless of the type of pain, as used herein “pain” can be measured using behavioral criteria, such as thermal and mechanical sensitivity, weight bearing, visceral hypersensitivity, or spontaneous locomotor activity, electrophysiological criteria, such as in vivo or in vitro recordings from primary sensory neurons and central neurons to assess changes in receptive field properties, excitability or synaptic input, or neurochemical criteria, such as changes in the expression or distribution of neurotransmitters, neuropeptides and proteins in primary sensory and central neurons, activation of signal transduction cascades, expression of transcription factors, or phosphorylation of proteins.

[0112] Behavioral criteria used to measure “pain” include, but are not limited to mechanical allodynia and hyperalgesia, and temperature allodynia and hyperalgesia. Mechanical allodynia is generally measured using a series of ascending force von Frey monofilaments. The filaments are each assigned a force which must be applied longitudinally across the filament to produce a bend, or bow in the filament. Thus the applied force which causes an animal to withdraw a limb can be measured (Tal and Bennett, 1994 Pain 57: 375). An animal can be said to be experiencing “pain” if the animal demonstrates a withdrawal reflex in response to a force that is reduced by at least 30% compared to the force that elicits a withdrawal reflex in an animal which is not in “pain”. In one embodiment, an animal is said to be experiencing “pain” if the withdrawal reflex in response to a force that is reduced 40%, 50%, 60%, 70%, 80%, 90% and as much as 99% compared to the force required to elicit a similar reflex in a naïve animal.

[0113] Mechanical hypersensitivity can be measured by applying a sharp object, such as a pin, to the skin of an animal with a force sufficient to indent, but not penetrate the skin. The duration of withdrawal from the sharp stimulus may then be measured, wherein an increase in the duration of withdrawal is indicative of “pain” (Decostard et al., 1998 Pain 76: 159). For example, an animal can be said to be experiencing “pain” if the withdrawal duration following a sharp stimulus is increased by at least 2 fold compared with an animal that is not experiencing “pain”. In one embodiment, an animal is said to be experiencing “pain” if the withdrawal duration is increased by 3, 4, 5, 6, 7, 8, 9, and up to 10 fold compared to an animal not experiencing “pain”.

[0114] Temperature allodynia can be measured by placing a drop of acetone onto the skin surface of an animal using an instrument such as a blunt needle attached to a syringe without touching the skin with the needle. The rapid evaporation of the acetone cools the skin to which it is applied. The duration of the withdrawal response to the cold sensation can then be measured (Choi et al., 1994 Pain 59: 369). An animal can be said to be in “pain” if the withdrawal duration following acetone application is increased by at least 2 fold as compared to an animal that is not experiencing “pain”. According to the invention an animal can be said to be in “pain” if the withdrawal duration following thermal stimulation is increased by 4, 6, 8, 10, 12, 14, 16, 18, and up to 20 fold compared to an animal not experiencing “pain”.

[0115] Temperature hyperalgesia can be measured by exposing a portion of the skin surface of an animal, such as the plantar surface of the foot, to a beam of radiant heat through a transparent perspex surface (Hargreaves et al., 1988 Pain 32:77). The duration of withdrawal from the heat stimulus may be measured, wherein an increase in the duration of withdrawal is indicative of “pain”. An animal can be said to be experiencing “pain” if the duration of the withdrawal from the heat stimulus increases by at least 2 fold compared with an animal that is not experiencing “pain”. In addition, an animal can be said to be experiencing “pain” if the duration of the withdrawal from heat stimulus is increased by 3, 4, 5, 6, 7, 8, 9, and up to 10 fold compared with an animal that is not experiencing “pain”.

[0116] In addition to the behavioral criteria described above, an animal can be deemed to be experiencing “pain” by measuring electrophysiological changes, in vitro or in vivo, in primary sensory, or central sensory neurons. Electrophysiological changes can include increased neuronal excitability, changes in receptive field input, or increased synaptic input. The technique of measuring cellular physiology is well known to those of skill in the art (see, for example, Hille, 1992 Ion channels of excitable membranes. Sinauer Associates, Inc., Sunderland, Mass.). An increase in neuronal excitability may be identified, for example, by measuring an increase in the number of action potentials per unit time in a given neuron. An animal is said to be experiencing “pain” if there is at least a 2 fold increase in the action potential firing rate compared with an animal that is not experiencing “pain.” In addition, and animal can be said to be experiencing “pain” if the action potential firing rate is increased by, 3, 4, 5, 6, 7, 8, and up to 10 fold compared to an animal that is not experiencing “pain”. An increase in synaptic input to a sensory neuron, either peripheral or central, may be identified, for example, by measuring the rate of end-plate excitatory potentials (EPSPs) recorded in from the neuron. An animal is said to be experiencing “pain” if there is at least a 2 fold, 3, 4, 5, 6, 7, 8, and up to 10 fold increase in the rate of EPSPs recorded from a given neuron compared to an animal that is not experiencing pain.

[0117] Alternatively, neurochemical criteria may be used to determine whether or not an animal is experiencing “pain”. For example, an animal which has experienced “pain” will display changes in the expression or distribution of neurotransmitters, neuropeptides and protein in primary sensory and central neurons, activation of signal transduction cascades, expression of transcription factors, or phosphorylation of proteins. Gene and protein expression, and phosphorylation of proteins such as transcription factors may be measured using a number of techniques known to those of skill in the art including but not limited to PCR, Southern analysis, Northern analysis, Western analysis, immunohistochemistry, and the like. Examples of signal transduction pathway constituents which may be activated in an animal which is experiencing pain include, but are not limited to ERK, p38, and CREB. Examples of genes which may exhibit enhanced expression include immediate early genes such as c-fos, protein kinases such as PKC and PKA. Examples of other proteins which may be phosphorylated in an animal experiencing pain include receptors and ion channels such as the NMDA or AMPA receptors. Regardless of whether the measure is of transcription, translation or phosphorylation an animal can be said to be experiencing “pain” if one measures at least a 2 fold increase or decrease in any of these parameters compared to an animal not experiencing pain. An animal can be further said to be experiencing “pain” if there is a 3, 4, 5, 6, 7, 8, and up to 10 fold increase in the measurement of any of the above parameters compared to an animal not experiencing “pain”.

[0118] As used herein, “pain” refers to any of the behavioral, electrophysiological, or neurochemical criteria described above. In addition, “pain” can be assessed using combinations of these criteria.

[0119] As used herein, “pain” can refer to “pain” experienced by an animal as a result of accidental trauma (e.g., falling trauma, burn trauma, toxic trauma, etc.), congenital deformity or malformation, infection (e.g., inflammatory pain), or other conditions which are not within the control of the animal experiencing the “pain”. Alternatively, “pain” may be inflicted onto an animal by subjecting the animal to one or more “pain models”.

[0120] The present invention comprises polynucleotide sequences that are differentially expressed in nerve injury pain models, including axotomy, SNI, chronic constriction, and segmental nerve lesion, as well as inflammation pain models. It is also within the scope of the present invention that the polynucleotides described herein as being differentially expressed in nerve injury, or neuropathic pain models may be also differentially expressed in other pain models known to those of skill in the art.

[0121] As used herein, a “pain model” refers to any manipulation of an animal during which the animal experiences “pain”, as defined above. “Pain models” can be classified as those that test the sensitivity of normal animals to intense or noxious stimuli. These tests include responses to thermal, mechanical, or chemical stimuli. Thermal stimuli is usually hot (42 to 55° C.) and includes radiant heat to the tail (the tail flick test) radiant heat to the plantar surface of the hindpaw (the Hargreaves test, supra), the hotplate test, and immersion of the hindpaw or tail in hot water. Alternatively, thermal stimuli can be cold stimulus (30° to −10° C.), such as immersion in cold water, acetone evaporation or cold plate tests which may be used to test cold pain responsiveness using the thresholds discussed above. The end points are latency to response and the duration of the response as well as vocalization and licking the paw, as described above. Mechanical Stimuli typically involves measurements of the threshold for eliciting a withdrawal reflex of the hindpaw to graded strength monofilament von Frey hairs wherein one can measure the force of the filament required to elicit a reflex. Alternatively, mechanical stimuli can be a sustained pressure stimulus to a paw (e.g., the Ugo Basila analgesiometer). The duration of response to a standard pin prick can also be measured. Threshold values for identifying a stimulus that causes “pain” to the animal are described above. Chemical Stimuli typically involves the application or injection of a chemical irritant to the skin, muscle joints or internal organs like the bladder or peritoneum. Irritants can include capsaicin, mustard oil, bradykinin, ATP, formalin, or acetic acid. The outcome measures include vocalization, licking the paw, writhing or spontaneous flexion.

[0122] Alternatively, a “pain model” can be a test that measures changes in the excitability of the peripheral or central components of the pain neural pathway pain sensitization, termed “peripheral sensitization” and “central sensitization”. “Peripheral Sensitization” involves changes in the threshold and responsiveness of high threshold nociceptors which can be induced by: repeated heat stimuli, or application or injection of sensitizing chemicals (e.g. prostaglandins, bradykinin, histamine, serotonin, capsaicin, mustard oil). The outcome measures are thermal and mechanical sensitivity in the area of application/stimulation using the techniques described above in behaving animals or electrophysiological measurements of single sensory fiber receptive field properties either in vivo or using isolated skin nerve preparations. “Central sensitization” involves changes in the excitability of neurons in the central nervous system induced by activity in peripheral pain fibers. “Central sensitization” can be induced by noxious stimuli (e.g., heat) chemical irritants (e.g., injection/application of capsaicin/mustard oil or formalin or electrical activation of sensory fibers). The outcome measures are: behavioral, electrophysiological, and neurochemical.

[0123] Alternatively, a “pain model” can refer to those tests that measure the effect of peripheral inflammation on pain sensitivity. The inflammation can be produced by injection of an irritant such as complete Freunds adjuvant, carrageenan, turpentine, croton oil etc into the skin, subcutaneously, into a muscle into a joint or into a visceral organ. Production of a controlled UV light burn and ischaemia can also be used. Administration of cytokines or inflammatory mediators such as lipopolysaccharide (LPS), or nerve growth factor (NGF) can mimic the effects of inflammation. The outcome of these models may also be measured as behavioral, electrophysiological, and/or neurochemical changes.

[0124] Further, a “pain model” includes those tests that mimic peripheral neuropathic pain using lesions of the peripheral nervous system. Examples of such lesions include, but are not limited to complete transection of a peripheral nerve (axotomy; Watson, 1973, J. Physiol. 231:41), liagation of a spinal segmental nerve (Kim and Chung, 1992, Pain, 50:355-63), partial nerve injury (Seltzer, 1979, Pain, 29: 1061), Spared Nerve Injury model (Decosterd and Woolf, 2000, Pain 87:149), chronic constriction injury (Bennett, 1993 Muscle Nerve 16: 1040), toxic neuropathies, such as diabetes (streptozocin model), pyridoxine neuropathy, taxol, vincristine and other antineoplastic agent-induced neuropathies, ischaemia to a nerve, peripheral neuritis models (e.g., CFA applied perineurally), models of postherpetic neuralgia using HSV infection. Such neuropathic pain models are also referred to herin as a “nerve injury pain model”. The outcome of these neuropathic or nerve injury “pain models” can be measured using behavioral, electrophysiological, and/or neurochemical criteria as described above.

[0125] In addition, a “pain model” refers to those tests that mimic central neuropathic pain using lesions of the central nervous system. For example, central neuropathic pain may be modeled by mechanical compressive, ischemic, infective, or chemical injury to the spinal cord of an animal. The outcome of such a model is measured using the behavioral, electrophysiological, and/or neurochemical criteria described above.

Identification of Nucleic Acid Sequences Differentially Expressed in Pain

[0126] In one embodiment, the present invention provides isolated nucleic acid sequences which are differentially regulated in an animal which has been subjected to neuropathic pain relative to an animal not subjected to neuropathic pain, and a method for identifying such sequences. The present invention provides a method for identifying a nucleotide sequence which is differentially regulated in an animal subjected to pain, comprising: hybridizing a nucleic acid sample corresponding to RNA obtained from the animal to a nucleic acid sample comprising one or more nucleic acid molecules of known identity; and measuring the hybridization of the nucleic acid sample to the one or more nucleic acid molecules of known identity, wherein a 1.4 fold difference in the hybridization of the nucleic acid sample to the one or more nucleic acid molecules of known identity relative to a nucleic acid sample obtained from an animal which has not been subjected to the same pain is indicative of the differential expression of the nucleotide sequence in an animal subjected to pain. Alternatively, the invention provides a method for identifying a nucleotide sequence which is differentially regulated in an animal subjected to pain, comprising: hybridizing at least three replicates of a nucleic acid sample corresponding to RNA obtained from the animal to at least three replicates of a nucleic acid sample comprising one or more nucleic acid molecules of known identity and measuring the hybridization of the nucleic acid sample to the one or more nucleic acid molecules of known identity for each of said replicates. A 1.2 fold difference in the hybridization, and a p-value of less than 0.05 across the replicates, of the nucleic acid sample to the one or more nucleic acid molecules of known identity relative to a nucleic acid sample obtained from an animal which has not been subjected to pain is indicative of the differential expression of the nucleotide sequence in the animal subjected to pain

[0127] Generally, the present invention provides a method for identifying nucleic acid sequences which are differentially regulated in an animal which has been subjected to pain comprising isolating messenger RNA from an animal, generating cRNA from the mRNA sample, hybridizing the cRNA to a microarray comprising a plurality of nucleic acid molecules stably associated with discrete locations on the array, and identifying patterns of hybridization of the cRNA to the array. According to the present invention, a nucleic acid molecule which hybridizes to a given location on the array is said to be differentially regulated if the hybridization signal is at least 1.4 fold higher or lower than the hybridization signal at the same location on an identical array hybridized with a nucleic acid sample obtained from an animal that has not been subjected to pain. Alternatively, at least three independent replicate RNA samples are generated and hybridized to at least three replicate arrays, such that statistical significance may be confered to the fold change in expression of a sequence in an animal subjected to pain relative to an animal not subjected to pain, wherien a 1.2 fold change in expression and a p-value of less than 0.05 is indicative of differential expression.

[0128] Nucleic Acid Samples

[0129] Nucleic acid samples to be examined for differentially regulated sequences may be obtained from animals using techniques that are well described in the art. In a preferred embodiment of the invention, the animal from which the nucleic acid is obtained is a pain model. In one embodiment, an animal pain model is an experimental model which tests the sensitivity of normal animals to intense or noxious stimuli. These tests include responses to thermal, mechanical, or chemical stimuli. Thermal stimuli is usually hot (42 to 55° C.) and includes radiant heat to the tail (the tail flick test) radiant heat to the plantar surface of the hindpaw (the Hargreaves test, supra), the hotplate test, and immersion of the hindpaw or tail in hot water. Alternatively, thermal stimuli can be cold stimulus (30° to −10° C.), such as immersion in cold water, acetone evaporation or cold plate tests which may be used to test cold pain responsiveness using the thresholds discussed above. The end points are latency to response and the duration of the response as well as vocalization and licking the paw, as described above. Mechanical stimuli typically involves measurements of the threshold for eliciting a withdrawal reflex of the hindpaw to graded strength monofilament von Frey hairs wherein one can measure the force of the filament required to elicit a reflex. Alternatively, mechanical stimuli can be a sustained pressure stimulus to a paw (e.g., the Ugo Basila analgesiometer). The duration of response to a standard pin prick can also be measured. Threshold values for identifying a stimulus that causes “pain” to the animal are described above. Chemical Stimuli typically involves the application or injection of a chemical irritant to the skin, muscle joints or internal organs like the bladder or peritoneum. Irritants can include capsaicin, mustard oil, bradykinin, ATP, formalin, or acetic acid. The outcome measures include vocalization, licking the paw, writhing or spontaneous flexion. In an alternate embodiment, the animal pain model is designed to measure changes in the excitability of the peripheral or central components of the pain neural pathway pain sensitization, termed peripheral sensitization and central sensitization. Peripheral Sensitization involves changes in the threshold and responsiveness of high threshold nociceptors which can be induced by: repeated heat stimuli, or application or injection of sensitizing chemicals (e.g. prostaglandins, bradykinin, histamine, serotonin, capsaicin, mustard oil). The outcome measures are thermal and mechanical sensitivity in the area of application/stimulation using the techniques described above in behaving animals or electrophysiological measurements of single sensory fiber receptive field properties either in vivo or using isolated skin nerve preparations. Central sensitization involves changes in the excitability of neurons in the central nervous system induced by activity in peripheral pain fibers. Central sensitization can be induced by noxious stimuli (e.g., heat) chemical irritants (e.g., injection/application of capsaicin/mustard oil or formalin or electrical activation of sensory fibers). The outcome measures are: behavioral, electrophysiological, and neurochemical. In a further embodiment, the animal pain model is an experimental model that measures the effect of peripheral inflammation on pain sensitivity. The inflammation can be produced by injection of an irritant such as complete Freunds adjuvant, carrageenan, turpentine, croton oil etc into the skin, subcutaneously, into a muscle into a joint or into a visceral organ using doses and administration techniques that are well known in the art. Production of a controlled UV light burn and ischaemia can also be used. Administration of cytokines or inflammatory mediators such as lipopolysaccharide (LPS), or nerve growth factor (NGF) can mimic the effects of inflammation. The outcome of these models may also be measured as behavioral, electrophysiological, and/or neurochemical changes.

[0130] In a preferred embodiment, the animal pain model is a model that mimic peripheral neuropathic pain using lesions of the peripheral nervous system (i.e., a nerve injury model). Examples of such lesions include, but are not limited to complete transection of a peripheral nerve (axotomy; Watson, 1973, J. Physiol. 231:41), liagation of a spinal segmental nerve (Kim and Chung, 1992, Pain, 50:355-63), partial nerve injury (Seltzer, 1979, Pain, 29: 1061), Spared Nerve Injury model (Decosterd and Woolf, 2000, Pain 87:149), chronic constriction injury (Bennett, 1993 Muscle Nerve 16: 1040), toxic neuropathies, such as diabetes (streptozocin model), pyridoxine neuropathy, taxol, vincristine and other antineoplastic agent-induced neuropathies, ischaemia to a nerve, peripheral neuritis models (e.g., CFA applied perineurally), models of postherpetic neuralgia using HSV infection. The outcome of these neuropathic pain models can be measured using behavioral, electrophysiological, and/or neurochemical criteria as described above. Alternatively, the neuropathic animal pain model may be one which mimics central neuropathic pain using lesions of the central nervous system. For example, central neuropathic pain may be modeled by mechanical compressive, ischemic, infective, or chemical injury to the spinal cord of an animal. The outcome of such a model is measured using the behavioral, electrophysiological, and/or neurochemical criteria described above.

[0131] In a further preferred embodiment, the animal pain model is a model which mimics inflammation using injectable irritants and/or inflammatory mediators. Examples of such models include animals which are injected with, for example complete Freunds adjuvant (CFA), carrageenan, turpentine, croton oil, cytokines, lippopolysoccharide (LPS), or nerve growth factor (NGF) (Stein et al., 1988 Pharmacol Biochem Behav 31:445; Woolf et al., 1994, Neuroscience, 62: 327). The outcome of inflammation pain model can be measured using behavioral, electrophysiological, and/or neurochemical criteria as described above.

[0132] Alternatively, nucleic acid samples may be obtained from animals which are not pain models, but which have been subjected to pain as a result of traumatic injury, infection, genetic, or congenital birth defects, and the like. In addition, nucleic acid samples may be obtained from an animal which is not a pain model, and which has not been subjected to pain as a result of a traumatic injury, or infection. Such an animal is termed a “naïve” animal, and the expression of nucleic acid sequences in the naïve animal can be compared to the expression of the same nucleic acid molecules in animals subjected to pain to determine differential expression.

[0133] Nucleic acid samples, useful in the present invention for determining differential expression of nucleic acid sequences in an animal subjected to pain may be obtained from any cell of the animal. In a preferred embodiment, the nucleic acid is obtained from one or more sensory neurons of the animal. In a further preferred embodiment the nucleic acid is obtained from the primary sensory neurons of the dorsal root ganglion or dorsal horn of the spinal cord. However, nucleic acid may be obtained from other neurons including, but not limited to cranial nerve nuclei, peripheral and/or central autonomic neurons, enteric neurons, thalamic neurons, and neurons of sensory regions of the cortex such as primary sensory cortex.

[0134] Sensory neurons may be obtained from an animal using techniques that are well established in the art. For example, in embodiments where nucleic acid samples are to be obtained from rat dorsal root ganglion (DRG) neurons, rats (whether naïve or pain models) are rapidly killed by decapitation and the DRG is dissected, removed and quickly snap-frozen on a bed of crushed dry ice, or in liquid nitrogen. RNA is then extracted from the tissues, also using techniques that are well known in the art (see, for example, Ausubel supra). For example, the tissue is prepared by homogenization in a glass teflon homogenizer in 1 ml denaturing solution (4M guanidinium thiosulfate, 25 mM sodium citrate, pH 7.0, 0.1M 2-ME, 0.5% (w/v) N-laurylsarkosine) per 100 mg tissue. Following transfer of the homogenate to a 5-ml polypropylene tube, 0.1 ml of 2 M sodium acetate, pH 4, 1 ml water-saturated phenol, and 0.2 ml of 49:1 chloroform/isoamyl alcohol are added sequentially. The sample is mixed after the addition of each component, and incubated for 15 min at 0-4° C. after all components have been added. The sample is separated by centrifugation for 20 min at 10,000×g, 4° C., precipitated by the addition of 1 ml of 100% isopropanol, incubated for 30 minutes at −20° C. and pelleted by centrifugation for 10 minutes at 10,000×g, 4° C. The resulting RNA pellet is dissolved in 0.3 ml denaturing solution, transferred to a microfuge tube, precipitated by the addition of 0.3 ml of 100% isopropanol for 30 minutes at −20° C., and centrifuged for 10 minutes at 10,000×g at 4° C. The RNA pellet is washed in 70% ethanol, dried, and resuspended in 100-200 μl DEPC-treated water or DEPC-treated 0.5% SDS (Chomczynski and Sacchi, 1987, Anal. Biochem., 162: 156).

[0135] Alternatively, total RNA may be extracted from tissues useful in the present invention using Trizol reagent (Invitrogen, Carlsbad, Calif.), following the manufacturers instructions. Purity and integrity of RNA is assessed by absorbance at 260/280 nm and separation of RNA samples on a 1% agarose gel followed by inspection under ultraviolet light.

[0136] Following total RNA isolation from tissues or cell of an animal useful in the present invention, the RNA is converted to cRNA for use in array hybridization. The preparation of cRNA is well-known and well-documented in the prior art.

[0137] In an alternate embodiment, the total RNA is converted to cDNA for use in array hybridization. cDNA may be prepared according to the following method. Total cellular RNA is isolated (as described) and passed through a column of oligo(dT)-cellulose to isolate polyA RNA. The bound polyA mRNAs are eluted from the column with a low ionic strength buffer. To produce cDNA molecules, short deoxythymidine oligonucleotides (12-20 nucleotides) are hybridized to the polyA tails to be used as primers for reverse transcriptase, an enzyme that uses RNA as a template for DNA synthesis. Alternatively, mRNA species are primed from many positions by using short oligonucleotide fragments comprising numerous sequences complementary to the mRNA of interest as primers for cDNA synthesis. The resultant RNA-DNA hybrid is converted to a double stranded DNA molecule by a variety of enzymatic steps well-known in the art (Watson et al., 1992, Recombinant DNA, 2nd edition, Scientific American Books, New York).

[0138] Microarray Analysis

[0139] In one embodiment, the present invention provides a method for the identification of differentially expresses nucleic acid sequences in pain in which cDNA obtained from sensory neurons of animals subjected to pain is hybridized to a polynucleotide microarray of known genes or ESTs and the hybridization levels of the cDNA to the polynucleotide microarray are measured.

[0140] Microarrays, useful in the identification of differentially expressed nucleic acid sequences, may be any microarray known in the art which comprises known sequences. A polynucleotide microarray refers to a plurality of unique nucleic acids attached to one surface of a solid support at a density exceeding 20 different nucleic acids/cm² wherein each of the nucleic acids is attached to the surface of the solid support in a non-identical preselected region. In one embodiment, the nucleic acid attached to the surface of the solid support is DNA. In a preferred embodiment, the nucleic acid attached to the surface of the solid support is cDNA. In another preferred embodiment, the nucleic acid attached to the surface of the solid support is cDNA synthesized by polymerase chain reaction (PCR). Preferably, a nucleic acid comprising an array, according to the invention, is at least 20 nucleotides in length. Preferably, a nucleic acid comprising an array is less than 6,000 nucleotides in length. More preferably, a nucleic acid comprising an array is less than 500 nucleotides in length. In one embodiment, the array comprises at least 500 different nucleic acids attached to one surface of the solid support. In another embodiment, the array comprises at least 10 different nucleic acids attached to one surface of the solid support. In yet another embodiment, the array comprises at least 10,000 different nucleic acids attached to one surface of the solid support.

[0141] In a preferred embodiment, the microarray comprises known nucleic acid molecules stably associated with discrete predefined regions, and which are obtained from an animal of the same species as the animal which had been subjected to pain and from which the nucleic acid sample to be tested is obtained. In a preferred embodiment, the microarray is a commercially available microarray which may be obtained from a commercial source such as Affymetrix (Santa Clara, Calif.). For example, in one embodiment nucleic acid samples are obtained from a rat pain model and are hybridized to a polynucleotide microarray comprising known rat gene sequences and ESTs. In a further preferred embodiment, the microarray is an Affymetrix Gene Chip® array including, but not limited to the human U95 array, the murine U74 array, and the rat U34 array.

[0142] In one embodiment three independent replicate nucleic acid samples are prepared from three separate pain model animals (for tissues with a low abundance of nerve cells, such as the DRG, samples from several animals may be pooled to generate a single replicate) are hybridized to at least three replicate polynucleotide arrays, such that a statistical analysis may be performed on the resulting hybridization levels.

[0143] Sample Preparation

[0144] Prior to hybridization of nucleic acid to the polynucleotide microarray, the nucleic acid samples must be prepared to facilitate subsequent detection of hybridization. The nucleic acid samples obtained from animals that have been subjected to pain (and from naïve animals for the determination of differential expression) are referred to as “probes” for the microarray and are capable of binding to a polynucleotide or nucleic acid member of complementary sequence through one or more types of chemical bonds, usually through complementary base pairing, usually through hydrogen bond formation.

[0145] As used herein, a polynucleotide derived from an mRNA transcript refers to a polynucleotide for which synthesis of the mRNA transcript or a subsequence thereof has ultimately served as a template. Thus, a cDNA reverse transcribed from an mRNA, an RNA transcribed from that cDNA, a DNA amplified from the cDNA, an RNA transcribed from the amplified DNA, etc., are all derived from the mRNA transcript and detection of such derived products is indicative of the presence and/or abundance of the original transcript in a sample. Thus, suitable target nucleic acid samples include, but are not limited to, mRNA transcripts of a gene or genes, cDNA reverse transcribed from the mRNA, cRNA transcribed from the cDNA, DNA amplified from a gene or genes, RNA transcribed from amplified DNA, and the like. The polynucleotide probes used herein are preferably derived from sensory neurons of an animal that has been subjected to pain.

[0146] In the simplest embodiment, such a polynucleotide probe comprises total mRNA or a nucleic acid sample corresponding to mRNA (e.g., cDNA) isolated from sensory neurons, ganglia, nuclei, or brain tissue. In another embodiment, the total mRNA is isolated from a given sample using, for example, an acid guanidinium-phenol-chloroform extraction method and polyA+ mRNA is isolated by oligo dT column chromatography or by using (dT)n magnetic beads (see, e.g., Sambrook et al., Molecular Cloning: A Laboratory Manual (2nd ed.), Vols. 1-3, Cold Spring Harbor Laboratory, (1989), or Current Protocols in Molecular Biology, F. Ausubel et al., ed. Greene Publishing and Wiley-Interscience, New York (1987). In a preferred embodiment, total RNA is extracted using TRIzol reagent (GIBCO/BRL). Purity and integrity of RNA is assessed by absorbance at 260/280 nm and agarose gel electrophoresis followed by inspection under ultraviolet light.

[0147] In some embodiments, it is desirable to amplify the probe nucleic acid sample prior to hybridization, for example, when total RNA is obtained from a small population of neurons. One of skill in the art will appreciate that whatever amplification method is used, if a quantitative result is desired, care must be taken to use a method that maintains or controls for the relative frequencies of the amplified polynucleotides. Methods of “quantitative” amplification are well known to those of skill in the art. For example, quantitative PCR involves simultaneously co-amplifying a known quantity of a control sequence using the same primers. This provides an internal standard that may be used to calibrate the PCR reaction. The high density array may then include probes specific to the internal standard for quantification of the amplified polynucleotide. Detailed protocols for quantitative PCR are provided in PCR Protocols, A Guide to Methods and Applications, Innis et al., Academic Press, Inc. N.Y., (1990).

[0148] Other suitable amplification methods include, but are not limited to polymerase chain reaction (PCR) (Innis, et al., PCR Protocols. A guide to Methods and Application. Academic Press, Inc. San Diego, (1990)), ligase chain reaction (LCR) (see Wu and Wallace, Genomics, 4: 560 (1989), Landegren, et al., Science, 241: 1077 (1988) and Barringer, et al., Gene, 89: 117 (1990), transcription amplification (Kwoh, et al., Proc. Natl. Acad. Sci. USA, 86: 1173 (1989)), and self-sustained sequence replication (Guatelli, et al., Proc. Nat. Acad. Sci. USA, 87: 1874 (1990)).

[0149] In a particularly preferred embodiment, the probe nucleic acid sample mRNA is reverse transcribed with a reverse transcriptase and a primer consisting of oligo dT and a sequence encoding the phage T7 promoter to provide single stranded DNA template. The second DNA strand is polymerized using a DNA polymerase. After synthesis of double-stranded cDNA, T7 RNA polymerase is added and RNA is transcribed from the cDNA template. Successive rounds of transcription from each single cDNA template results in amplified RNA. Methods of in vitro polymerization are well known to those of skill in the art (see, e.g., Sambrook, supra.) and this particular method is described in detail by Van Gelder, et al., Proc. Natl. Acad. Sci. USA, 87: 1663-1667 (1990) who demonstrate that in vitro amplification according to this method preserves the relative frequencies of the various RNA transcripts. Moreover, Eberwine et al. Proc. Natl. Acad. Sci. USA, 89: 3010-3014 provide a protocol that uses two rounds of amplification via in vitro transcription to achieve greater than 106 fold amplification of the original starting material thereby permitting expression monitoring even where biological samples are limited.

[0150] In order to measure the hybridization of a probe nucleic acid to a polynucleotide array to determine differential expression, the probe nucleic acid is preferable labeled with a detectable label. Any analytically detectable marker that is attached to or incorporated into a molecule may be used in the invention. An analytically detectable marker refers to any molecule, moiety or atom which is analytically detected and quantified.

[0151] Detectable labels suitable for use in the present invention include any composition detectable by spectroscopic, photochemical, biochemical, immunochemical, electrical, optical or chemical means. Useful labels in the present invention include biotin for staining with labeled streptavidin conjugate, magnetic beads (e.g., Dynabeads™), fluorescent dyes (e.g., fluorescein, texas red, rhodamine, green fluorescent protein, and the like), radiolabels (e.g., ³H, ¹²⁵I, 35S, ¹⁴C, or ³²P), enzymes (e.g., horse radish peroxidase, alkaline phosphatase and others commonly used in an ELISA), and calorimetric labels such as colloidal gold or colored glass or plastic (e.g., polystyrene, polypropylene, latex, etc.) beads. Patents teaching the use of such labels include U.S. Pat. Nos. 3,817,837; 3,850,752; 3,939,350; 3,996,345; 4,277,437; 4,275,149; and 4,366,241.

[0152] Means of detecting such labels are well known to those of skill in the art. Thus, for example, radiolabels may be detected using photographic film or scintillation counters, fluorescent markers may be detected using a photodetector to detect emitted light. Enzymatic labels are typically detected by providing the enzyme with a substrate and detecting the reaction product produced by the action of the enzyme on the substrate, and calorimetric labels are detected by simply visualizing the colored label.

[0153] The labels may be incorporated by any of a number of means well known to those of skill in the art. However, in a preferred embodiment, the label is simultaneously incorporated into the probe during the amplification step in the preparation of the probe polynucleotides. Thus, for example, polymerase chain reaction (PCR) with labeled primers or labeled nucleotides will provide a labeled amplification product. In a preferred embodiment, transcription amplification, as described above, using a labeled nucleotide (e.g. fluorescein-labeled UTP and/or CTP) incorporates a label into the transcribed polynucleotides.

[0154] Alternatively, a label may be added directly to the original polynucleotide sample (e.g., mRNA, polyA mRNA, cDNA, etc.) or to the amplification product after the amplification is completed. Means of attaching labels to polynucleotides are well known to those of skill in the art and include, for example nick translation or end-labeling (e.g. with a labeled RNA) and subsequent attachment (ligation) of a polynucleotide linker joining the sample polynucleotide to a label (e.g., a fluorophore).

[0155] In a preferred embodiment, the fluorescent modifications are by cyanine dyes e.g. Cy-3/Cy-5 dUTP, Cy-3/Cy-5 dCTP (Amersham Pharmacia) or alexa dyes (Khan, J., Simon, R., Bittner, M., Chen, Y., Leighton, S. B., Pohida, T., Smith, P. D., Jiang, Y., Gooden, G. C., Trent, J. M. & Meltzer, P. S. (1998) Cancer Res. 58, 50095013.).

[0156] In a preferred embodiment, a probe nucleic acid obtained from an animal that has been subjected to pain and a nucleic acid sample obtained from an animal not subjected to pain are co-hybridized to the polynucleotide array. In this embodiment, the two probe samples used for comparison are labeled with different fluorescent dyes which produce distinguishable detection signals, for example, probes made from an animal pain model are labeled with Cy5 and probes made from a naïve animal are labeled with Cy3. The differently labeled target samples are hybridized to the same microarray simultaneously. In a preferred embodiment, the labeled targets are purified using methods known in the art, e.g., ethanol purification or column purification.

[0157] In a preferred embodiment, the probes will include one or more control molecules which hybridize to control sequences on the microarray to normalize signals generated from the microarray. Labeled normalization targets are polynucleotide sequences that are perfectly complementary to control oligonucleotides that are spotted onto the microarray. The signals obtained from the normalization controls after hybridization provide a control for variations in hybridization conditions, label intensity, “reading” efficiency and other factors that may cause the signal of a perfect hybridization to vary between arrays. In a preferred embodiment, signals (e.g., fluorescence intensity) read from all other probes in the array are divided by the signal (e.g., fluorescence intensity) from the control probes thereby normalizing the measurements.

[0158] Preferred normalization probes are selected to reflect the average length of the other probes present in the sample, however, they are selected to cover a range of lengths. The normalization control(s) can also be selected to reflect the (average) base composition of the other probes in the array, however in a preferred embodiment, only one or a few normalization probes are used and they are selected such that they hybridize well (i.e. no secondary structure) and do not match any other probe molecules.

[0159] Hybridization to Polynucleotide Arrays

[0160] To determine the differential expression of a nucleic acid sequence in an animal subjected to pain, labeled probe nucleic acids are hybridized to a polynucleotide array comprising polynucleotides of known sequence or identity. Polynucleotide hybridization involves providing a denatured probe and target polynucleotide under conditions where the probe nucleic acid member and its complementary target can form stable hybrid duplexes through complementary base pairing. The polynucleotides that do not form hybrid duplexes are then washed away leaving the hybridized polynucleotides to be detected, typically through detection of an attached detectable label. It is generally recognized that polynucleotides are denatured by increasing the temperature or decreasing the salt concentration of the buffer containing the polynucleotides. Under low stringency conditions (e.g., low temperature and/or high salt) hybrid duplexes (e.g., DNA:DNA, RNA:RNA, or RNA:DNA) will form even where the annealed sequences are not perfectly complementary. Thus specificity of hybridization is reduced at lower stringency. Conversely, at higher stringency (e.g., higher temperature or lower salt) successful hybridization requires fewer mismatches.

[0161] The invention provides for hybridization conditions comprising the Dig (digoxygenin) hybridization mix (Boehringer); or formamide-based hybridization solutions, for example as described in Ausubel et al., supra and Sambrook et al. supra.

[0162] Alternatively, as described above, a preferred embodiment of the present invention comprises hybridizing probe nucleic acid molecules to an Affymetrix Gene Chip®. In this embodiment, hybridization of the probe nucleic acid molecules to the polynucleotide array is carried out according to the manufacturers instructions.

[0163] Methods of optimizing hybridization conditions are well known to those of skill in the art (see, e.g., Laboratory Techniques in Biochemistry and Molecular Biology, Vol. 24: Hybridization With Polynucleotide Probes, P. Tijssen, ed. Elsevier, N.Y., (1993)).

[0164] Following hybridization, non-hybridized labeled or unlabeled polynucleotide is removed from the support surface, conveniently by washing, thereby generating a pattern of hybridized probe polynucleotide on the substrate surface. A variety of wash solutions are known to those of skill in the art and may be used. The resultant hybridization patterns of labeled, hybridized oligonucleotides and/or polynucleotides may be visualized or detected in a variety of ways, with the particular manner of detection being chosen based on the particular label of the test polynucleotide, where representative detection means include scintillation counting, autoradiography, fluorescence measurement, calorimetric measurement, light emission measurement and the like. In the preferred embodiment, in which the probe nucleic acid is hybridized to an Affymetrix Gene Chip®, the hybridization pattern of the probe nucleic acid molecules is detected and measured according to the Affymetrix protocol, and using Affymetrix instrumentation.

[0165] Following hybridization and any washing step(s) and/or subsequent treatments, as described above, the resultant hybridization pattern is detected. In detecting or visualizing the hybridization pattern, the intensity or signal value of the label will be not only be detected but quantified, by which is meant that the signal from each spot of the hybridization will be measured and compared to a unit value corresponding to the signal emitted by a known number of end labeled target polynucleotides to obtain a count or absolute value of the copy number of each end-labeled target that is hybridized to a particular spot on the array in the hybridization pattern.

[0166] Expression Analysis

[0167] Methods for analyzing the data collected from hybridization to arrays are well known in the art. For example, where detection of hybridization involves a fluorescent label, data analysis can include the steps of determining fluorescent intensity as a function of substrate position from the data collected, removing outliers, i.e., data deviating from a predetermined statistical distribution, and calculating the relative binding affinity of the test polynucleotides from the remaining data. The resulting data is displayed as an image with the intensity in each region varying according to the binding affinity between associated oligonucleotides and/or polynucleotides and the test polynucleotides.

[0168] According to the present invention, there are three sets of measurements which may be used to determine differential expression of a polynucleotide obtained from an animal subjected to pain relative to an animal not subjected to pain. In one embodiment, differential expression may be determined by measuring the intensity ratio, as defined above, wherein a +/−1.4 fold change or greater in the intensity ratio is indicative of differential expression. In a preferred embodiment, differential expression may be determined by measuring the Affymetrix ratio using the software suite and manufacturers protocols, available from Affymetrix (Santa Clara, Calif.), wherein a change in expression of +/−1.4 fold or greater is indicative of differential expression.

[0169] In another preferred embodiment, differential expression of sequences can be established if they are differentially expressed by at least 1.2 fold, with a p-value of less than 0.05, in a statistical analysis of triplicate array data points using an appropriate statistical analysis, such as the student's t-test.

[0170] For example, Table 2 represents a composite of all those genes which were originally identified as differentially regulated by at least 1.4 fold in either SNI or axotomy pain models. Differential expression was subsequently evaluated in at least three replicate arrays using at least three replicate nucleic acid samples obtained from the animal nerve injury and inflammation pain models. From the replicate screening method, polynucletoide sequences can be identified as differentially expressed which have a lower fold change (i.e., lower than 1.4 fold) in expression in an animal subjected to pain, provided that a statistical analysis of the replicate data yields a p-value of less than 0.05. Tables 6 and 7 below show an example of an experimental replicate scheme which may be used to obtain the data shown in Table 2. The animal pain model is indicated in the column labeled “animal model”, and the elapsed time followig the generation of the pain model (i.e., time post surgery) is indicated. Experiments can be performed on samples obtained from both dorsal horn (Table 6) and DRG (Table 7) tissues.

TABLE 6
Affimetrix microarray experiments

| | | | | | # | Total |
|---|---|---|---|---|---|---|
| | | | | | hybridization | # |
| Animal Model | Time Points | | | | exp | hybr. |
| CCI DH | 3 d | 7 d | 21 d | 40 d | 4 × 3 | 12 |
| Chung DH | 3 d | 7 d | 21 d | 40 d | 4 × 3 | 12 |
| SNI DH | 3 d | 7 d | 21 d | 40 d | 4 × 3 | 12 |
| Sham CCI = SNI DH | 3 d | 7 d | 21 d | none | 3 × 3 | 9 |
| Sham Chung DH | 3 d | 7 d | 21 d | none | 3 × 3 | 9 |
| Naïve DH | | | | | 1 × 3 | 3 |
| Total | | | | | | 57 |
| CFA injec. DH | 12 h | 24 h | 5 d | | 3 × 3 | 9 |
| Total | | | | | | 67 |

[0171] TABLE 7
Affimetrix microarray experiments

| | | | | | # hybridization |
|---|---|---|---|---|---|
| Animal Model | Time Points | | | exp | |
| CCCI DRG L4 | 3 d | 7 d | 21 d | 40 d | 4 × 3 |
| Chung DRG L4 | 3 d | 7 d | 21 d | 40 d | 4 × 3 |
| SNI DRG L4 | 3 d | 7 d | 21 d | 40 d | 4 × 3 |
| CCI DRG L5 | 3 d | 7 d | 21 d | 40 d | 4 × 3 |
| Chung DRG L5 | 3 d | 7 d | 21 d | 40 d | 4 × 3 |
| SNI DRG L5 | 3 d | 7 d | 21 d | 40 d | 4 × 3 |
| Sham CCI = SNI L4 + L5 | 3 d | 7 d | 21 d | none | 3 × 3 |
| Sham Chung L4 + L5 | 3 d | 7 d | 21 d | none | 3 × 3 |
| Naïve L4 | | | | | 1 × 3 |
| Naïve L5 | | | | | 1 × 3 |
| CFA injec. DRG (L4 + L5 | 12 h | 24 h | 5 d | | 3 × 3 |
| pool) | | | | | |
| Total | | | | | 105 |

DH = dorsal horn of the spinal cord
DRG = dorsal root ganglion
CCI = chronic constriction of the sciatic nerve
Chung = ligation of the spinal nerves L5 anf L6 (lombar region) distal to the correspondent dorsal root ganglions
SNI = spare nerve injury model (ligation and axotomy of the tibial and pereonal nerves)
CFA = injection in the paw of complete Freund's adijuvant (inflammatory pain model)

[0172] The nerve injury pain models represented are the Spinal segmental nerve injury (Chung), Chronic Constriction Injury (CCI) and Spared Nerve Injury (SNI) models at time points 3, 7, 21 and 40 days. The inflammatory model represented is intraplantar Complete Freund's Adjuvant (CFA) injection into the hind paw at 0.5, 1 and 5 days post injection. The tissue are lumbar DRGs and dorsal horn (i.e two tissues four models, 4 time points (3 for CFA)=30 different pain comparisons each in triplicate each compared against the appropriate control.

[0173] The following is an example of a detection protocol that may be used for the simultaneous analysis of two nucleic acid samples to be compared, wherein one sample is obtained from primary sensory neurons of an animal pain model and the other is obtained from primary sensory neurons of a naïve animal, and wherein each sample is labeled with a different fluorescent dye, such as Cy3 and Cy5. This type of protocol would produce an intensity ratio.

[0174] Each element of the microarray is scanned for the first fluorescent color. The intensity of the fluorescence at each array element is proportional to the expression level of that nucleic acid sequence in the sample.

[0175] The scanning operation is repeated for the second fluorescent label. The ratio of the two fluorescent intensities provides a highly accurate and quantitative measurement of the relative gene expression level in the two primary sensory neuron samples.

[0176] In a preferred embodiment, fluorescence intensities of the immobilized target nucleic acid sequences can be determined from images taken with a custom confocal microscope equipped with laser excitation sources and interference filters appropriate for the Cy3 and Cy5 fluorophores. Separate scans were taken for each fluorophore at a resolution of 225 μm² per pixel and 65,536 gray levels. Image segmentation to identify areas of hybridization, normalization of the intensities between the two fluorophore images, and calculation of the normalized mean fluorescent values at each target are as described (Khan, J., Simon, R., Bittner, M., Chen, Y., Leighton, S. B., Pohida, T., Smith, P. D., Jiang, Y., Gooden, G. C., Trent, J. M. & Meltzer, P. S. (1998) Cancer Res. 58, 50095013. Chen, Y., Dougherty, E. R. & Bittner, M. L. (1997) Biomed. Optics 2, 364374). Normalization between the images is used to adjust for the different efficiencies in labeling and detection with the two different fluorophores. This is achieved by equilibrating to a value of (1) the signal intensity ratio of a set of internal control genes spotted on the array.

[0177] Following detection or visualization, the hybridization pattern is used to determine quantitative information about the genetic profile of the labeled probe polynucleotide sample that was contacted with the array to generate the hybridization pattern, as well as the physiological source from which the labeled probe polynucleotide sample was derived. By genetic profile is meant information regarding the types of polynucleotides present in the sample, e.g. in terms of the types of genes to which they are complementary, as well as the copy number of each particular polynucleotide in the sample. From this data, one can also derive information about the physiological source from which the target polynucleotide sample was derived, such as the types of genes expressed in the tissue or cell which is the physiological source, as well as the levels of expression of each gene, particularly in quantitative terms.

[0178] In a particularly preferred embodiment, where it is desired to quantify the transcription level (and thereby expression) of one or more polynucleotide sequences in a sample, the probe nucleic acid sample is one in which the concentration of the mRNA transcript(s) of the gene or genes, or the concentration of the polynucleotides derived from the mRNA transcript(s), is proportional to the transcription level (and therefore expression level) of that gene. Similarly, it is preferred that the hybridization signal intensity be proportional to the amount of hybridized polynucleotide. While it is preferred that the proportionality be relatively strict (e.g., a doubling in transcription rate results in a doubling in mRNA transcript in the sample polynucleotide pool and a doubling in hybridization signal), one of skill will appreciate that the proportionality is more relaxed and even non-linear. Thus, for example, an assay where a 5 fold difference in concentration of the probe mRNA results in a 3 to 6 fold difference in hybridization intensity is sufficient for most purposes. Where more precise quantification is required appropriate controls are run to correct for variations introduced in sample preparation and hybridization as described herein. In addition, serial dilutions of “standard” probe mRNAs are used to prepare calibration curves according to methods well known to those of skill in the art. Of course, where simple detection of the presence or absence of a transcript is desired, no elaborate control or calibration is required.

[0179] For example, if a microarray nucleic acid member is not labeled after hybridization, this indicates that the gene comprising that nucleic acid member is not expressed in either sample. If a nucleic acid member is labeled with a single color, it indicates that a labeled gene was expressed only in one sample. The labeling of a nucleic acid member comprising an array with both colors indicates that the gene was expressed in both samples. Even genes expressed once per cell are detected (1 part in 100,000 sensitivity). A 1.4-fold or greater difference in expression intensity in the two samples being compared is indicative of differential expression.

[0180] Verification of Differential Expression

[0181] The above methods result in the identification, using polynucleotide arrays comprising polynucleotides of known sequences, of nucleic acid molecules that are differentially expressed in an animal subjected to pain. Following the initial identification of such sequences using the microarrays, however, the differential expression is validated using techniques that are well known in the art.

[0182] In one embodiment, following identification of a 1.4 fold or greater difference in hybridization intensity in the sample obtained from an animal subjected to pain relative to a naïve animal, reverse transcription PCR (RT-PCR) is performed using primers specific for the hybridizing sequence. For example, given that the identity and sequence of each nucleic acid comprising the polynucleotide array is known, if probe nucleic acid hybridizes at a given position on the array, one of skill in the art can design primers based on the sequence of the nucleic acid known to be at that position, which can then be used to amplify the known sequence from the original nucleic acid sample obtained from the animal. The technique of designing primers for PCR amplification is well known in the art. Oligonucleotide primers and probes are 5 to 100 nucleotides in length, ideally from 17 to 40 nucleotides, although primers and probes of different length are of use. Primers for amplification are preferably about 17-25 nucleotides. Primers useful according to the invention are also designed to have a particular melting temperature (Tm) by the method of melting temperature estimation. Commercial programs, including Oligo™ (MBI, Cascade, Colo.), Primer Design and programs available on the internet, including Primer3 and Oligo Calculator can be used to calculate a Tm of a nucleic acid sequence useful according to the invention. Preferably, the Tm of an amplification primer useful according to the invention, as calculated for example by Oligo Calculator, is preferably between about 45 and 65° C. and more preferably between about 50 and 60° C. Preferably, the Tm of a probe useful according to the invention is 7° C. higher than the Tm of the corresponding amplification primers. It is preferred that, following generation of cDNA by RT-PCR, the cDNA fragment is cloned into an appropriate sequencing vector, such as a PCRII vector (TA cloning kit; Invitrogen). The identity of each cloned fragment is then confirmed by sequencing in both directions. It is expected that the sequence obtained from sequencing would be the same as the known sequence originally spotted on the polynucleotide array.

[0183] In one embodiment, following sequence confirmation of the identity of the differentially expressed polynucleotide, the differential expression of the polynucleotide in sensory neurons of an animal subjected to pain relative to a naïve animal is confirmed by Northern analysis. Sequence confirmed cDNAs are used to produce ³²P-labeled cDNA probes using techniques well known in the art (see, for example, Ausubel, supra), or commercially available kits (Prime-It Kit, Stratagene, La Jolla, Calif.). Northern analysis of total RNA obtained from naïve animals and animals subjected to pain is then performed using classically described techniques. For example, total RNA samples are denatured with formaldehyde/formamide and run for two hours in a 1% agarose, MOPS-acetate-EDTA gel. RNA is then transferred to nitrocellulose membrane by upward capillary action and fixed by UV cross-linkage. Membranes are pre-hybridized for at least 90 minutes and hybridized overnight at 42° C. Post hybridization washes are performed as known in the art (Ausubel, supra). The membrane is then exposed to x-ray film overnight with an intensifying screen at −80° C. Labeled membranes are then visualized after exposure to film. The signal produced on the x-ray film by the radiolabeled cDNA probes can then be quantified using any technique known in the art, such as scanning the film and quantifying the relative pixel intensity using a computer program such as NIH Image (National Institutes of Health, Bethesda, Md.), wherein at least a 2 fold, preferably a 1.4 fold increase or decrease in the hybridization intensity of the radiolabeled probe obtained from the animal subjected to pain relative to the naïve animal validates the differential expression observed using the polynucleotide microarray.

[0184] In an alternate embodiment, the differential expression of polynucleotide sequences, first identified using the polynucleotide microarrays is verified using the Taqman™ (Perkin-Elmer, Foster City, Calif.) techniques, which is performed with a transcript-specific antisense probe. This probe is specific for the PCR product (e.g. a nucleic acid sequence identified using the microarray as being differentially regulated) and is prepared with a quencher and fluorescent reporter probe complexed to the 5′ end of the oligonucleotide. Different fluorescent markers can be attached to different reporters, allowing for measurement of two products in one reaction. When Taq DNA polymerase is activated, it cleaves off the fluorescent reporters by its 5′-to-3′ nucleolytic activity. The reporters, now free of the quenchers, fluoresce. The color change is proportional to the amount of each specific product and is measured by fluorometer; therefore, the amount of each color can be measured and the RT-PCR product can be quantified. The PCR reactions can be performed in 96 well plates so that samples derived from many individuals can be processed and measured simultaneously. The Taqman™ system has the additional advantage of not requiring gel electrophoresis and allows for quantification when used with a standard curve. Quantitative analysis of the mRNA levels for a given gene present in the originally obtained sample from an animal subjected to pain permits a determination of the differential expression of the particular mRNA relative to that obtained from a naïve animal. A fold increase or decrease in expression of a nucleic acid sequence from an animal subjected to pain of at least 2 relative to a naïve animal is indicative of differential expression, and is sufficient to validate the differential expression first identified using the polynucleotide microarray.

[0185] In a still further embodiment, the differential expression of a polynucleotide identified using microarray analysis is verified by in situ hybridization. Given that the sequence of each of the nucleic acid molecules on the microarray used to identify differential expression is known, labeled cDNA or antisense RNA probes can be generated using techniques which are known in the art (Ausubel et al., supra). The probes are then hybridized to fixed (e.g., fixed in 4% paraformaldehyde) thin (5-50 μm) tissue sections of, for example, the dorsal root ganglion. Briefly, prior to hybridization, the tissue sections are incubated in acetic anhydride, dehydrated in graded ethanols, and de-lipidated in chloroform. Tissue sections are then hybridized with one or more labeled probes for 24 hours at 45° C. Hybridized probe may be subsequently detected using techniques which are compatible with the label incorporated in the probe. The level of hybridization may be quantitated using any technique known to those of skill in the art. For example, the hybridization signal may be photographed, and the photograph scanned into a computer and the hybridization signal quantitated using software such as NIH Image (NIH, Bethesda, Md.). The measured level of hybridization may then be correlated with the differential expression level measured using the microarray analysis.

[0186] In a further embodiment, differential expression of sequences, identified based on the 1.4 fold theshold criteria, described above, can be verified as being differentially expressed if they are differentially expressed by at least 1.2 fold, with a p-value of less than 0.05, in a statistical analysis of triplicate array data points using an appropriate statistical analysis, such as a student's t-test.

Differentially Expressed Polynucleotides

[0187] The present invention provides polynucleotides and genes which are differentially expressed in an animal which has been subjected to pain relative to an animal not subjected to pain, wherein the differential expression is determined using the methods described above. Using the above methods a number of polynucleotides have been identified which are differentially expressed in an animal subjected to pain. These polynucleotides and their respecitve human homologs, as well as the polypeptide molecules encoded thereby are shown in Tables 1, 2, 3, 4, or 5.

[0188] Table 1 shows a group of differentially expressed polynucleotides and genes, several of which demonstrate an at least 1.4 fold change in expression in an animal subjected to pain in both axotomy and SNI pain models relative to naïve animals; indicated by the Fold Change of Axotomy/Naïve or SNI/Naïve. Those polynucleotides that are not differentially expressed by at least +/−1.4 fold are not considered to be differentially expressed according to the invention. The polynucleotides of Table 1 have been previously suggested to be involved in the mechanisms of pain and neuronal injury. The present invention, however, distinguishes these polynucleotides by providing a threshold of differential expression which is less than that previously accepted for such analysis.

[0189] Table 2 shows polynucletotides of the present invention which have been established as being differentially expressed by at least 1.4 fold in an axotomy, SNI, or inflammation animal pain model, and which have been further analyzed by triplicate analysis as shown in Tables 6 and 7. The polynucleotide sequences shown in Table 2 have been established herein as being differentially expressed by at least 1.2 fold, with a level of statistical significance of p<0.05 as determined by a student's t-test over at least three replicate assays (the replicate assay schemes are shown in Tables 6 and 7), in several animal pain models measured at several post operative time points. The nerve injury pain models represented are the Spinal segmental nerve injury (Chung), Chronic Constriction Injury (CCI) and Spared Nerve Injury (SNI) models at time points 3, 7, 21 and 40 days. The inflammatory model represented is intraplantar Complete Freund's Adjuvant (CFA) injection in to the hind paw at 0.5, 1, and 5 days post injection. The tissue are lumbar DRGs and dorsal horn (i.e two tissues four models, 4 time points (3 for CFA)=30 different pain comparisons each in triplicate each compared against the appropriate control.

[0190] Table 3 shows polynucleotide sequences of the present invention which have been established as being differentially expressed by at least 1.4 fold, but which have not attained a statistical significance of p<0.05 according to the triplicate analysis scheme shown in Tables 6 and 7. The polynucleotide sequence shown in Table 3, however, are considered to be “differentially expressed” according to the present invention, dispite the fact that the the triplicate analysis has not established a significance of p<0.05.

[0191] Table 4 shows polynucleotides of the present invention which are upregulated by at least 1.4 fold in a rat inflammation pain model as indicated by either or both of the Intensity Ratio Naïve/SNI or Affymetrix Ratio data column, and which have not been previously suggested to be involved in the cellular response to pain.

[0192] Table 5 shows polynucleotides of the present invention which are downregulated by at least 1.4 fold in a rat inflammation pain model as indicated by either or both of the Intensity Ratio Naïve/SNI or Affymetrix Ratio data column, and which have not been previously suggested to be involved in the cellular response to pain. The data in tables 4 and 5 represents an average of the Intensity Ratios and Affymetrix Ratios obtained from inflammation pain models at 3 hours, 6 hours, 12 hours, 24 hours, 48 hours and 5 days following induction of inflammation.

[0193] As indicated in the tables, the column labeled “% homology” indicates the percent identity between the human and rat (or mouse if the rat sequence is not available) sequences. In some cases, the polynucleotide sequence indicated in Table 2, 3, 4, or 5 is an EST sequence. Accordingly, the column labeled “former identifier” indicates the accession number of the gene sequence having the closest homology, as determined by a BLAST search, to the EST sequence. The column labeled “identifier” in conjunction with the columns labeled “description” and “protein type” indicate the function of the proteins encoded by the polynucletoides of Tables 1, 2, 3, 4, or 5 and specifically indicated in Tables 2, 3, 4, or 5. The column labeled “subcellular localization” indicates the known location of the protein encoded by the polynucleotide sequences noted in the Table in specific compartments in the cell. Accordingly, those proteins which are indicated in the Table as being secreted may be useful, as described below, as protein drugs for modulating the activity of one or more proteins indicated in the table, or for treating pain as described herein. Similarly, proteins which are indicated as being integral membrane proteins may be cell surface receptors, and may be screened against candidate compounds to identify compounds which regulate their activity as described below. The columns labeled “rat gene SEQ ID No.”, “rat protein SEQ ID No.”, “human gene SEQ ID No.”, and “human protein SEQ ID No.” in Tables 2-3 indicates the SEQ ID No. corresponding to the sequence identified by the corresponding accession number.

[0194] In addition to the polynucleotides indicated in Tables 1, 2, 3, 4, or 5, the scope of the invention further includes variations, and/or mutations in the polynucleotide sequences, including SNPs and other conservative variants that do not alter the functionality of the encoded polypeptide, including sequences having at least 30% homology with the polynucleotide sequences shown in Tables 1, 2, 3, 4, or 5, but encoding a protein having the equivalent function to the protein encoded by the polynucleotide sequences shown in Tables 1, 2, 3, 4, or 5. The present invention further encompasses the human homologs to the polynucleotide sequences indicated in Tables 1, 2, 3, 4, or 5, and the polypeptide sequences encoded thereby. The invention still further encompasses the polypeptide sequences encoded by the polynucleotide sequences shown in Tables 1, 2, 3, 4, or 5. The Accession no. for the polypeptide sequence is shown in Tables 2, 3, 4, or 5 (the protein accession number is not indicated for Table 1, as all of these genes are known in the art). The present invention also encompasses a variant, domain, epitope, or fragment of the polypeptide molecules indicated in Tables 1, 2, 3, 4, or 5, provided that the variant, domain, epitope, or fragment has an equivalent function to that of the polypeptide indicated in Tables 1, 2, 3, 4, or 5 (i.e., the function for the proteins indicated in Tables)

LENGTHY TABLE REFERENCED HERE
US20070015145A1-20070118-T00001
Please refer to the end of the specification for access instructions.

LENGTHY TABLE REFERENCED HERE
US20070015145A1-20070118-T00002
Please refer to the end of the specification for access instructions.

LENGTHY TABLE REFERENCED HERE
US20070015145A1-20070118-T00003
Please refer to the end of the specification for access instructions.

LENGTHY TABLE REFERENCED HERE
US20070015145A1-20070118-T00004
Please refer to the end of the specification for access instructions.

LENGTHY TABLE REFERENCED HERE
US20070015145A1-20070118-T00005
Please refer to the end of the specification for access instructions.

LENGTHY TABLE REFERENCED HERE
US20070015145A1-20070118-T00006
Please refer to the end of the specification for access instructions.

LENGTHY TABLE REFERENCED HERE
US20070015145A1-20070118-T00007
Please refer to the end of the specification for access instructions.

Vectors and Host Cells

[0195] In addition to providing genes which are differentially expressed in animals which have been subjected to pain, the present invention further provides vectors and plasmids useful for directing the expression of differentially expressed genes, or therapeutic nucleic acid constructs, and further provides host cells which express the vectors and plasmids provided herein. Nucleic acid sequences useful for the expression from a vector or plasmid as described below include, but are not limited to any nucleic acid or gene sequence identified as being differentially regulated by the methods described above, and further include therapeutic nucleic acid molecules, such as antisense molecules. The host cell may be any prokaryotic or eukaryotic cell. Ligating the polynucleotide sequence into a gene construct, such as an expression vector, and transforming or transfecting into hosts, either eukaryotic (yeast, avian, insect or mammalian) or prokaryotic (bacterial cells), are standard procedures well known in the art.

[0196] Vectors

[0197] There is a wide array of vectors known and available in the art that are useful for the expression of differentially expressed nucleic acid molecules according to the invention. The selection of a particular vector clearly depends upon the intended use the polypeptide encoded by the differentially expressed nucleic acid. For example, the selected vector must be capable of driving expression of the polypeptide in the desired cell type, whether that cell type be prokaryotic or eukaryotic. Many vectors comprise sequences allowing both prokaryotic vector replication and eukaryotic expression of operably linked gene sequences.

[0198] Vectors useful according to the invention may be autonomously replicating, that is, the vector, for example, a plasmid, exists extrachromosomally and its replication is not necessarily directly linked to the replication of the host cell's genome. Alternatively, the replication of the vector may be linked to the replication of the host's chromosomal DNA, for example, the vector may be integrated into the chromosome of the host cell as achieved by retroviral vectors.

[0199] Vectors useful according to the invention preferably comprise sequences operably linked to the differentially expressed sequences that permit the transcription and translation of the sequence. Sequences that permit the transcription of the linked differentially expressed sequence include a promoter and optionally also include an enhancer element or elements permitting the strong expression of the linked sequences. The term “transcriptional regulatory sequences” refers to the combination of a promoter and any additional sequences conferring desired expression characteristics (e.g., high level expression, inducible expression, tissue- or cell-type-specific expression) on an operably linked nucleic acid sequence.

[0200] The selected promoter may be any DNA sequence that exhibits transcriptional activity in the selected host cell, and may be derived from a gene normally expressed in the host cell or from a gene normally expressed in other cells or organisms. Examples of promoters include, but are not limited to the following: A) prokaryotic promoters—E. coli lac, tac, or trp promoters, lambda phage P_{R} or P_{L} promoters, bacteriophage T7, T3, Sp6 promoters, B. subtilis alkaline protease promoter, and the B. stearothermophilus maltogenic amylase promoter, etc.; B) eukaryotic promoters—yeast promoters, such as GAL1, GAL4 and other glycolytic gene promoters (see for example, Hitzeman et al., 1980, J. Biol. Chem. 255: 12073-12080; Alber & Kawasaki, 1982, J. Mol. Appl. Gen. 1: 419-434), LEU2 promoter (Martinez-Garcia et al., 1989, Mol Gen Genet. 217: 464-470), alcohol dehydrogenase gene promoters (Young et al., 1982, in Genetic Engineering of Microorganisms for Chemicals, Hollaender et al., eds., Plenum Press, NY), or the TPI1 promoter (U.S. Pat. No. 4,599,311); insect promoters, such as the polyhedrin promoter (U.S. Pat. No. 4,745,051; Vasuvedan et al., 1992, FEBS Lett. 311: 7-11), the P10 promoter (Vlak et al., 1988, J. Gen. Virol. 69: 765-776), the Autographa californica polyhedrosis virus basic protein promoter (EP 397485), the baculovirus immediate-early gene promoter gene 1 promoter (U.S. Pat. Nos. 5,155,037 and 5,162,222), the baculovirus 39K delayed-early gene promoter (also U.S. Pat. Nos. 5,155,037 and 5,162,222) and the OpMNPV immediate early promoter 2; mammalian promoters—the SV40 promoter (Subramani et al., 1981, Mol. Cell. Biol. 1: 854-864), metallothionein promoter (MT-1; Palmiter et al., 1983, Science 222: 809-814), adenovirus 2 major late promoter (Yu et al., 1984, Nucl. Acids Res. 12: 9309-21), cytomegalovirus (CMV) or other viral promoter (Tong et al., 1998, Anticancer Res. 18: 719-725), or even the endogenous promoter of a gene of interest in a particular cell type.

[0201] A selected promoter may also be linked to sequences rendering it inducible or tissue-specific. For example, the addition of a tissue-specific enhancer element upstream of a selected promoter may render the promoter more active in a given tissue or cell type. Alternatively, or in addition, inducible expression may be achieved by linking the promoter to any of a number of sequence elements permitting induction by, for example, thermal changes (temperature sensitive), chemical treatment (for example, metal ion- or IPTG-inducible), or the addition of an antibiotic inducing agent (for example, tetracycline).

[0202] Regulatable expression is achieved using, for example, expression systems that are drug inducible (e.g., tetracycline, rapamycin or hormone-inducible). Drug-regulatable promoters that are particularly well suited for use in mammalian cells include the tetracycline regulatable promoters, and glucocorticoid steroid-, sex hormone steroid-, ecdysone-, lipopolysaccharide (LPS)- and isopropylthiogalactoside (IPTG)-regulatable promoters. A regulatable expression system for use in mammalian cells should ideally, but not necessarily, involve a transcriptional regulator that binds (or fails to bind) nonmammalian DNA motifs in response to a regulatory agent, and a regulatory sequence that is responsive only to this transcriptional regulator.

[0203] Tissue-specific promoters may also be used to advantage in differentially expressed sequence-encoding constructs of the invention. A wide variety of tissue-specific promoters is known. As used herein, the term “tissue-specific” means that a given promoter is transcriptionally active (i.e., directs the expression of linked sequences sufficient to permit detection of the polypeptide product of the promoter) in less than all cells or tissues of an organism. A tissue specific promoter is preferably active in only one cell type, but may, for example, be active in a particular class or lineage of cell types (e.g., hematopoietic cells). A tissue specific promoter useful according to the invention comprises those sequences necessary and sufficient for the expression of an operably linked nucleic acid sequence in a manner or pattern that is essentially the same as the manner or pattern of expression of the gene linked to that promoter in nature. The following is a non-exclusive list of tissue specific promoters and literature references containing the necessary sequences to achieve expression characteristic of those promoters in their respective tissues; the entire content of each of these literature references is incorporated herein by reference. Examples of tissue specific promoters useful in the present invention are as follows:

[0204] Bowman et al., 1995 Proc. Natl. Acad. Sci. USA 92, 12115-12119 describe a brain-specific transferrin promoter; the synapsin I promoter is neuron specific (Schoch et al., 1996 J. Biol. Chem. 271, 3317-3323); the nestin promoter is post-mitotic neuron specific (Uetsuki et al., 1996 J. Biol. Chem. 271, 918-924); the neurofilament light promoter is neuron specific (Charron et al., 1995 J. Biol. Chem. 270, 30604-30610); the acetylcholine receptor promoter is neuron specific (Wood et al., 1995 J. Biol. Chem. 270, 30933-30940); and the potassium channel promoter is high-frequency firing neuron specific (Gan et al., 1996 J. Biol. Chem 271, 5859-5865). Any tissue specific transcriptional regulatory sequence known in the art may be used to advantage with a vector encoding a differentially expressed nucleic acid sequence obtained from an animal subjected to pain.

[0205] In addition to promoter/enhancer elements, vectors useful according to the invention may further comprise a suitable terminator. Such terminators include, for example, the human growth hormone terminator (Palmiter et al., 1983, supra), or, for yeast or fungal hosts, the TPI1 (Alber & Kawasaki, 1982, supra) or ADH3 terminator (McKnight et al., 1985, EMBO J. 4: 2093-2099).

[0206] Vectors useful according to the invention may also comprise polyadenylation sequences (e.g., the SV40 or Ad5E1b poly(A) sequence), and translational enhancer sequences (e.g., those from Adenovirus VA RNAs). Further, a vector useful according to the invention may encode a signal sequence directing the recombinant polypeptide to a particular cellular compartment or, alternatively, may encode a signal directing secretion of the recombinant polypeptide.

[0207] a. Plasmid Vectors

[0208] Any plasmid vector that allows expression of a differentially expressed coding sequence of the invention in a selected host cell type is acceptable for use according to the invention. A plasmid vector useful in the invention may have any or all of the above-noted characteristics of vectors useful according to the invention. Plasmid vectors useful according to the invention include, but are not limited to the following examples: Bacterial—pQE70, pQE60, pQE-9 (Qiagen) pBs, phagescript, psiX174, pBluescript SK, pBsKS, pNH8a, pNH16a, pNH18a, pNH46a (Stratagene); pTrc99A, pKK223-3, pKK233-3, pDR540, and pRIT5 (Pharmacia); Eukaryotic—pWLneo, pSV2cat, pOG44, pXT1, pSG (Stratagene) pSVK3, pBPV, pMSG, and pSVL (Pharmacia). However, any other plasmid or vector may be used as long as it is replicable and viable in the host.

[0209] b. Bacteriophage Vectors.

[0210] There are a number of well known bacteriophage-derived vectors useful according to the invention. Foremost among these are the lambda-based vectors, such as Lambda Zap II or Lambda-Zap Express vectors (Stratagene) that allow inducible expression of the polypeptide encoded by the insert. Others include filamentous bacteriophage such as the M13-based family of vectors.

[0211] c. Viral Vectors.

[0212] A number of different viral vectors are useful according to the invention, and any viral vector that permits the introduction and expression of one or more of the differentially expressed polynucleotides of the invention in cells is acceptable for use in the methods of the invention. Viral vectors that can be used to deliver foreign nucleic acid into cells include but are not limited to retroviral vectors, adenoviral vectors, adeno-associated viral vectors, herpesviral vectors, and Semliki forest viral (alphaviral) vectors. Defective retroviruses are well characterized for use in gene transfer (for a review see Miller, A. D. (1990) Blood 76:271). Protocols for producing recombinant retroviruses and for infecting cells in vitro or in vivo with such viruses can be found in Current Protocols in Molecular Biology, Ausubel, F. M. et al. (eds.) Greene Publishing Associates, (1989), Sections 9.10-9.14, and other standard laboratory manuals.

[0213] In addition to retroviral vectors, Adenovirus can be manipulated such that it encodes and expresses a gene product of interest but is inactivated in terms of its ability to replicate in a normal lytic viral life cycle (see for example Berkner et al., 1988, BioTechniques 6:616; Rosenfeld et al., 1991, Science 252:431-434; and Rosenfeld et al., 1992, Cell 68:143-155). Suitable adenoviral vectors derived from the adenovirus strain Ad type 5 d1324 or other strains of adenovirus (e.g., Ad2, Ad3, Ad7 etc.) are well known to those skilled in the art. Adeno-associated virus (AAV) is a naturally occurring defective virus that requires another virus, such as an adenovirus or a herpes virus, as a helper virus for efficient replication and a productive life cycle. (For a review see Muzyczka et al., 1992, Curr. Topics in Micro. and Immunol. 158:97-129). An AAV vector such as that described in Traschin et al. (1985, Mol. Cell. Biol. 5:3251-3260) can be used to introduce nucleic acid into cells. A variety of nucleic acids have been introduced into different cell types using AAV vectors (see, for example, Hermonat et al., 1984, Proc. Natl. Acad. Sci. USA 81: 6466-6470; and Traschin et al., 1985, Mol. Cell. Biol. 4: 2072-2081).

[0214] Host Cells

[0215] Any cell into which a recombinant vector carrying a gene encoding a nucleic acid sequence differentially expressed in an animal subjected to pain may be introduced and wherein the vector is permitted to drive the expression of the peptide encoded by the differentially expressed sequence is useful according to the invention. Any cell in which a differentially expressed molecule of the invention may be expressed and preferably detected is a suitable host, wherein the host cell is preferably a mammalian cell and more preferably a human cell. Vectors suitable for the introduction of differentially expressed nucleic acid sequences to host cells from a variety of different organisms, both prokaryotic and eukaryotic, are described herein above or known to those skilled in the art.

[0216] Host cells may be prokaryotic, such as any of a number of bacterial strains, or may be eukaryotic, such as yeast or other fungal cells, insect or amphibian cells, or mammalian cells including, for example, rodent, simian or human cells. Cells may be primary cultured cells, for example, primary human fibroblasts or keratinocytes, or may be an established cell line, such as NIH3T3, 293T or CHO cells. Further, mammalian cells useful in the present invention may be phenotypically normal or oncogenically transformed. It is assumed that one skilled in the art can readily establish and maintain a chosen host cell type in culture.

[0217] Introduction of Vectors to Host Cells.

[0218] Vectors useful in the present invention may be introduced to selected host cells by any of a number of suitable methods known to those skilled in the art. For example, vector constructs may be introduced to appropriate bacterial cells by infection, in the case of E. coli bacteriophage vector particles such as lambda or M13, or by any of a number of transformation methods for plasmid vectors or for bacteriophage DNA. For example, standard calcium-chloride-mediated bacterial transformation is still commonly used to introduce naked DNA to bacteria (Sambrook et al., 1989, Molecular Cloning, A Laboratory Manual, Cold Spring Harbor Laboratory Press, Cold Spring Harbor, N.Y.), but electroporation may also be used (Ausubel et al., 1988, Current Protocols in Molecular Biology, (John Wiley & Sons, Inc., NY, N.Y.)).

[0219] For the introduction of vector constructs to yeast or other fungal cells, chemical transformation methods are generally used (e.g. as described by Rose et al., 1990, Methods in Yeast Genetics, Cold Spring Harbor Laboratory Press, Cold Spring Harbor, N.Y.). For transformation of S. cerevisiae, for example, the cells are treated with lithium acetate to achieve transformation efficiencies of approximately 10⁴ colony-forming units (transformed cells)/μg of DNA. Transformed cells are then isolated on selective media appropriate to the selectable marker used. Alternatively, or in addition, plates or filters lifted from plates may be scanned for GFP fluorescence to identify transformed clones.

[0220] For the introduction of vectors comprising differentially expressed sequences to mammalian cells, the method used will depend upon the form of the vector. Plasmid vectors may be introduced by any of a number of transfection methods, including, for example, lipid-mediated transfection (“lipofection”), DEAE-dextran-mediated transfection, electroporation or calcium phosphate precipitation. These methods are detailed, for example, in Current Protocols in Molecular Biology (Ausubel et al., 1988, John Wiley & Sons, Inc., NY, N.Y.).

[0221] Lipofection reagents and methods suitable for transient transfection of a wide variety of transformed and non-transformed or primary cells are widely available, making lipofection an attractive method of introducing constructs to eukaryotic, and particularly mammalian cells in culture. For example, LipofectAMINE™ (Life Technologies) or LipoTaxi™ (Stratagene) kits are available. Other companies offering reagents and methods for lipofection include Bio-Rad Laboratories, CLONTECH, Glen Research, InVitrogen, JBL Scientific, MBI Fermentas, PanVera, Promega, Quantum Biotechnologies, Sigma-Aldrich, and Wako Chemicals USA.

[0222] Following transfection with a vector of the invention, eukaryotic (e.g., human) cells successfully incorporating the construct (intra- or extrachromosomally) may be selected, as noted above, by either treatment of the transfected population with a selection agent, such as an antibiotic whose resistance gene is encoded by the vector, or by direct screening using, for example, FACS of the cell population or fluorescence scanning of adherent cultures. Frequently, both types of screening may be used, wherein a negative selection is used to enrich for cells taking up the construct and FACS or fluorescence scanning is used to further enrich for cells expressing differentially expressed polynucleotides or to identify specific clones of cells, respectively. For example, a negative selection with the neomycin analog G418 (Life Technologies, Inc.) may be used to identify cells that have received the vector, and fluorescence scanning may be used to identify those cells or clones of cells that express the vector construct to the greatest extent.

Polynucleotide Arrays Comprising Differentially Expressed Nucleic Acid Sequences

[0223] In one embodiment, the present invention provides a pain-specific polynucleotide array comprising nucleic acid sequences that are identified as being differentially expressed in an animal subjected to pain relative to a naïve animal stably associated at discrete predefined regions on a surface. In a preferred embodiment, a pain-specific microarray useful in the present invention comprises one or more polynucleotides shown in Tables 1, 2, 3, 4, or 5. At least one of the polynucleotides comprising a pain-specific array useful in the present invention must be selected from Table 2, 3, 4, or 5. A pain-specific microarray according to the invention preferably comprises between 10 and 20,000 nucleic acid members, and more preferably comprises at least 5000 nucleic acid members. The nucleic acid members are known or novel polynucleotide sequences which have been determined to be differentially expressed as described herein, or any combination thereof. A pain-specific microarray according to the invention may be used, for example, to test therapeutic compounds which may modulate the expression of the sequences comprising the array in an animal subjected to pain. For example, an animal subjected to pain may be treated with a potentially therapeutic compound as described below. Total RNA may then be extracted from, for example, primary sensory neurons, prepared according to the methods described above, and hybridized to the pain-specific microarray. The level of hybridization of samples to the pain-specific microarray may be compared to the level of hybridization of a nucleic acid sample obtained from an animal subjected to pain, but not administered the therapeutic compound. The pain-specific microarray may also be used, for example, to test the ability of an antisense nucleic acid to hybridize to the differentially expressed nucleic acid molecules comprising the pain-specific microarray. The antisense molecules may then be used to inhibit the expression of, for example, nucleic acid sequences which have been identified, using the above methods, as being upregulated (i.e., by at least 1.4 fold) in an animal subjected to pain.

[0224] The invention also provides for a pain-specific microarray comprising nucleic acids sequences which have been identified and verified as being differentially expressed in an animal subjected to pain, wherein the sequences stably associated with the array are obtained from at least two different species of animal. In a preferred embodiment, a pain-specific microarray useful in the present invention comprises at least one polynucleotide shown in Table 2, 3, 4, or 5, and may optionally further comprise one or more of the polynucleotides shown in Table 1. Such arrays may also be used for prognostic methods to monitor an animal's response to therapy. In one embodiment, the above pain-specific microarrays are used to identify a therapeutic agent that changes (e.g., increases or decreases) the level of expression of at least one polynucleotide sequence that is differentially expressed (i.e., by at least 1.4 fold, or at least 1.2 fold in combination with a p-value of less than 0.05 in triplicate analysis) in sensory neurons in an animal subjected to pain.

[0225] The nucleic acid samples that are hybridized to and analyzed with a pain-specific microarray of the invention are preferably derived from sensory neurons of an animal subjected to pain (or from a naïve control animal). More preferably, the nucleic acid samples are obtained from primary sensory neurons of the dorsal root ganglion. A limitation for this procedure lies in the amount of RNA available for use as a probe nucleic acid sample. Preferably, at least 1 microgram of total RNA is obtained for use according to this invention.

[0226] Construction of a Pain-Specific Microarray

[0227] An aspect of the present invention incorporates the previously identified differentially regulated nucleic acid sequences into a pain-specific polynucleotide microarray. In the present methods, an array of nucleic acid members stably associated with the surface of a substantially planar solid support is contacted with a sample comprising probe polynucleotides obtained from an animal subjected to pain, or from a naïve animal under hybridization conditions sufficient to produce a hybridization pattern of complementary nucleic acid members/probe complexes.

[0228] The nucleic acid members may be produced using established techniques such as polymerase chain reaction (PCR) and reverse transcription (RT). For example, once a nucleic acid sequence has been identified as being differentially expressed in an animal subjected to pain, the sequence may be amplified from the originally obtained RNA sample by RT-PCR, wherein the amplified product may be used to construct a pain-specific microarray. These methods are similar to those currently known in the art (see e.g. PCR Strategies, Michael A. Innis (Editor), et al. (1995) and PCR: Introduction to Biotechniques Series, C. R. Newton, A. Graham (1997)). Amplified polynucleotides are purified by methods well known in the art (e.g., column purification or alcohol precipitation). A polynucleotide is considered pure when it has been isolated so as to be substantially free of primers and incomplete products produced during the synthesis of the desired polynucleotide. Preferably, a purified polynucleotide will also be substantially free of contaminants which may hinder or otherwise mask the binding activity of the molecule.

[0229] A pain-specific microarray according to the invention comprises a plurality of unique polynucleotides attached to one surface of a solid support at a density exceeding 20 different polynucleotides/cm², wherein each of the polynucleotides is attached to the surface of the solid support in a non-identical preselected region. Each associated sample on the array comprises a polynucleotide composition, of known identity, usually of known sequence, as described in greater detail below. Any conceivable substrate may be employed in the invention. In one embodiment, the polynucleotide attached to the surface of the solid support is DNA. In a preferred embodiment, the polynucleotide attached to the surface of the solid support is cDNA or RNA. In another preferred embodiment, the polynucleotide attached to the surface of the solid support is cDNA synthesized by polymerase chain reaction (PCR). Preferably, a nucleic acid member comprising an array, according to the invention, is at least 25 nucleotides in length. In one embodiment, a nucleic acid member comprising an array is at least 150 nucleotides in length. Preferably, a nucleic acid member comprising an array is less than 1000 nucleotides in length. More preferably, a nucleic acid member comprising an array is less than 500 nucleotides in length. In one embodiment, an array comprises at least 10 different polynucleotides attached to one surface of the solid support. In another embodiment, the array comprises at least 100 different polynucleotides attached to one surface of the solid support. In yet another embodiment, the array comprises at least 10000 different polynucleotides attached to one surface of the solid support.

[0230] In the arrays of the invention, the polynucleotide compositions are stably associated with the surface of a solid support, wherein the support may be a flexible or rigid solid support. By “stably associated” is meant that each nucleic acid member maintains a unique position relative to the solid support under hybridization and washing conditions. As such, the samples are non-covalently or covalently stably associated with the support surface. Examples of non-covalent association include non-specific adsorption, binding based on electrostatic interactions (e.g., ion pair interactions), hydrophobic interactions, hydrogen bonding interactions, specific binding through a specific binding pair member covalently attached to the support surface, and the like. Examples of covalent binding include covalent bonds formed between the polynucleotides and a functional group present on the surface of the rigid support (e.g., —OH), where the functional group may be naturally occurring or present as a member of an introduced linking group, as described in greater detail below

[0231] The amount of differentially expressed polynucleotide present in each composition will be sufficient to provide for adequate hybridization and detection of probe polynucleotide sequences during the assay in which the array is employed. Generally, the amount of each nucleic acid member stably associated with the solid support of the array is at least about 0.1 ng, preferably at least about 0.5 ng and more preferably at least about 1 ng, where the amount may be as high as 1000 ng or higher, but will usually not exceed about 20 ng. Where the nucleic acid member is “spotted” onto the solid support in a spot comprising an overall circular dimension, the diameter of the “spot” will generally range from about 10 to 5,000 μm, usually from about 20 to 2,000 μm and more usually from about 50 to 1000 μm.

[0232] Control nucleic acid members may be present on the array including nucleic acid members comprising oligonucleotides or polynucleotides corresponding to genomic DNA, housekeeping genes, vector sequence, plant nucleic acid sequence, negative and positive control genes, and the like. Control nucleic acid members are calibrating or control genes whose function is not to tell whether a particular “key” gene of interest is expressed, but rather to provide other useful information, such as background or basal level of expression.

[0233] Other control polynucleotides are spotted on the array and used as probe expression control polynucleotides and mismatch control nucleotides to monitor non-specific binding or cross-hybridization to a polynucleotide in the sample other than the target to which the probe is directed. Mismatch probes thus indicate whether a hybridization is specific or not. For example, if the target is present, the perfectly matched probes should be consistently brighter than the mismatched probes.

[0234] Solid Substrate

[0235] An array according to the invention comprises either a flexible or rigid substrate. A flexible substrate is capable of being bent, folded or similarly manipulated without breakage. Examples of solid materials which are flexible solid supports with respect to the present invention include membranes, e.g., nylon, flexible plastic films, and the like. By “rigid” is meant that the support is solid and does not readily bend, i.e., the support is not flexible. As such, the rigid substrates of the subject arrays are sufficient to provide physical support and structure to the associated polynucleotides present thereon under the assay conditions in which the array is employed, particularly under high throughput handling conditions.

[0236] The substrate may be biological, non-biological, organic, inorganic, or a combination of any of these, existing as particles, strands, precipitates, gels, sheets, tubing, spheres, containers, capillaries, pads, slices, films, plates, slides, etc. The substrate may have any convenient shape, such as a disc, square, sphere, circle, etc. The substrate is preferably flat or planar but may take on a variety of alternative surface configurations. The substrate may be a polymerized Langmuir Blodgett film, functionalized glass, Si, Ge, GaAs, GaP, SiO₂, SIN₄, modified silicon, or any one of a wide variety of gels or polymers such as (poly)tetrafluoroethylene, (poly)vinylidenedifluoride, polystyrene, polycarbonate, or combinations thereof. Other substrate materials will be readily apparent to those of skill in the art upon review of this disclosure.

[0237] In a preferred embodiment the substrate is flat glass or single-crystal silicon. According to some embodiments, the surface of the substrate is etched using well known techniques to provide for desired surface features. For example, by way of the formation of trenches, v-grooves, mesa structures, or the like, the synthesis regions may be more closely placed within the focus point of impinging light, be provided with reflective “mirror” structures for maximization of light collection from fluorescent sources, etc.

[0238] Surfaces on the solid substrate will usually, though not always, be composed of the same material as the substrate. Alternatively, the surface may be composed of any of a wide variety of materials, for example, polymers, plastics, resins, polysaccharides, silica or silica-based materials, carbon, metals, inorganic glasses, membranes, or any of the above-listed substrate materials. In some embodiments the surface may provide for the use of caged binding members which are attached firmly to the surface of the substrate. Preferably, the surface will contain reactive groups, which are carboxyl, amino, hydroxyl, or the like. Most preferably, the surface will be optically transparent and will have surface Si—OH functionalities, such as are found on silica surfaces.

[0239] The surface of the substrate is preferably provided with a layer of linker molecules, although it will be understood that the linker molecules are not required elements of the invention. The linker molecules are preferably of sufficient length to permit polynucleotides of the invention and on a substrate to hybridize to other polynucleotide molecules and to interact freely with molecules exposed to the substrate.

[0240] Often, the substrate is a silicon or glass surface, (poly)tetrafluoroethylene, (poly)vinylidendifluoride, polystyrene, polycarbonate, a charged membrane, such as nylon 66 or nitrocellulose, or combinations thereof. In a preferred embodiment, the solid support is glass. Preferably, at least one surface of the substrate will be substantially flat. Preferably, the surface of the solid support will contain reactive groups, including, but not limited to, carboxyl, amino, hydroxyl, thiol, or the like. In one embodiment, the surface is optically transparent. In a preferred embodiment, the substrate is a poly-lysine coated slide or Gamma amino propyl silane-coated Corning Microarray Technolgy-GAPS.

[0241] Any solid support to which a nucleic acid member may be attached may be used in the invention. Examples of suitable solid support materials include, but are not limited to, silicates such as glass and silica gel, cellulose and nitrocellulose papers, nylon, polystyrene, polymethacrylate, latex, rubber, and fluorocarbon resins such as TEFLON™.

[0242] The solid support material may be used in a wide variety of shapes including, but not limited to slides and beads. Slides provide several functional advantages and thus are a preferred form of solid support. Due to their flat surface, probe and hybridization reagents are minimized using glass slides. Slides also enable the targeted application of reagents, are easy to keep at a constant temperature, are easy to wash and facilitate the direct visualization of RNA and/or DNA immobilized on the solid support. Removal of RNA and/or DNA immobilized on the solid support is also facilitated using slides.

[0243] The particular material selected as the solid support is not essential to the invention, as long as it provides the described function. Normally, those who make or use the invention will select the best commercially available material based upon the economics of cost and availability, the expected application requirements of the final product, and the demands of the overall manufacturing process.

[0244] Spotting Method

[0245] The invention provides for arrays wherein each nucleic acid member comprising the array is spotted onto a solid support.

[0246] Preferably, spotting is carried out as follows. PCR products (˜40 ul) of cDNA clones obtained from animals subjected to pain, in the same 96-well tubes used for amplification, are precipitated with 4 ul (1/10 volume) of 3M sodium acetate (pH 5.2) and 100 ul (2.5 volumes) of ethanol and stored overnight at −20° C. They are then centrifuged at 3,300 rpm at 4° C. for 1 hour. The obtained pellets are washed with 50 ul ice-cold 70% ethanol and centrifuged again for 30 minutes. The pellets are then air-dried and resuspended well in 20 ul 3×SSC overnight. The samples are then spotted, either singly or in duplicate, onto polylysine-coated slides (Sigma Cat. No. P0425) using a robotic GMS 417 arrayer (Affymetrix, CA).

[0247] The boundaries of the spots on the microarray are marked with a diamond scriber (note that the spots become invisible after post-processing). The arrays are rehydrated by suspending the slides over a dish of warm particle free ddH₂O for approximately one minute (the spots will swell slightly but will not run into each other) and snap-dried on a 70-80° C. inverted heating block for 3 seconds. Nucleic acid is then UV crosslinked to the slide (Stratagene, Stratalinker, 65 mJ—set display to “650” which is 650×100 uJ). The arrays are placed in a slide rack. An empty slide chamber is prepared and filled with the following solution: 3.0 grams of succinic anhydride (Aldrich) was dissolved in 189 ml of 1-methyl-2-pyrrolidinone (rapid addition of reagent is crucial); immediately after the last flake of succinic anhydride is dissolved, 21.0 ml of 0.2 M sodium borate is mixed in and the solution is poured into the slide chamber. The slide rack is plunged rapidly and evenly in the slide chamber and vigorously shaken up and down for a few seconds, making sure the slides never leave the solution, and then mixed on an orbital shaker for 15-20 minutes. The slide rack is then gently plunged in 95° C. ddH₂O for 2 minutes, followed by plunging five times in 95% ethanol. The slides are then air dried by allowing excess ethanol to drip onto paper towels. The arrays are then stored in the slide box at room temperature until use.

[0248] Numerous methods may be used for attachment of the nucleic acid members of the invention to the substrate (a process referred as spotting). For example, polynucleotides are attached using the techniques of, for example U.S. Pat. No. 5,807,522, which is incorporated herein by reference for teaching methods of polymer attachment.

[0249] Alternatively, spotting may be carried out using contact printing technology.

[0250] Kits

[0251] The invention provides for kits for performing expression assays using the pain-specific arrays of the present invention. Such kits according to the present invention will at least comprise the pain-specific arrays of the invention having associated differentially expressed nucleic acid members and packaging means therefore. The kits may further comprise one or more additional reagents employed in the various methods, such as: 1) primers for generating test polynucleotides; 2) dNTPs and/or rNTPs (either premixed or separate), optionally with one or more uniquely labeled dNTPs and/or rNTPs (e.g., biotinylated or Cy3 or Cy5 tagged dNTPs); 3) post synthesis labeling reagents, such as chemically active derivatives of fluorescent dyes; 4) enzymes, such as reverse transcriptases, DNA polymerases, and the like; 5) various buffer mediums, e.g., hybridization and washing buffers; 6) labeled probe purification reagents and components, like spin columns, etc.; and 7) signal generation and detection reagents, e.g., streptavidin-alkaline phosphatase conjugate, chemifluorescent or chemiluminescent substrate, and the like.

Therapeutic Agents and Screening Methods

[0252] The present invention provides a number of potentially therapeutic compounds which may be used to modulate the expression of genes which are differentially expressed in an animal subjected to pain, or which may be used to modulate the activity of a protein encoded by a differentially expressed polynucleotide sequence of the invention, or which may be used to modulate pain in an animal. Such therapeutic agents include, but are not limited to a chemical compound, a protein, an antibody, RNAi, and an antisense nucleic acid. In a further aspect, the invention provides a method for screening potentially therapeutic agents for the ability to modulate the expression of genes which are differentially expressed in an animal subjected to pain, and further provides pharmaceutical formulations comprising the therapeutic agents. In a still further embodiment, the present invention provides a method of screening potentially therapeutic agents for the ability to modulate the activity of one or more polypeptides encoded by one or more of the polynucleotide sequences indicated in Tables 1, 2, 3, 4, or 5.

[0253] Therapeutic Agents

[0254] A therapeutic agent, useful in the present invention, changes (e.g., increases or decreases) the level of expression of at least one polynucleotide sequence that is differentially expressed in an animal subjected to pain. Preferably, a therapeutic agent causes a change in the level of expression of a polynucleotide sequence, that is, to increase or decrease the expression of a polynucleotide sequence that is differentially expressed in an animal subjected to pain, wherein the change results in the differentially expressed sequence being no longer differentially expressed by at least 1.4 fold (or differentially expressed by 1.2 fold in combination with a statistical significance of p<0.05 in at least three replicate assays) relative to the expression of the same sequence in a naïve animal.

[0255] In another embodiment, a therapeutic agent according to the invention can modulate the activity of one or more of the polypeptides specifically indicated in Tables 1, 2, 3, 4, or 5, or encoded by one or more of the polynucleotide sequences of Tables 1, 2, 3, 4, or 5.

[0256] In another embodiment, a therapeutic agent according to the invention can ameliorate at least one of the symptoms and/or physiological changes associated with pain including, but not limited to mechanical allodynia and hyperalgesia, and temperature allodynia and hyperalgesia.

[0257] The candidate therapeutic agent may be a synthetic compound, or a mixture of compounds, or may be a natural product (e.g. a plant extract or culture supernatant). According to the invention, a therapeutic agent or compound can be a candidate or test compound. Similarly, according to the invention, a candidate or test compound can be a therapeutic agent.

[0258] Suitable test compounds for use in the screening assays of the invention can be obtained from any suitable source, e.g., conventional compound libraries. The test compounds can also be obtained using any of the numerous approaches in combinatorial library methods known in the art, including: biological libraries; spatially addressable parallel solid phase or solution phase libraries; synthetic library methods requiring deconvolution; the “one-bead one-compound” library method; and synthetic library methods using affinity chromatography selection. The biological library approach is limited to peptide libraries, while the other four approaches are applicable to peptide, non-peptide oligomer or small molecule libraries of compounds [Lam, (1997)]. Examples of methods for the synthesis of molecular libraries can be found in the art. Libraries of compounds may be presented in solution or on beads, bacteria, spores, plasmids or phage.

[0259] Candidate therapeutic agents or compounds from large libraries of synthetic or natural compounds may be screened as described below. Numerous means are currently used for random and directed synthesis of saccharide, peptide, and nucleic acid based compounds. Synthetic compound libraries are commercially available from a number of companies including Maybridge Chemical Co. (Trevillet, Cornwall, UK), Comgenex (Princeton, N.J.), Brandon Associates (Merrimack, N.H.), and Microsource (New Milford, Conn.). A rare chemical library is available from Aldrich (Milwaukee, Wis.). Combinatorial libraries are available and are prepared. Alternatively, libraries of natural compounds in the form of bacterial, fungal, plant and animal extracts are available from e.g., Pan Laboratories (Bothell, Wash.) or MycoSearch (NC), or are readily produced by methods well known in the art. Additionally, natural and synthetically produced libraries and compounds are readily modified through conventional chemical, physical, and biochemical means.

[0260] Small Molecules

[0261] Useful compounds may be found within numerous chemical classes. Useful compounds may be organic compounds, or small organic compounds. Small organic compounds, or “small molecules” have a molecular weight of more than 50 yet less than about 2,500 daltons, preferably less than about 750, more preferably less than about 350 daltons. Exemplary classes include heterocycles, peptides, saccharides, steroids, and the like. Small molecules can be nucleic acids, peptides, polypeptides, peptidomimetics, carbohydrates, lipids or other organic (carbon-containing) or inorganic molecules. The compounds may be modified to enhance efficacy, stability, pharmaceutical compatibility, and the like. Structural identification of an agent may be used to identify, generate, or screen additional agents. For example, where peptide agents are identified, they may be modified in a variety of ways to enhance their stability, such as using an unnatural amino acid, such as a D-amino acid, particularly D-alanine, by functionalizing the amino or carboxylic terminus, e.g. for the amino group, acylation or alkylation, and for the carboxyl group, esterification or amidification, or the like.

[0262] Antisense Therapy

[0263] In one embodiment, a therapeutic agent, according to the invention, can be a differentially expressed nucleic acid or a sequence complementary thereto, useful in antisense therapy. The antisense sequence of a polynucletoide which is differentially expressed in an animal subjected to pain may be determined using the either the sequence indicated by accession number in tables 4-5, or the sequence of the rat and/or human differentially expressed sequences shown in Table 2-3 as set forth in the corresponding SEQ ID No. As used herein, antisense therapy refers to administration or in situ generation of oligonucleotide molecules or their derivatives which specifically hybridize (e.g., bind) under cellular conditions with the cellular mRNA and/or genomic DNA, thereby inhibiting transcription and/or translation of that gene. The binding may be by conventional base pair complementarity, or, for example, in the case of binding to DNA duplexes, through specific interactions in the major groove of the double helix. In general, antisense therapy refers to the range of techniques generally employed in the art, and includes any therapy which relies on specific binding to oligonucleotide sequences.

[0264] An antisense construct of the present invention can be delivered, for example, as an expression plasmid which, when transcribed in the cell, produces RNA which is complementary to at least a unique portion of the cellular mRNA identified as being differentially expressed in an animal subjected to pain. The construction and use of expression plasmids is described above and may be adapted by one of skill in the art to include expression plasmids or vectors comprising anitsense oligonucleotides. Alternatively, the antisense construct is an oligonucleotide probe which is generated ex vivo and which, when introduced into the cell, causes inhibition of expression by hybridizing with the mRNA and/or genomic sequences of a differentially expressed nucleic acid. Such oligonucleotide probes are preferably modified oligonucleotides which are resistant to endogenous nucleases, e.g., exonucleases and/or endonucleases, and are therefore stable in vivo. Exemplary nucleic acid molecules for use as antisense oligonucleotides are phosphoramidate, phosphorothioate and methylphosphonate analogs of DNA (see also U.S. Pat. Nos. 5,176,996; 5,264,564; and 5,256,775). Additionally, general approaches to constructing oligomers useful in antisense therapy have been reviewed, for example, by Van der Krol et al. (1988) BioTechniques 6:958-976; and Stein et al. (1988) Cancer Res 48:2659-2668. With respect to antisense DNA, oligodeoxyribonucleotides derived from the translation initiation site, e.g., between the −10 and +10 regions of the nucleotide sequence of interest, are preferred.

[0265] Antisense approaches involve the design of oligonucleotides (either DNA or RNA) that are complementary to mRNA (i.e., differentially expressed mRNA). The antisense oligonucleotides will bind to the mRNA transcripts and prevent translation. Absolute complementarity, although preferred, is not required. In the case of double-stranded antisense nucleic acids, a single strand of the duplex DNA may thus be tested, or triplex formation may be assayed. The ability to hybridize will depend on both the degree of complementarity and the length of the antisense nucleic acid. Generally, the longer the hybridizing nucleic acid, the more base mismatches with an RNA it may contain and still form a stable duplex (or triplex, as the case may be). One skilled in the art can ascertain a tolerable degree of mismatch by use of standard procedures to determine the melting point of the hybridized complex.

[0266] Oligonucleotides that are complementary to the 5′ end of the differentially expressed mRNA, e.g., the 5′ untranslated sequence up to and including the AUG initiation codon, should work most efficiently at inhibiting translation. However, sequences complementary to the 3′ untranslated sequences of mRNAs have recently been shown to be effective at inhibiting translation of mRNAs as well. (Wagner, R. 1994. Nature 372:333). Therefore, oligonucleotides complementary to either the 5′ or 3′ untranslated, non-coding regions of a gene could be used in an antisense approach to inhibit translation of endogenous mRNA. Oligonucleotides complementary to the 5′ untranslated region of the mRNA should include the complement of the AUG start codon. Antisense oligonucleotides complementary to mRNA coding regions are typically less efficient inhibitors of translation but could also be used in accordance with the invention. Whether designed to hybridize to the 5′, 3′, or coding region of subject mRNA, antisense nucleic acids should be at least six nucleotides in length, and are preferably less than about 100 and more preferably less than about 50, 25, 17 or 10 nucleotides in length.

[0267] The oligonucleotides can be DNA or RNA or chimeric mixtures or derivatives or modified versions thereof, single-stranded or double-stranded. The oligonucleotide can be modified at the base moiety, sugar moiety, or phosphate backbone, for example, to improve stability of the molecule, hybridization, etc. The oligonucleotide may include other appended groups such as peptides (e.g., for targeting host cell receptors), or agents facilitating transport across the cell membrane (see, e.g., Letsinger et al., 1989, Proc. Natl. Acad. Sci. U.S.A. 86:6553-6556; Lemaitre et al., 1987, Proc. Natl. Acad. Sci. 84:648-652; PCT Publication No. WO 88/098 10, published Dec. 15, 1988) or the blood-brain barrier (see, e.g., PCT Publication No. WO 89/10 134, published Apr. 25, 1988), hybridization-triggered cleavage agents (See, e.g., Krol et al., 1988, BioTechniques 6:958-976), or intercalating agents (See, e.g., Zon, 1988, Pharm. Res. 5:539-549). To this end, the oligonucleotide may be conjugated to another molecule, e.g., a peptide, hybridization triggered cross-linking agent, transport agent, hybridization-triggered cleavage agent, etc.

[0268] The antisense oligonucleotide may comprise at least one modified base moiety which is selected from the group including but not limited to 5-fluorouracil, 5-bromouracil, 5-chlorouracil, 5-iodouracil, hypoxanthine, xantine, 4-acetylcytosine, 5-(carboxyhydroxytriethyl)uracil, 5-carboxymethylaminomethyl-2-thiouridine, 5-carboxymethylaminomethyluracil, dihydrouracil, beta-D-galactosylqueosine, inosine, N6-isopentenyladenine, 1-methylguanine, 1-methylinosine, 2,2-dimethylguanine, 2-methyladenine, 2-methylguanine, 3-methylcytosine, 5-methylcytosine, N6-adenine, 7-methylguanine, 5-methylaminomethyluracil, 5-methoxyaminomethyl-2-thiouracil, beta-D-mannosylqueosine, 5-methoxycarboxymethyluracil, 5-methoxyuracil, 2-methylthio-N6-isopentenyladenine, uracil-5-oxyacetic acid (v), wybutoxosine, pseudouracil, queosine, 2-thiocytosine, 5-methyl-2-thiouracil, 2-thiouracil, 4-thiouracil, 5-methyluracil, uracil-5-oxyacetic acid methylester, uracil-5-oxyacetic acid (v), 5-methyl-2-thiouracil, 3-(3-amino-3-N-2-carboxypropyl)uracil, (acp3)w, and 2,6-diaminopurine.

[0269] The antisense oligonucleotide may also comprise at least one modified sugar moiety selected from the group including but not limited to arabinose, 2-fluoroarabinose, xylulose, and hexose.

[0270] The antisense oligonucleotide can also contain a neutral peptide-like backbone. Such molecules are termed peptide nucleic acid (PNA)-oligomers and are described, e.g., in Peny-O'Keefe et al. (1996) Proc. Natl. Acad. Sci. U.S.A. 93:14670 and in Eglom et al. (1993) Nature 365:566. One advantage of PNA oligomers is their capability to bind to complementary DNA essentially independently from the ionic strength of the medium due to the neutral backbone of the DNA. In yet another embodiment, the antisense oligonucleotide comprises at least one modified phosphate backbone selected from the group consisting of a phosphorothioate, a phosphorodithioate, a phosphoramidothioate, a phosphoramidate, a phosphordiamidate, a methyiphosphonate, an alkyl phosphotriester, and a formacetal or analog thereof.

[0271] In yet a further embodiment, the antisense oligonucleotide is an α-anomeric oligonucleotide. An α-anomeric oligonucleotide forms specific double-stranded hybrids with complementary RNA in which, contrary to the usual n-units, the strands run parallel to each other (Gautier et al, 1987, Nucl. Acids Res. 15:6625-6641). The oligonucleotide is a 2′-O-methylribonucleotide (Inoue et al., 1987, Nucl. Acids Res. 15:6131-12148), or a chimeric RNA-DNA analogue (Jnoue et al., 1987, FEBS Lett. 215:327-330).

[0272] Oligonucleotides of the invention may be synthesized by standard methods known in the art, e.g., by use of an automated DNA synthesizer (such as are commercially available from Biosearch, Applied Biosystems, etc.) based on the known sequence of the differentially expressed nucleic acid sequences. As examples, phosphorothioate oligonucleotides may be synthesized by the method of Stein et al. (1988, Nucl. Acids Res. 16:3209), methylphosphonate olgonucleotides can be prepared by use of controlled pore glass polymer supports (Sarin et al., 1988, Proc. Natl. Acad. Sci. U.S.A. 85:7448-7451), etc.

[0273] While antisense nucleotides complementary to a coding region sequence can be used, those complementary to the transcribed untranslated region and to the region comprising the initiating methionine are most preferred.

[0274] The antisense molecules can be delivered to cells which express the target nucleic acid in vivo. A number of methods have been developed for delivering antisense DNA or RNA to cells; e.g., antisense molecules can be injected directly into the tissue site, or modified antisense molecules, designed to target the desired cells (e.g., antisense linked to peptides or antibodies that specifically bind receptors or antigens expressed on the target cell surface) can be administered systemically.

[0275] However, it is often difficult to achieve intracellular concentrations of the antisense sufficient to suppress translation on endogenous mRNAs. Therefore, a preferred approach utilizes a recombinant DNA construct in which the antisense oligonucleotide is placed under the control of a strong pol III or pol II promoter. The use of such a construct to transfect target cells in an animal will result in the transcription of sufficient amounts of single stranded RNAs that will form complementary base pairs with the endogenous transcripts and thereby prevent translation of the target mRNA. For example, a vector can be introduced in vivo such that it is taken up by a cell and directs the transcription of an antisense RNA. Such a vector can remain episomal or become chromosomally integrated, as long as it can be transcribed to produce the desired antisense RNA. Such vectors can be constructed by recombinant DNA technology methods standard in the art, combined with those described above. Vectors can be plasmid, viral, or others known in the art for replication and expression in mammalian cells. Expression of the sequence encoding the antisense RNA can be by any promoter known in the art to act in animal, preferably mammalian cells. Such promoters can be inducible or constitutive. Such promoters include but are not limited to: the SV40 early promoter region (Bernoist and Chambon, 1981, Nature 290:304-3 10), the promoter contained in the 3′ long terminal repeat of Rous sarcoma virus (Yamamoto et al., 1980, Cell 22:787-797), the herpes thymidine kinase promoter (Wagner et al., 1981, Proc. Natl. Acad. Sci. U.S.A. 78:1441-1445), the regulatory sequences of the metallothionein gene (Brinster et at, 1982, Nature 296:39-42), etc. Any type of plasmid, cosmid, YAC or viral vector can be used to prepare the recombinant DNA construct which can be introduced directly into the tissue site; e.g., the spinal cord, or dorsal root ganglion. Alternatively, viral vectors can be used which selectively infect the desired tissue (e.g., for brain, herpesvirus vectors may be used), in which case administration may be accomplished by another route (e.g., systemically).

[0276] Ribozymes

[0277] In another aspect of the invention, ribozyme molecules designed to catalytically cleave target mRNA transcripts can be used to prevent translation of target mRNA and expression of a target protein (See, e.g., PCT International Publication WO90/11364, published Oct. 4, 1990; Sarver et al., 1990, Science 247:1222-1225 and U.S. Pat. No. 5,093,246). While ribozymes that cleave mRNA at site specific recognition sequences can be used to destroy target mRNAs, the use of hammerhead ribozymes is preferred. Hammerhead ribozymes cleave mRNAs at locations dictated by flanking regions that form complementary base pairs with the target mRNA. The sole requirement is that the target mRNA have the following sequence of two bases: 5′-UG-3′. Ribozymes, useful in the present invention may be designed based on the known sequence of the nucleic acid sequence identified as being differentially expressed in an animal subjected to pain as described above. The construction and production of hammerhead ribozymes is well known in the art and is described more fully in Haseloff and Gerlach, 1988, Nature, 334:585-591. Preferably the ribozyme is engineered so that the cleavage recognition site is located near the 5′ end of the target mRNA; i.e., to increase efficiency and minimize the intracellular accumulation of non-functional mRNA transcripts.

[0278] The ribozymes of the present invention also include RNA endoribonucleases (hereinafter “Cech-type ribozymes”) such as the one which occurs naturally in Tetrahymena thermophila (known as the IVS, or L-19 IVS RNA) and which has been extensively described by Thomas Cech and collaborators (Zaug, et al., 1984, Science, 224:574-578; Zaug and Cech, 1986, Science, 231:470-475; Zaug, et al., 1986, Nature, 324:429-433; published International patent application No. WO88/04300 by University Patents Inc.; Been and Cech, 1986, Cell, 47:207-216). The Cech-type ribozymes have an eight base pair active site which hybridizes to a target RNA sequence whereafter cleavage of the target RNA takes place. The invention encompasses those Cech-type ribozymes which target eight base-pair active site sequences that are present in a target gene.

[0279] As in the antisense approach, the ribozymes can be composed of modified oligonucleotides (e.g., for improved stability, targeting, etc.) and should be delivered to cells which express the target gene in vivo. A preferred method of delivery involves using a DNA construct “encoding” the ribozyme under the control of a strong constitutive pol III or pol II promoter, so that transfected cells will produce sufficient quantities of the ribozyme to destroy endogenous messages and inhibit translation. Because ribozymes, unlike antisense molecules, are catalytic, a lower intracellular concentration is required for efficiency.

[0280] Antisense RNA, DNA, and ribozyme molecules of the invention may be prepared by any method known in the art for the synthesis of DNA and RNA molecules. These include techniques for chemically synthesizing oligodeoxyribonucleotides and oligoribonucleotides well known in the art such as for example solid phase phosphoramidite chemical synthesis. The sequences of the antisense and ribozyme molecules will be based on the known sequence of the differentially expressed nucleic acid molecules. Alternatively, RNA molecules may be generated by in vitro and in vivo transcription of DNA sequences encoding the antisense RNA molecule. Such DNA sequences may be incorporated into a wide variety of vectors which incorporate suitable RNA polymerase promoters such as the T7 or SP6 polymerase promoters. Alternatively, antisense cDNA constructs that synthesize antisense RNA constitutively or inducibly, depending on the promoter used, can be introduced stably into cell lines.

[0281] Moreover, various well-known modifications to nucleic acid molecules may be introduced as a means of increasing intracellular stability and half-life. Possible modifications include but are not limited to the addition of flanking sequences of ribonucleotides or deoxyribonucleotides to the 5′ and/or 3′ ends of the molecule or the use of phosphorothioate or 2′ O-methyl rather than phosphodiesterase linkages within the oligodeoxyribonucleotide backbone.

[0282] RNAi Therapy

[0283] In another embodiment, a therapeutic agent according to the invention can be a double stranded RNAi molecule that is specifically targeted to one or more of the polynucleotide sequences which are differentially expressed in an animal subjected to pain relative to an animal that is not subjected to pain (see Tables 1, 2, 3, 4, or 5). As used herein, RNAi or RNA interference refers to the gene-specific, double stranded RNA (dsRNA) mediated, post-transcriptional silencing of gene expression as described in the review by Hannon, G., (2002) Nature 418, 244-250, which is herein incorporated in its entirety. Current experimental evidence indicates that RNA is specific for a target RNA are recognized and processed into 21 and 23 nucleotide small interfering RNAs (siRNAs) by the Dicer RNase III endonuclease. SiRNAs are then incorporated into a RNA induced silencing complex (RISC) which becomes activated by unwinding of the duplex siRNA. Activated RISC complexes then promote RNA degradation and translation inhibition of the target RNA.

[0284] In mammals, RNAi therapy, according to the invention, refers to gene-specific suppression that can be achieved by generating siRNA (Elbashir, S. M. et al. (2001) Nature (London) 411, 494-498). In vitro synthesized siRNAs can be prepared by any method known in the art for the synthesis of RNA molecules. These include techniques for chemically synthesizing oligoribonucleotides that are well known in the art, for example, solid phase phosphoramidite chemical synthesis. The sequences of the siRNA molecules are based on the known sequence of the differentially expressed nucleic acid molecules. Alternatively, siRNA molecules can be generated by the T7 or SP6 polymerase promoter driven in vitro transcription of DNA sequences encoding the siRNA molecule. In vitro synthesized siRNAs can be delivered to cells either by direct injection of in vitro synthesized siRNAs into the tissue site. Alternatively, modified siRNAs, designed to target the desired cells (via linkage to peptides or antibodies that specifically bind to cell surface receptors or antigens), can be administered systemically.

[0285] In a preferred embodiment, the siRNAs of the invention are delivered to a target cell as an expression plasmid under the control of a RNA polymerase II or III promoter. When transcribed in the cell, siRNA is generated which is complementary to a cellular mRNA identified as being differentially expressed in an animal subjected to pain. The construction and use of expression plasmids is described above and may be adapted by one of skill in the art to include siRNA expression plasmids. Such vectors can be constructed by recombinant DNA technology methods standard in the art, combined with those described above. Vectors can be plasmid, viral, or others known in the art for replication and expression in mammalian cells. Expression of the sequence encoding the siRNA can be by any promoter known in the art to act in an animal, preferably mammalian cells. Such promoters can be inducible or constitutive. Such promoters include but are not limited to: the SV40 early promoter region (Bernoist and Chambon, 1981, Nature 290:304-3 10), the promoter contained in the 3′ long terminal repeat of Rous sarcoma virus (Yamamoto et al., 1980, Cell 22:787-797), the herpes thymidine kinase promoter (Wagner et al., 1981, Proc. Natl. Acad. Sci. U.S.A. 78:1441-1445), the regulatory sequences of the metallothionein gene (Brinster et at, 1982, Nature 296:39-42), etc as well as neural specific promoters, for example the nestin promoter. Any plasmid, cosmid, YAC or viral vector can be used to prepare the recombinant DNA construct which can be introduced directly into the tissue site; e.g., the spinal cord, or dorsal root ganglion. Alternatively, viral vectors can be used which selectively infect the desired tissue (e.g., for brain, herpes virus vectors may be used), in which case administration may be accomplished by another route (e.g., systemically).

[0286] In a preferred embodiment, the siRNA expression vectors of the invention are synthesized from a DNA template under the control of an RNA polymerase III (Pol III) promoter in transfected cells or transgenic animals (see below). Pol III directs the synthesis of small, noncoding transcripts whose 3′ ends are defined by termination within a stretch of 4-5 thymidines (Ts) (Sui et al. PNAS (2002) vol. 99, 5515-5520). Addition of 3′ overhangs contributes to the activity of siRNA synthesized in vitro (Elbashir, S. M et al. (2001) Genes Dev. 15, 188-200). Transfection of such a construct into target cells results in the transcription of sufficient amounts of siRNAs to base pair with the endogenous transcripts, promote its degradation and thereby prevent translation of the target mRNA. The vector can remain episomal or become chromosomally integrated. Alternatively the construct may be incorporated into a viral vector such as herpes virus vectors as described supra.

[0287] An example of mouse U6 pol III transcribed siRNA expression plasmid is shown below where the 21 nucleotide sequence is specific for one or more of the differentially expressed sequences shown in Tables 1, 2, 3, 4, or 5 (see Sui et al. PNAS (2002) vol. 99, 5515-5520):

[chemical structure]

[0288] Supplemental Therapy

[0289] The differentially expressed nucleic acid sequences described herein may exhibit either increased or decreased expression. The antisense methods described above are directed primarily at inhibiting the expression of a differentially overexpressed sequence. Alternatively, in the situation where differential expression is manifested in a decrease in sequence expression, the underexpressed sequence may be supplied to the animal in an expression vector as described above. If for example, through the process of identifying and verifying the differential expression of nucleic acid sequences obtained from an animal subjected to pain, a sequence is identified which is expressed at a level at least 1.2 fold less than in a naïve animal in at least three replicate analyses with a significance of p<0.05 (or, alternatively, at least 1.4 fold less), the sequence may be cloned into a suitable expression vector for expression of the sequence in the animal subjected to pain. Either viral or non-viral gene delivery methods may be used to introduce the construct into the animal cells as described above. Briefly, the deficient sequence may be cloned into any expression vector known in the art which is compatible with the animal cell into which it is intended to be introduced, and which is capable of supporting expression of the recombinant sequence. The vector used may be chosen to replicate episomaly or may integrate in the cell chromosome, provided that either mode of replication permits the expression of the deficient nucleic acid sequence. Further, any promoter sequence which is sufficient to direct expression of the recombinant sequence may be used in the vector to direct expression of the sequence. In a preferred embodiment, the promoter is constitutively active in the animal, given that the goal is to attain a level of gene expression sufficient to replace the deficiently expressed sequence. In a further preferred embodiment, the promoter is a neuron-specific promoter. Vectors comprising the deficient sequence may be introduced into cells of the animal subjected to pain using any technique known to those of skill in the art including, but not limited to microinjection and viral delivery.

[0290] Similarly, those proteins which are encoded by polynucleotide sequences which are differentially expressed as indicated in Tables 1, 2, 3, 4, or 5, and which are also indicated in the column labeled “subcellular localization” (i.e., in Table 2) as being a secreted protein, may be screened for their ability to modulate the activity of one or more of the proteins indicated in Tables 1, 2, 3, 4, or 5, or screened for their ability to modulate pain in an animal.

[0291] Once a therapeutic gene is defined, whether it be an antisense molecule, ribozyme, or supplemental sequence, the gene sequence is subcloned into a vector suitable for the purpose of gene therapy. Murine leukemia virus (MLV)-based retroviral vectors are one of the most widely used gene delivery vehicles in gene therapy clinical trials and have been employed in almost 70% of approved protocols (Ali, M. et al., Gene Ther., 1:367-384, 1994; Marshall, E., Science, 269:1050-1055, 1995). Other useful vectors are also known in the art (e.g., Carter and Samulski, 2000, Int. J. Mol. Med. 6:17-27; Lever et al., 1999, Biochem. Soc. Trans. 27: 841-7). Methods for gene therapy of human diseases are described in U.S. Pat. Nos. 6,190,907; 6,187,305; 6,140,087; and 6,129,705.

[0292] Screening Assays

[0293] Protein Activity Regulators

[0294] Regulators as used herein, refer to compounds that affect the activity of a “differentially expressed protein” in vivo and/or in vitro. As used herein, the term “differentially expressed protein (or polypeptide)” will refer to the proteins of Table 1, 2, 3, 4, or 5 that are encoded by sequences that are differentially expressed in pain. Regulators can be agonists and antagonists of a differentially expressed polypeptide and can be compounds that exert their effect on the differentially expressed protein activity via the enzymatic activity, expression, post-translational modifications or by other means. Agonists of a differentially expressed protein are molecules which, when bound to a differentially expressed protein, increase or prolong the activity of a differentially expressed protein. Agonists of a differentially expressed protein include proteins, nucleic acids, carbohydrates, small molecules, or any other molecule which activate a differentially expressed protein. Antagonists of a differentially expressed protein are molecules which, when bound to a differentially expressed protein, decrease the amount or the duration of the activity of a differentially expressed protein. Antagonists include proteins, nucleic acids, carbohydrates, antibodies, small molecules, or any other molecule which decrease the activity of a “differentially expressed protein”. The activity of a differentially expressed protein, useful in the present invention is indicated in Table 2, 3, 4, or 5 either directly in columns labeled “identifier”, “description” and/or “protein type”, or may be inferred from the information provided in the column labeled “subcellular localization” (Table 2). For example, if a protein is localized to the cell membrane, then one of skill in the art would be able to determine that the activity of such a protein would be that of a receptor, for example, or an ion channel, and screen candidate compounds against this protein activity accordingly.

[0295] The term “modulate”, as it appears herein, refers to a change in the activity of a differentially expressed protein. For example, modulation may cause an increase or a decrease in enzymatic activity, binding characteristics, or any other biological, functional, or immunological properties of a differentially expressed protein.

[0296] As used herein, the terms “specific binding” or “specifically binding” refer to that interaction between a protein or peptide and an agonist, an antibody, or an antagonist. The interaction is dependent upon the presence of a particular structure of the protein recognized by the binding molecule (i.e., the antigenic determinant or epitope). For example, if an antibody is specific for epitope “A” the presence of a polypeptide containing the epitope A, or the presence of free unlabeled A, in a reaction containing free labeled A and the antibody will reduce the amount of labeled A that binds to the antibody.

[0297] The invention provides methods (also referred to herein as “screening assays”) for identifying compounds which can be used for the treatment of pain. The methods entail the identification of candidate or test compounds or agents (e.g., peptides, peptidomimetics, small molecules or other molecules) which bind to a differentially expressed protein and/or have a stimulatory or inhibitory effect on the biological activity of a differentially expressed protein or its expression and then determining which of these compounds have an effect on pain symptoms in an in vivo assay.

[0298] Candidate or test compounds or agents which bind to a differentially expressed protein and/or have a stimulatory or inhibitory effect on the activity or the expression of a differentially expressed protein are identified either in assays that employ cells which express a differentially expressed protein (cell-based assays) or in assays with an isolated differentially expressed protein (cell-free assays). The various assays can employ a variety of variants of a differentially expressed protein (e.g., full-length differentially expressed protein, a biologically active fragment of a differentially expressed protein, or a fusion protein which includes all or a portion of a differentially expressed protein). Moreover, a differentially expressed protein can be derived from any suitable mammalian species (e.g., human differentially expressed protein, rat differentially expressed protein or murine differentially expressed protein). The assay can be a binding assay entailing direct or indirect measurement of the binding of a test compound or a known differentially expressed protein ligand to a differentially expressed protein. The assay can also be an activity assay entailing direct or indirect measurement of the activity of a differentially expressed protein. The assay can also be an expression assay entailing direct or indirect measurement of the expression of a differentially expressed protein mRNA or a differentially expressed protein. The various screening assays are combined with an in vivo assay entailing measuring the effect of the test compound on the pain symtoms.

[0299] In one embodiment, the invention provides assays for screening candidate or test compounds which bind to or modulate the activity of a membrane-bound (cell surface expressed) form of the differentially expressed protein. Such assays can employ the full-length differentially expressed protein, a biologically active fragment of the differentially expressed protein, or a fusion protein which includes all or a portion of the differentially expressed protein. As described in greater detail below, the test compound can be obtained by any suitable means, e.g., from conventional compound libraries. Determining the ability of the test compound to bind to a membrane-bound form of the differentially expressed protein can be accomplished, for example, by coupling the test compound with a radioisotope or enzymatic label such that binding of the test compound to the differentially expressed protein-expressing cell can be measured by detecting the labeled compound in a complex. For example, the test compound can be labelled with ¹²⁵I, ³⁵S, ¹⁴C, or ³H, either directly or indirectly, and the radioisotope detected by direct counting of radioemmission or by scintillation counting. Alternatively, the test compound can be enzymatically labelled with, for example, horseradish peroxidase, alkaline phosphatase, or luciferase, and the enzymatic label detected by determination of conversion of an appropriate substrate to product.

[0300] In a competitive binding format, the assay comprises contacting the differentially expressed protein-expressing cell with a known compound which binds to the differentially expressed protein to form an assay mixture, contacting the assay mixture with a test compound, and determining the ability of the test compound to interact with the differentially expressed protein-expressing cell, wherein determining the ability of the test compound to interact with the differentially expressed protein-expressing cell comprises determining the ability of the test compound to preferentially bind the differentially expressed protein expressing cell as compared to the known compound.

[0301] In another embodiment, the assay is a cell-based assay comprising contacting a cell expressing a membrane-bound form of the differentially expressed protein (e.g., full-length differentially expressed protein, a biologically active fragment of the differentially expressed protein, or a fusion protein which includes all or a portion of the differentially expressed protein) expressed on the cell surface with a test compound and determining the ability of the test compound to modulate (e.g., stimulate or inhibit) the activity of the membrane-bound form of the differentially expressed protein. Determining the ability of the test compound to modulate the activity of the membrane-bound form of the differentially expressed protein can be accomplished by any method suitable for measuring the activity of the differentially expressed protein, e.g., any method suitable for measuring the activity of a G-protein coupled receptor or other seven-transmembrane receptor (described in greater detail below). The activity of a seven-transmembrane receptor can be measured in a number of ways, not all of which are suitable for any given receptor. Among the measures of activity are: alteration in intracellular Ca2+ concentration, activation of phospholipase C, alteration in intracellular inositol triphosphate (IP3) concentration, alteration in intracellular diacylglycerol (DAG) concentration, and alteration in intracellular adenosine cyclic 3′, 5′-monophosphate (cAMP) concentration.

[0302] The present invention includes biochemical, cell free assays that allow the identification of inhibitors and agonists of phosphodiesterases (PDEs) suitable as lead structures for pharmacological drug development. Such assays involve contacting a form of a differentially expressed protein (e.g., full-length differentially expressed protein, a biologically active fragment of a differentially expressed protein, or a fusion protein comprising all or a portion of a differentially expressed protein) with a test compound and determining the ability of the test compound to act as an antagonist (preferably) or an agonist of the enzymatic activity of a differentially expressed protein. In one embodiment, the assay includes monitoring the PDE activity of a differentially expressed protein by measuring the conversion of either cAMP or cGMP to its nucleoside monophosphate after contacting a differentially expressed protein with a test compound.

[0303] For example, cAMP and cGMP levels can be measured by the use of the tritium containing compounds 3HcAMP and 3HcGMP as described in [Hansen, R. S., and Beavo, J. A., PNAS USA 1982; 79: 2788-92]. To screen a compound pool comprised of a large number of compounds, the microtiter plate-based scintillation proximity assay (SPA) as described in [Bardelle, C. et al. (1999) Anal. Biochem. 275: 148-155] can be applied.

[0304] Alternatively, the phosphodiesterase activity of the recombinant protein can be assayed using a commercially available SPA kit (Amersham Pharmacia). The PDE enzyme hydrolyzes cyclic nucleotides, e.g. cAMP and cGMP to their linear counterparts. The SPA assay utilizes the tritiated cyclic nucleotides [3H]cAMP or [3H]cGMP, and is based upon the selective interaction of the tritiated non cyclic product with the SPA beads whereas the cyclic substrates are not effectively binding. Radiolabelled product bound to the scintillation beads generates light that can be analyzed in a scintillation counter.

[0305] The cell-free assays of the present invention are amenable to use of either a membrane-bound form of the differentially expressed protein or a soluble fragment thereof. In the case of cell-free assays comprising the membrane-bound form of the polypeptide, it may be desirable to utilize a solubilizing agent such that the membrane-bound form of the polypeptide is maintained in solution. Examples of such solubilizing agents include, but are not limited to non-ionic detergents such as n-octylglucoside, n-dodecylglucoside, n-dodecylmaltoside, octanoyl-N-methylglucamide, decanoyl-N-methylglucamide, Triton X-100, Triton X-114, Thesit, Iso-tri-decy-poly-(ethylene glycol ether)n, 3-[(3-cholamidopropyl)dimethylamminio]-1-propane sulfonate (CHAPS), 3-[(3-cholamidopropyl)dimethylamminio]-2-hydroxy-1-propane sulfonate (CHAPSO), or N-dodecyl=N,N-dimethyl-3-ammonio-1-propane sulfonate.

[0306] In one embodiment, the invention provides assays for screening candidate or test compounds which bind to or modulate the activity of a differentially expressed protein. Such assays can employ full-length differentially expressed protein, a biologically active fragment of a differentially expressed protein, or a fusion protein which includes all or a portion of a differentially expressed protein. As described in greater detail below, the test compound can be obtained by any suitable means, e.g., from conventional compound libraries.

[0307] Determining the ability of the test compound to modulate the activity of a differentially expressed protein can be accomplished, for example, by determining the ability of a differentially expressed protein to bind to or interact with a target molecule. The target molecule can be a molecule with which a differentially expressed protein binds or interacts with in nature. The target molecule can be a component of a signal transduction pathway which facilitates transduction of an extracellular signal. The target differentially expressed protein molecule can be, for example, a second intracellular protein which has catalytic activity or a protein which facilitates the association of downstream signaling molecules with a differentially expressed protein.

[0308] Determining the ability of a differentially expressed protein to bind to or interact with a target molecule can be accomplished by one of the methods described above for determining direct binding. In one embodiment, determining the ability of a polypeptide of the invention to bind to or interact with a target molecule can be accomplished by determining the activity of the target molecule. For example, the activity of the target molecule can be determined by detecting induction of a cellular second messenger of the target (e.g., intracellular Ca2+, diacylglycerol, IP3, etc.), detecting catalytic/enzymatic activity of the target on an appropriate substrate, detecting the induction of a reporter gene (e.g., a regulatory element that is responsive to a polypeptide of the invention operably linked to a nucleic acid encoding a detectable marker, e.g., luciferase), or detecting a cellular response.

[0309] In various embodiments of the above assay methods of the present invention, it may be desirable to immobilize a differentially expressed protein (or a differentially expressed protein target molecule) to facilitate separation of complexed from uncomplexed forms of one or both of the proteins, as well as to accommodate automation of the assay. Binding of a test compound to a differentially expressed protein, or interaction of a differentially expressed protein with a target molecule in the presence and absence of a candidate compound, can be accomplished in any vessel suitable for containing the reactants. Examples of such vessels include microtitre plates, test tubes, and micro-centrifuge tubes. In one embodiment, a fusion protein can be provided which adds a domain that allows one or both of the proteins to be bound to a matrix. For example, glutathione-S-transferase (GST) fusion proteins or glutathione-S-transferase fusion proteins can be adsorbed onto glutathione sepharose beads (Sigma Chemical; St. Louis, Mo.) or glutathione derivatized microtitre plates, which are then combined with the test compound or the test compound and either the non-adsorbed target protein or a differentially expressed protein, and the mixture incubated under conditions conducive to complex formation (e.g., at physiological conditions for salt and pH). Following incubation, the beads or microtitre plate wells are washed to remove any unbound components and complex formation is measured either directly or indirectly, for example, as described above. Alternatively, the complexes can be dissociated from the matrix, and the level of binding or activity of a differentially expressed protein can be determined using standard techniques.

[0310] Other techniques for immobilizing proteins on matrices can also be used in the screening assays of the invention. For example, either a differentially expressed protein or its target molecule can be immobilized utilizing conjugation of biotin and streptavidin. Biotinylated polypeptide of the invention or target molecules can be prepared from biotin-NHS (N-hydroxysuccinimide) using techniques well known in the art (e.g., biotinylation kit, Pierce Chemicals; Rockford, Ill.), and immobilized in the wells of streptavidin-coated plates (Pierce Chemical). Alternatively, antibodies reactive with a differentially expressed protein or target molecules but which do not interfere with binding of the polypeptide of the invention to its target molecule can be derivatized to the wells of the plate, and unbound target or polypeptide of the invention trapped in the wells by antibody conjugation. Methods for detecting such complexes, in addition to those described above for the GST-immobilized complexes, include immuno-detection of complexes using antibodies reactive with a differentially expressed protein or target molecule, as well as enzyme-linked assays which rely on detecting an enzymatic activity associated with a differentially expressed protein or target molecule.

[0311] Another technique for drug screening which may be used provides for high throughput screening of compounds having suitable binding affinity to the protein of interest as described in published PCT application WO84/03564. In this method, large numbers of different small test compounds are synthesized on a solid substrate, such as plastic pins or some other surface. The test compounds are reacted with a differentially expressed protein, or fragments thereof, and washed. Bound differentially expressed protein is then detected by methods well known in the art. Purified differentially expressed protein can also be coated directly onto plates for use in the afore-mentioned drug screening techniques. Alternatively, non-neutralizing antibodies can be used to capture the peptide and immobilize it on a solid support.

[0312] In another embodiment, one may use competitive drug screening assays in which neutralizing antibodies capable of binding differentially expressed protein specifically compete with a testcompound for binding a differentially expressed protein. In this manner, antibodies can be used to detect the presence of any peptide which shares one or more antigenic determinants with a differentially expressed protein.

[0313] The screening assay can also involve monitoring the expression of a differentially expressed protein. For example, regulators of expression of a differentially expressed protein can be identified in a method in which a cell is contacted with a candidate compound and the expression of a differentially expressed protein protein or mRNA in the cell is determined. The level of expression of a differentially expressed protein or mRNA the presence of the candidate compound is compared to the level of expression of a differentially expressed protein or mRNA in the absence of the candidate compound. The candidate compound can then be identified as a regulator of expression of a differentially expressed protein based on this comparison. For example, when expression of a differentially expressed protein or mRNA protein is greater (statistically significantly greater) in the presence of the candidate compound than in its absence, the candidate compound is identified as a stimulator of a differentially expressed protein or mRNA expression. Alternatively, when expression of a differentially expressed protein or mRNA is less (statistically significantly less) in the presence of the candidate compound than in its absence, the candidate compound is identified as an inhibitor of a differentially expressed protein or mRNA expression. The level of a differentially expressed protein or mRNA expression in the cells can be determined by methods described below.

[0314] Screening for Therapeutic Agents Using Binding Assays

[0315] For binding assays, the test compound is preferably a small molecule which binds to and occupies the active site of a differentially expressed protein polypeptide, thereby making the ligand binding site inaccessible to substrate such that normal biological activity is prevented. Examples of such small molecules include, but are not limited to, small peptides or peptide-like molecules. Potential ligands which bind to a polypeptide of the invention include, but are not limited to, the natural ligands of known differentially expressed protein PDEs and analogues or derivatives thereof.

[0316] In binding assays, either the test compound or the differentially expressed polypeptide can comprise a detectable label, such as a fluorescent, radioisotopic, chemiluminescent, or enzymatic label, such as horseradish peroxidase, alkaline phosphatase, or luciferase. Detection of a test compound which is bound to differentially expressed polypeptide can then be accomplished, for example, by direct counting of radioemmission, by scintillation counting, or by determining conversion of an appropriate substrate to a detectable product. Alternatively, binding of a test compound to a differentially expressed polypeptide can be determined without labeling either of the interactants. For example, a microphysiometer can be used to detect binding of a test compound with a differentially expressed polypeptide. A microphysiometer (e.g., Cytosensor™) is an analytical instrument that measures the rate at which a cell acidifies its environment using a light-addressable potentiometric sensor (LAPS). Changes in this acidification rate can be used as an indicator of the interaction between a test compound and a differentially expressed protein [Haseloff, (1988)].

[0317] Determining the ability of a test compound to bind to differentially expressed protein also can be accomplished using a technology such as real-time Bimolecular Interaction Analysis (BIA) [McConnell, (1992); Sjolander, (1991)]. BIA is a technology for studying biospecific interactions in real time, without labeling any of the interactants (e.g., BIAcore™). Changes in the optical phenomenon surface plasmon resonance (SPR) can be used as an indication of real-time reactions between biological molecules.

[0318] In yet another aspect of the invention, a differentially expressed protein-like polypeptide can be used as a “bait protein” in a two-hybrid assay or three-hybrid assay [Szabo, (1995); U.S. Pat. No. 5,283,317), to identify other proteins which bind to or interact with a differentially expressed protein and modulate its activity.

[0319] The two-hybrid system is based on the modular nature of most transcription factors, which consist of separable DNA-binding and activation domains. Briefly, the assay utilizes two different DNA constructs. For example, in one construct, polynucleotide encoding a differentially expressed protein can be fused to a polynucleotide encoding the DNA binding domain of a known transcription factor (e.g., GAL-4). In the other construct a DNA sequence that encodes an unidentified protein (“prey” or “sample”) can be fused to a polynucleotide that codes for the activation domain of the known transcription factor. If the “bait” and the “prey” proteins are able to interact in vivo to form an protein-dependent complex, the DNA-binding and activation domains of the transcription factor are brought into close proximity. This proximity allows tran-scription of a reporter gene (e.g., LacZ), which is operably linked to a transcriptional regulatory site responsive to the transcription factor. Expression of the reporter gene can be detected, and cell colonies containing the functional transcription factor can be isolated and used to obtain the DNA sequence encoding the protein which interacts with a differentially expressed protein.

[0320] It may be desirable to immobilize either the differentially expressed protein (or polynucleotide) or the test compound to facilitate separation of the bound form from unbound forms of one or both of the interactants, as well as to accommodate automation of the assay. Thus, either the differentially expressed protein-like polypeptide (or polynucleotide) or the test compound can be bound to a solid support. Suitable solid supports include, but are not limited to, glass or plastic slides, tissue culture plates, microtiter wells, tubes, silicon chips, or particles such as beads (including, but not limited to, latex, polystyrene, or glass beads). Any method known in the art can be used to attach the differentially expressed protein-like polypeptide (or polynucleotide) or test compound to a solid support, including use of covalent and non-covalent linkages, passive absorption, or pairs of binding moieties attached respectively to the polypeptide (or polynucleotide) or test compound and the solid support. Test compounds are preferably bound to the solid support in an array, so that the location of individual test compounds can be tracked. Binding of a test compound to the differentially expressed protein (or a polynucleotide encoding for the differentially expressed protein) can be accomplished in any vessel suitable for containing the reactants. Examples of such vessels include microtiter plates, test tubes, and microcentrifuge tubes.

[0321] In one embodiment, the differentially expressed protein is a fusion protein comprising a domain that allows binding of the differentially expressed protein to a solid support. For example, glutathione-S-transferase fusion proteins can be adsorbed onto glutathione sepharose beads (Sigma Chemical, St. Louis, Mo.) or glutathione derivatized microtiter plates, which are then combined with the test compound or the test compound and the non-adsorbed differentially expressed protein; the mixture is then incubated under conditions conducive to complex formation (e.g., at physiological conditions for salt and pH). Following incubation, the beads or microtiter plate wells are washed to remove any unbound components. Binding of the interactants can be determined either directly or indirectly, as described above. Alternatively, the complexes can be dissociated from the solid support before binding is determined.

[0322] Other techniques for immobilizing proteins or polynucleotides on a solid support also can be used in the screening assays of the invention. For example, either the differentially expressed protein (or a polynucleotide encoding the differentially expressed protein) or a test com-pound can be immobilized utilizing conjugation of biotin and streptavidin. Biotinylated differentially expressed protein (or a polynucleotide encoding biotinylated differentially expressed protein) or test compounds can be prepared from biotin-NHS (N-hydroxysuccinimide) using techniques well known in the art (e.g., biotinylation kit, Pierce Chemicals, Rockford, Ill.) and immobilized in the wells of streptavidin-coated plates (Pierce Chemical). Alternatively, antibodies which specifically bind to the differentially expressed protein, polynucleotide, or a test compound, but which do not interfere with a desired binding site, such as the active site of the differentially expressed protein, can be derivatized to the wells of the plate. Unbound target or protein can be trapped in the wells by antibody conjugation.

[0323] Methods for detecting such complexes, in addition to those described above for the GST-immobilized complexes, include immunodetection of complexes using antibodies which specifically bind to the differentially expressed protein or test compound, enzyme-linked assays which rely on detecting an activity of the differentially expressed protein, and SDS gel electrophoresis under non-reducing conditions.

[0324] Screening for test compounds which bind to the differentially expressed protein or polynucleotide also can be carried out in an intact cell. Any cell which comprises the differentially expressed polypeptide or polynucleotide can be used in a cell-based assay system. A differentially expressed protein polynucleotide can be naturally occurring in the cell or can be introduced using techniques such as those described above. Binding of the test compound to the differentially expressed protein or a polynucleotide encoding the differentially expressed protein is determined as described above.

Functional Assays

[0325] Test compounds can be tested for the ability to increase or decrease activity of a differentially expressed polypeptide. The differentially expressed protein activity can be measured, for example, using methods described in the specific examples, below. differentially expressed protein activity can be measured after contacting either a purified differentially expressed protein or an intact cell with a test compound. A test compound which decreases the differentially expressed protein activity by at least about 10, preferably about 50, more preferably about 75, 90, or 100% is identified as a potential agent for decreasing the differentially expressed protein activity. A test compound which increases the differentially expressed protein activity by at least about 10, preferably about 50, more preferably about 75, 90, or 100% is identified as a potential agent for increasing the differentially expressed protein activity.

Gene Expression

[0326] In another embodiment, test compounds which increase or decrease the differentially expressed protein gene expression are identified (i.e., test compounds which increase or decrease the expression of a differentially expressed polynucleotide sequence of the invention). As used herein, the term “correlates with expression of a poly-nucleotide” indicates that the detection of the presence of nucleic acids, the same or related to a nucleic acid sequence encoding the differentially expressed protein, by northern analysis or realtime PCR is indicative of the presence of nucleic acids encoding the differentially expressed protein in a sample, and thereby correlates with expression of the transcript from the polynucleotide encoding the differentially expressed protein. The term “microarray”, as used herein, refers to an array of distinct polynucleotides or oligonucleotides arrayed on a substrate, such as paper, nylon or any other type of membrane, filter, chip, glass slide, or any other suitable solid support. A differentially expressed protein polynucleotide is contacted with a test compound, and the expression of an RNA or polypeptide product of the differentially expressed protein polynucleotide is determined. The level of expression of appropriate mRNA or polypeptide in the presence of the test compound is compared to the level of expression of mRNA or polypeptide in the absence of the test compound. The test compound can then be identified as a regulator of expression based on this comparison. For example, when expression of mRNA or polypeptide is greater in the presence of the test compound than in its absence, the test compound is identified as a stimulator or enhancer of the mRNA or polypeptide expression. Alternatively, when expression of the mRNA or polypeptide is less in the presence of the test compound than in its absence, the test compound is identified as an inhibitor of the mRNA or polypeptide expression.

[0327] The level of the differentially expressed protein mRNA or polypeptide expression in the cells can be determined by methods well known in the art for detecting mRNA or polypeptide. Either qualitative or quantitative methods can be used. The presence of polypeptide products of the differentially expressed protein polynucleotide can be determined, for example, using a variety of techniques known in the art, including immunochemical methods such as radioimmunoassay, Western blotting, and immunohistochemistry. Alternatively, polypeptide synthesis can be determined in vivo, in a cell culture, or in an in vitro translation system by detecting incorporation of labelled amino acids into the differentially expressed protein.

[0328] Such screening can be carried out either in a cell-free assay system or in an intact cell. Any cell which expresses the differentially expressed protein polynucleotide can be used in a cell-based assay system. The the differentially expressed protein polynucleotide can be naturally occurring in the cell or can be introduced using techniques such as those described above. Either a primary culture or an established cell line can be used.

[0329] Screening of Therapeutic Agents Against Pain-Specific Array

[0330] In one embodiment the present invention provides a method for screening agents for their ability to regulate the expression of genes which are differentially expressed in an animal subjected to pain. In brief, the method comprises administering to an animal subjected to pain, such as an animal pain model, a potentially therapeutic agent, isolating nucleic acid from sensory neurons of the animal, preparing the nucleic acid for hybridization to a microarray as described above, and hybridizing the nucleic acid to a pain-specific microarray. The hybridization level is then compared to the hybridization of a nucleic acid sample contacted with the pain-specific microarray obtained from an animal subjected to pain, but not administered the potentially therapeutic agent. In one embodiment, the potentially therapeutic agent is deemed to be therapeutic if the expression level of the nucleic acid sequence obtained from the animal subjected to pain and treated with the agent is no longer differentially expressed by at least 1.4 fold, and wherein the expression of the nucleic acid sequence obtained from the animal subjected to pain but not treated with the agent remains differentially regulated. The nucleic acid sequences analyzed to determine therapeutic efficacy can include any of the sequences previously identified (see above) as being differentially expressed in an animal subjected to pain.

[0331] Animals may be administered any potentially therapeutic agent known in the art, including antisense molecules, ribozymes, and supplemental nucleic acid sequences as described above. Additional therapeutic agents include any agent known in the art which is routinely administered for the amelioration of pain including, but not limited to asprin, ibuprofen, narcotics, steroidial and non-steroidial anti-inflammatories, and the like. These agents are administered according to dosing protocols well known in the art.

[0332] Screening of Therapeutic Agents Against Individual Genes that are Differentially Expressed in Pain

[0333] Candidate therapeutic agents of the invention are screened for their ability to regulate the expression of one or more isolated polynucleotide sequences which have been identified herein as differentially regulated in an animal which has been subjected to pain relative to an animal that is not subjected to pain. In one embodiment, the screen consists of administering a candidate therapeutic agent, as defined herein, or a placebo, to an animal that is subjected to pain and hybridizing a nucleic acid sample, corresponding to RNA obtained from such a treated or non treated animal, to a probe specific for a polynucleotide sequence selected from the group of isolated polynucleotide sequences of Tables 1, 2, 3, 4, or 5. In another embodiment, the screen consists of administering a candidate therapeutic agent, as defined herein, or a placebo, to an in vitro cell culture of primary cells for example, primary neurons, that naturally express polynucleotide sequences selected from the group of isolated polynucleotide sequences of Tables 1, 2, 3, 4, or 5. In a further embodiment, the screen consists of administering a candidate therapeutic agent, as defined herein, or a placebo, to cell lines that have been transfected with vectors that direct the expression of polynucleotide sequences selected from the group of isolated polynucleotide sequences of Tables 1, 2, 3, 4, or 5. In a further embodiment, the screen consists of administering a candidate therapeutic agent, as defined herein, or a placebo, to a transgenic animal in which a neural specific promoter drives the expression of a polynucleotide sequence selected from the group of isolated polynucleotide sequences of Tables 1, 2, 3, 4, or 5. In all instances, a 10% increase or decrease in the differential expression of a gene in response to a therapeutic compound is indicative of a therapeutic agent that can modulate the differential expression of a gene that is differentially regulated in an animal which has been subjected to pain relative to an animal that is not subjected to pain. In a preferred embodiment, nucleic acid samples obtained from treated and non-treated animals or in vitro cell cultures are hybridized to 1 or more, 2 or more, 5 or more, 50 or more, 100 or more, 500 or more, 1000 or more probes, each probe being specific to a polynucleotide sequence selected from the group of differentially expressed polynucleotide sequences of Tables 1, 2, 3, 4, or 5.

[0334] Methods for measuring the differential expression of one or more of the polynucleotides sequences of Tables 1, 2, 3, 4, or 5 in nucleic acid samples from treated animals relative to non-treated animals, are well known in the art and include, but are not limited to, reverse transcription PCR (RT-PCR; described in U.S. Pat. No. 5,407,800), Taqman (as disclosed in U.S. Pat. Nos. 5,210,015 and 5,487,972), Molecular Beacon assays (as disclosed in WO 95/13399), Northern blot hybridization, S1 nuclease mapping, RNAse protection assays which are described in the literature. See, e.g., Sambrook, Fritsch & Maniatis, 1989, Molecular Cloning: A Laboratory Manual, Second Edition; Oligonucleotide Synthesis (M. J. Gait, ed., 1984); Nucleic Acid Hybridization (B. D. Harnes & S. J. Higgins, eds., 1984); A Practical Guide to Molecular Cloning (B. Perbal, 1984); and a series, Methods in Enzymology (Academic Press, Inc.); Short Protocols In Molecular Biology, (Ausubel et al., ed., 1995). References to patents and literature are by incorporated in their entirety.

[0335] Compounds identified as positives based on this screen can be further tested for activity in the in vitro cell culture assay, in vivo protein activity assay or analgesic assays, described herein, to determine if these compounds are effective at modulating differential gene expression in response to pain and ultimately attenuating pain itself.

Polypeptide Activity

[0336] In one embodiment, the present invention provides a method for screening potentially therapeutic agents which modulate the activity of one or more polypeptides encoded by one or more of the polynucleotide sequences in Tables 1, 2, 3, 4, or 5, such that if the activity of the polypeptide is increased in an animal subjected to pain, the therapeutic substance will decrease the activity of the polypeptide relative to the activity of the same polypeptide in an animal subjected to pain, but not treated with the therapeutic agent. Likewise, if the activity of the polypeptide is decreased in an animal subjected to pain, the therapeutic substance will increase the activity of the polypeptide relative to the activity of the same polypeptide in an animal subjected to the same pain, but not treated with the therapeutic agent.

[0337] The activity of the polypeptide molecules encoded by the polynucleotides indicated in Tables 1, 2, 3, 4, or 5 may be measured by any means known to those of skill in the art, and which are particular for the type of activity performed by the particular polypeptide. Examples of specific assays which may be used to measure the activity of particular polynucleotide products are shown below.

[0338] (a) G-Protein Coupled Receptors

[0339] In one embodiment, the one or more of the differentially regulated polynucleotides of Tables 1, 2, 3, 4, or 5 may encode a G-protein coupled receptor. In one embodiment, the present invention provides a method of screening potential agonists and antagonists of the family of G-protein coupled receptors, including Gₛ, Gᵢ, and G_{q}, encoded by the differentially expressed polynucleotides of the present invention by measuring changes in the activity of these receptors in the presence of a candidate agonist or antagonist.

[0340] 1. Gᵢ-Coupled Receptor Screening

[0341] Cells (such as CHO cells, or primary cells) are stably transfected with the relevant receptor and with an inducible CRE-luciferase construct. Cells are grown in 50% Dulbecco's modified Eagle medium/50% F12 (DMEM/F12) supplemented with 10% FBS, at 37° C. in a humidified atmosphere with 10% CO2 and are routinely split at a ratio of 1:10 every 2 or 3 days. Test cultures are seeded into 384-well plates at an appropriate density (e.g. 2000 cells/well in 35 μl cell culture medium) in DMEM/F12 with FBS, and are grown for 48 hours (range: ˜24-60 hours, depending on cell line). Growth medium is then exchanged against serum free medium (SFM; e.g. Ultra-CHO), containing 0.1% BSA. Test compounds dissolved in DMSO are diluted in SFM and transferred to the test cultures (maximal final concentration 10 μmolar), followed by addition of forskolin (˜1 μmolar, final conc.) in SFM+0.1% BSA 10 minutes later. In case of antagonist screening both, an appropriate concentration of agonist, and forskolin are added. The plates are incubated at 37° C. in 10% CO2 for 3 hours. Then the supernatant is removed, cells are lysed with lysis reagent (25 mmolar phosphate-buffer, pH 7.8, containing 2 mmolar DDT, 10% glycerol and 3% Triton X100). The luciferase reaction is started by addition of substrate-buffer (e.g. luciferase assay reagent, Promega) and luminescence is immediately determined (e.g. Berthold luminometer or Hamamatzu camera system).

[0342] 2. Gₛ-Coupled Receptor Screening

[0343] Cells (such as CHO, or primary cells) are stably transfected with the relevant receptor and with an inducible CRE-luciferase construct. Cells are grown in 50% Dulbecco's modified Eagle medium/50% F12 (DMEM/F12) supplemented with 10% FBS, at 37° C. in a humidified atmosphere with 10% CO2 and are routinely split at a ratio of 1:10 every 2 or 3 days. Test cultures are seeded into 384-well plates at an appropriate density (e.g. 1000 or 2000 cells/well in 35 μl cell culture medium) in DMEM/F12 with FBS, and are grown for 48 hours (range: ˜24-60 hours, depending on cell line). The assay is started by addition of test-compounds in serum free medium (SFM; e.g. Ultra-CHO) containing 0.1% BSA: Test compounds are dissolved in DMSO, diluted in SFM and transferred to the test cultures (maximal final concentration 10 μmolar, DMSO conc.<0.6%). In case of antagonist screening an appropriate concentration of agonist is added 5-10 minutes later. The plates are incubated at 37° C. in 10% CO2 for 3 hours. Then the cells are lysed with 10 μl lysis reagent per well (25 mmolar phosphate-buffer, pH 7.8, containing 2 mmolar DDT, 10% glycerol and 3% Triton X100) and the luciferase reaction is started by addition of 20 μl substrate-buffer per well (e.g. luciferase assay reagent, Promega). Measurement of luminescence is started immediately (e.g. Berthold luminometer or Hamamatzu camera system).

3. G_{q}-Coupled Receptor Screening

[0344] Cells (such as CHO, or primary cells) are stably transfected with the relevant receptor. Cells expressing functional receptor protein are grown in 50% Dulbecco's modified Eagle medium/50% F12 (DMEM/F12) supplemented with 10% FBS, at 37° C. in a humidified atmosphere with 5% CO2 and are routinely split at a cell line dependent ratio every 3 or 4 days. Test cultures are seeded into 384-well plates at an appropriate density (e.g. 2000 cells/well in 35 μl cell culture medium) in DMEM/F12 with FBS, and are grown for 48 hours (range: ˜24-60 hours, depending on cell line). Growth medium is then exchanged against physiological salt solution (e.g. Tyrode solution). Test compounds dissolved in DMSO are diluted in Tyrode solution containing 0.1% BSA and transferred to the test cultures (maximal final concentration 10 μmolar). After addition of the receptor specific agonist the resulting Gq-mediated intracellular calcium increase is measured using appropriate read-out systems (e.g. calcium-sensitive dyes).

[0345] (b) Ion Channels

[0346] Ion channels are integral membrane proteins involved in electrical signaling, transmembrane signal transduction, and electrolyte and solute transport. By forming macromolecular pores through the membrane lipid bilayer, ion channels account for the flow of specific ion species driven by the electrochemical potential gradient for the permeating ion. At the single molecule level, individual channels undergo conformational transitions (“gating”) between the ‘open’ (ion conducting) and ‘closed’ (non conducting) state. Typical single channel openings last for a few milliseconds and result in elementary transmembrane currents in the range of 10-9-10-12 Ampere. Channel gating is controlled by various chemical and/or biophysical parameters, such as neurotransmitters and intracellular second messengers (‘ligand-gated’ channels) or membrane potential (‘voltage-gated’ channels). Ion channels are functionally characterized by their ion selectivity, gating properties, and regulation by hormones and pharmacological agents. Because of their central role in signaling and transport processes, ion channels present ideal targets for pharmacological therapeutics in various pathophysiological settings.

[0347] In one embodiment, the one or more of the differentially regulated polynucleotides of Tables 1, 2, 3, 4, or 5 may encode an ion channel. In one embodiment, the present invention provides a method of screening potential activators or inhibitors of channel activity encoded by the differentially expressed polynucleotides of the present invention. Screening for compounds interacting with ion channels to either inhibit or promote their activity can be based on (1.) binding and (2.) functional assays in living cells (see for example, Hille, 1992, Ion Channels of Excitable Membranes Sunderland, Mass., Sinauer Associates, Inc.; incorporated herein by reference in its entirety).

[0348] 1. For ligand-gated channels, e.g. ionotropic neurotransmitter/hormone receptors, assays can be designed detecting binding to the target by competition between the compound and a labeled ligand.

[0349] 2. Ion channel function can be tested functionally in living cells. Target proteins are either expressed endogenously in appropriate reporter cells or are introduced recombinantly. Channel activity can be monitored by (2.1) concentration changes of the permeating ion (most prominently Ca2+ ions), (2.2) by changes in the transmembrane electrical potential gradient, and (2.3) by measuring a cellular response (e.g. expression of a reporter gene, secretion of a neurotransmitter) triggered or modulated by the target activity.
[0350] 2.1. Channel activity results in transmembrane ion fluxes. Thus activation of ionic channels can be monitored by the resulting changes in intracellular ion concentrations using luminescent or fluorescent indicators. Because of its wide dynamic range and availability of suitable indicators this applies particularly to changes in intracellular Ca2+ ion concentration ([Ca2+]i). [Ca2+]i can be measured, for example, by aequorin luminescence or fluorescence dye technology (e.g. using Fluo-3, Indo-1, Fura-2). Cellular assays can be designed where either the Ca2+flux through the target channel itself is measured directly or where modulation of the target channel affects membrane potential and thereby the activity of co-expressed voltage-gated Ca2+channels.
[0351] 2.2. Ion channel currents result in changes of electrical membrane potential (Vm) which can be monitored directly using potentiometric fluorescent probes. These electrically charged indicators (e.g. the anionic oxonol dye DiBAC4(3)) redistribute between extra- and intracellular compartment in response to voltage changes. The equilibrium distribution is governed by the Nernst-equation. Thus changes in membrane potential results in concomitant changes in cellular fluorescence. Again, changes in Vm might be caused directly by the activity of the target ion channel or through amplification and/or prolongation of the signal by channels co-expressed in the same cell.
[0352] 2.3. Target channel activity can cause cellular Ca2+ entry either directly or through activation of additional Ca2+ channel (see 2.1). The resulting intracellular Ca2+ signals regulate a variety of cellular responses, e.g. secretion or gene transcription. Therefore modulation of the target channel can be detected by monitoring secretion of a known hormone/transmitter from the target-expressing cell or through expression of a reporter gene (e.g. luciferase) controlled by an Ca2+-responsive promoter element (e.g. cyclic AMP/Ca2+-responsive elements; CRE).

[0353] (c) Transcription Factors

[0354] In one embodiment, one or more of the differentially expressed polynucleotide sequences of Tables 1, 2, 3, 4, or 5 may encode a transcription factor. The activity of such a transcription factor may be measured, for example, by a promotor assay which measures the ability of the transcription factor to initiate transcription of a test sequence linked to a particular promotor. In one embodiment, the present invention provides a method for screening a test compound for its ability to modulate the activity of such a transcription factor by measuring the changes in the expression of a test gene which is regulated by a promoter which is responsive to the transcription factor.

[0355] A promoter assay can be set up with a human hepatocellular carcinoma cell HepG2 that is stably transfected with a luciferase gene under the control of a X (e.g. thyroid hormone) regulated promoter. The vector 2× IROluc, which can be used for transfection, carries a thyroid hormone responsive element (TRE) of two 12 bp inverted palindromes separated by an 8 bp spacer in front of a tk minimal promoter and the luciferase gene.

[0356] Test cultures are seeded in 96 well plates in serum-free Eagle's Minimal Essential Medium supplemented with glutamine, tricine, sodium pyruvate, non-essential amino acids, insulin, selen, transferrin, and are cultivated in a humidified atmosphere at 10% CO2 at 37° C. After 48 hours of incubation serial dilutions of test compounds or reference compounds (L-T3, L-T4 e.g.) and costimulator if appropriate (final concentration 1 nM) are added to the cell cultures and incubation is continued for the optimal time (e.g. another 4-72 hours). The cells are then lysed by addition of buffer containing Triton X100 and luciferin and the luminescence of luciferase induced by T3 or other compounds is measured in a luminometer. For each concentration of a test compound replicates of 4 can be tested. EC50-values for each test compound can be calculated by use of, for example, the Graph Pad Prism Scientific software.

Screening of Therapeutic Agents that Modulate the In Vivo Activity of Proteins Encoded by Genes that are Differentially Expressed in Pain

[0357] The invention further provides for a screen of therapeutic compounds that modulate the in vivo activity of proteins encoded by genes that are differentially expressed in an animal subjected to pain (see Tables 1, 2, 3, 4, or 5). Methods for measuring changes in the in vivo activity of the proteins of the invention are well known in the art and include, but are not limited to, testing for changes in enzymatic activity, G coupled receptor activity or ion channel activity (as described herein under Polypeptide Activity); transcription factor function or the activity of signal tranduction pathway intermediates. Generally, these methods involve administering a candidate compound, as defined herein, or a placebo, to an animal that has been subjected to pain, preparing protein extracts from neural tissues and testing for a modulation in the protein activity in the extract in response to the candidate compound. In one embodiment, “protein activity” refers to the activity of a protein that is encoded by a gene that has been identified as a gene that is differentially expressed in an animal subjected to pain. In another embodiment, “protein activity” refers to the activity of one or more proteins whose activity is modulated by a protein that is encoded by a gene that has been identified as a gene that is differentially expressed in an animal subjected to pain.

[0358] In one embodiment, the “protein activity”, according to the invention, refers to the ability of one or more ligands to bind to cell surface receptors that are differentially expressed in animals subjected to pain. For example, WO0102566A1 describes a screen for compounds that modulate the binding of glutamate to glutamate binding receptors.

[0359] In another embodiment, the “protein activity”, according to the invention, is controlled by post-translational protein modification, e.g. phosphorylation or dephosphorylation. For example the protein, identified as being encoded by a gene that is differentially expressed in animals subjected to pain, may be a kinase, whose activity is modulated in response to a candidate compound either by direct phosphorylation or dephosphorylation. Alternatively, the activity of the kinase can be determined by assaying the phosphorylation of one or more substrates of the kinase. Methods for measuring the phosphorylation state of a protein are well known to a person skilled in the art. Typically radioactive phosphate is administered to a test animal that is then subjected to pain in the presence or absence of a therapeutic compound. Protein extracts are then prepared from neurological tissues and the protein of interest is isolated by immunoprecipitation and analyzed by SDS polyacrylamide electrophoresis. A 10% or more increase or decrease in the level of phosphorylation of the protein of interest in the presence of a compound relative to the level of phosphorylation in the absence of the compound is indicative of a compound that modulates the “protein activity”.

[0360] More generally, a gene, that is differentially expressed in animals subjected to pain, may encode a kinase or phosphatase that is part of a signal transduction pathway known in the art. If so, modulation of the activity of the kinase or phosphatase in response to a candidate compound can be determined by assaying the activity of pathway intermediates that are found downstream of the kinase or phosphatase in the pathway. For example, the activity of a kinase or phosphatase can be determined by measuring effects on gene expression or transcription factor activity. Methods for measuring differential gene expression or transcription factor function are well known in the art and are described supra. For example, the binding activity of a transcription factor to its cognate DNA binding site can be tested in protein extracts derived from treated animals using a mobility shift type analysis (see, e.g., Sambrook, Fritsch & Maniatis, 1989, Molecular Cloning: A Laboratory Manual, Second Edition; Short Protocols In Molecular Biology, (Ausubel et al., ed., 1995)). In addition, the ability of a transcription factor to activate transcription from a promoter containing one or more cognate DNA binding sites can also be tested using standard reporter type assays (GFP, CAT, lacZ) that are also well known in the art (See Ausubel et al; supra).

Modeling of Regulators

[0361] Computer modeling and searching technologies permit identification of compounds, or the improvement of already identified compounds, that can modulate the differentially expressed protein expression or activity. Having identified such a compound or composition, the active sites or regions are identified. Such sites might typically be the enzymatic active site, regulator binding sites, or ligand binding sites. The active site can be identified using methods known in the art including, for example, from the amino acid sequences of peptides, from the nucleotide sequences of nucleic acids, or from study of complexes of the relevant compound or composition with its natural ligand. In the latter case, chemical or X-ray crystallographic methods can be used to find the active site by finding where on the factor the complexed ligand is found.

[0362] Next, the three dimensional geometric structure of the active site is determined. This can be done by known methods, including X-ray crystallography, which can determine a complete molecular structure. On the other hand, solid or liquid phase NMR can be used to determine certain intramolecular distances. Any other experimental method of structure determination can be used to obtain partial or complete geometric structures. The geometric structures may be measured with a complexed ligand, natural or artificial, which may increase the accuracy of the active site structure determined.

[0363] If an incomplete or insufficiently accurate structure is determined, the methods of computer based numerical modeling can be used to complete the structure or improve its accuracy. Any recognized modeling method may be used, including parameterized models specific to particular biopolymers such as proteins or nucleic acids, molecular dynamics models based on computing molecular motions, statistical mechanics models based on thermal ensembles, or combined models. For most types of models, standard molecular force fields, representing the forces between constituent atoms and groups, are necessary, and can be selected from force fields known in physical chemistry. The incomplete or less accurate experimental structures can serve as constraints on the complete and more accurate structures computed by these modeling methods.

[0364] Finally, having determined the structure of the active site, either experimentally, by modeling, or by a combination, candidate modulating compounds can be identified by searching databases containing compounds along with information on their molecular structure. Such a search seeks compounds having structures that match the determined active site structure and that interact with the groups defining the active site. Such a search can be manual, but is preferably computer assisted. These compounds found from this search are potential the differentially expressed protein modulating compounds.

[0365] Alternatively, these methods can be used to identify improved modulating compounds from an already known modulating compound or ligand. The composition of the known compound can be modified and the structural effects of modification can be determined using the experimental and computer modeling methods described above applied to the new composition. The altered structure is then compared to the active site structure of the compound to determine if an improved fit or interaction results. In this manner systematic variations in composition, such as by varying side groups, can be quickly evaluated to obtain modified modulating compounds or ligands of improved specificity or activity.

Analgesia Assays: In Vivo Testing of Compounds/Target Validation for Pain Treatment

[0366] Acute Pain

[0367] Acute pain is measured on a hot plate mainly in rats. Two variants of hot plate testing are used: In the classical variant animals are put on a hot surface (52 to 56° C.) and the latency time is measured until the animals show nocifensive behavior, such as stepping or foot licking. The other variant is an increasing temperature hot plate where the experimental animals are put on a surface of neutral temperature. Subsequently this surface is slowly but constantly heated until the animals begin to lick a hind paw. The temperature which is reached when hind paw licking begins is a measure for pain threshold.

[0368] Compounds are tested against a vehicle treated control group. Substance application is performed at different time points via different application routes (intravenous (i.v.), intraperitoneal (i.p.), by mouth (p.o.), by inhalation (i.t.), Intracerebroventricular (i.c.v.), subcutaneous (s.c.), intradermal, or transdermal) prior to pain testing.

[0369] According to the invention, a candidate compound, may be administered to an animal which is subjected to an acute pain assay. Acute pain, measured according to the above assay, decreased by at least 10%, and preferably 20%, 40%, 60%, and up to 100% is then indicative of a candidate compound that decreases pain.

[0370] Persistent Pain

[0371] Persistent pain is measured with the formalin or capsaicin test, mainly in rats. A solution of 1 to 5% formalin or 10 to 100 μg capsaicin is injected into one hind paw of the experimental animal. After formalin or capsaicin application the animals show nocifensive reactions like flinching, licking and biting of the affected paw. The number of nocifensive reactions within a time frame of up to 90 minutes is a measure for intensity of pain.

[0372] Compounds are tested against a vehicle treated control group. Substance application is performed at different time points via different application routes (i.v., i.p., p.o., i.t., i.c.v., s.c., intradermal, transdermal) prior to formalin or capsaicin administration.

[0373] According to the invention, a candidate compound, may be administered to an animal which is subjected to an persistent pain assay. Persistent pain, measured according to the above assay, decreased by at least 10% and preferably 20%, 40%, 60%, and up to 100% is then indicative of a candidate compound that decreases pain.

[0374] Neuropathic Pain

[0375] Neuropathic pain is induced by different variants of unilateral sciatic nerve injury mainly in rats. The operation is performed under anesthesia. The first variant of sciatic nerve injury is produced by placing loosely constrictive ligatures around the common sciatic nerve (Bennett and Xie, Pain 33 (1988): 87-107). The second variant is the tight ligation of about the half of the diameter of the common sciatic nerve (Seltzer et al., Pain 43 (1990): 205-218). In the next variant, a group of models is used in which tight ligations or transections are made of either the L5 and L6 spinal nerves, or the L5 spinal nerve only (Kim S H; Chung Jm, An experimental-model for peripheral neuropathy produced by segmental spinal nerve ligation in the rat, Pain 50 (3) (1992): 355-363). The fourth variant involves an axotomy of two of the three terminal branches of the sciatic nerve (tibial and common peroneal nerves) leaving the remaining sural nerve intact whereas the last variant comprises the axotomy of only the tibial branch leaving the sural and common nerves uninjured. Control animals are treated with a sham operation.

[0376] Postoperatively, the nerve injured animals develop a chronic mechanical allodynia, cold allodynioa, as well as a thermal hyperalgesia. Mechanical allodynia is measured by means of a pressure transducer (electronic von Frey Anesthesiometer, IITC Inc.-Life Science Instruments, Woodland Hills, SA, USA; Electronic von Frey System, Somedic Sales AB, Hörby, Sweden). Thermal hyperalgesia is measured by means of a radiant heat source (Plantar Test, Ugo Basile, Comerio, Italy), or by means of a cold plate of 5 to 10° C. where the nocifensive reactions of the affected hind paw are counted as a measure of pain intensity. A further test for cold induced pain is the counting of nocifensive reactions, or duration of nocifensive responses after plantar administration of acetone to the affected hind limb. Chronic pain in general is assessed by registering the circadanian rhytms in activity (Surjo and Arndt, Universität zu Köln, Cologne, Germany), and by scoring differences in gait (foot print patterns; FOOTPRINTS program, Klapdor et al., 1997. A low cost method to analyse footprint patterns. J. Neurosci. Methods 75, 49-54).

[0377] Compounds are tested against sham operated and vehicle treated control groups. Substance application is performed at different time points via different application routes (i.v., i.p., p.o., i.t., i.c.v., s.c., intradermal, transdermal) prior to pain testing.

[0378] According to the invention, a candidate compound, may be administered to an animal, which is subjected to an neuropathic pain assay. Neuropathic pain, measured according to the above assay, decreased by at least 10% and preferably 20%, 40%, 60%, and up to 100% is then indicative of a candidate compound that decreases pain.

[0379] Inflammatory Pain

[0380] Inflammatory pain is induced mainly in rats by injection of 0.75 mg carrageenan or complete Freund's adjuvant into one hind paw. The animals develop an edema with mechanical allodynia as well as thermal hyperalgesia. Mechanical allodynia is measured by means of a pressure transducer (electronic von Frey Anesthesiometer, IITC Inc.-Life Science Instruments, Woodland Hills, SA, USA). Thermal hyperalgesia is measured by means of a radiant heat source (Plantar Test, Ugo Basile, Comerio, Italy, Paw thermal stimulator, G. Ozaki, University of California, USA). For edema measurement two methods are being used. In the first method, the animals are sacrificed and the affected hindpaws sectioned and weighed. The second method comprises differences in paw volume by measuring water displacement in a plethysmometer (Ugo Basile, Comerio, Italy).

[0381] Compounds are tested against uninflamed as well as vehicle treated control groups. Substance application is performed at different time points via different application routes (i.v., i.p., p.o., i.t., i.c.v., s.c., intradermal, transdermal) prior to pain testing.

[0382] According to the invention, a candidate compound, may be administered to an animal which is subjected to an inflammatory pain assay. Inflammatory pain, measured according to the above assay, decreased by at least 10% and preferably 20%, 40%, 60%, and up to 100% is then indicative of a candidate compound that decreases pain.

[0383] Diabetic Neuropathic Pain

[0384] Rats treated with a single intraperitoneal injection of 50 to 80 mg/kg streptozotocin develop a profound hyperglycemia and mechanical allodynia within 1 to 3 weeks. Mechanical allodynia is measured by means of a pressure transducer (electronic von Frey Anesthesiometer, IITC Inc.-Life Science Instruments, Woodland Hills, SA, USA).

[0385] Compounds are tested against diabetic and non-diabetic vehicle treated control groups. Substance application is performed at different time points via different application routes (i.v., i.p., p.o., i.t., i.c.v., s.c., intradermal, transdermal) prior to pain testing.

[0386] According to the invention, a candidate compound, may be administered to an animal which is subjected to an Diabetic Neuropathic pain assay. Diabetic Neuropathic pain, measured according to the above assay, decreased by at least 10% and preferably 20%, 40%, 60%, and up to 100% is then indicative of a candidate compound that decreases pain.

[0387] In one embodiment, the candidated compounds which are administered to an animal subjected to one or more of the above pain stimuli, can be a candidate compound which had been previously determined to regulate the expression of one or more of the differentially expressed polynucleotide sequences indicated in Tables 1, 2, 3, 4, or 5, and/or previously determined to regulate the activity of a protein encoded by one or more of the differentially expressed polynucleotides indicated in Table 1, 2, 3, 4, or 5.

[0388] Dosage and Administration

[0389] Therapeutic agents of the invention are administered to an animal, preferably in a biologically compatible solution or a pharmaceutically acceptable delivery vehicle, by ingestion, injection, inhalation or any number of other methods. For embodiments where the therapeutic agent is a vector comprising an antisense sequence, a sequence encoding a ribozyme, or a sequence designed to supplement a down regulated sequence in an animal subjected to pain, the vectors may be administered as a pharmaceutical formulation, or may be administered using any method known in the art including microinjection, transfection, transduction, and ex vivo delivery. The dosages administered will vary from patient to patient; a “therapeutically effective dose” is determined, for example but not limited to, by the level of enhancement of function (e.g., for a nucleic acid sequence which is overexpressed by at least 1.4 fold in an animal subjected to pain relative to a naïve animal, a therapeutically effective dose is one which reduces the level of overexpression of the sequence to less than 1.4 fold. The converse would define a therapeutically effective dose for increasing the expression of an under-expressed sequence).

[0390] A therapeutic agent according to the invention is preferably administered in a single dose. This dosage may be repeated daily, weekly, monthly, yearly, or until the nucleic acid sequence is no longer differentially expressed.

[0391] Pharmaceutical Compositions

[0392] The invention provides for compositions comprising a therapeutic agent according to the invention admixed with a physiologically compatible carrier. As used herein, “physiologically compatible carrier” refers to a physiologically acceptable diluent such as water, phosphate buffered saline, or saline, and further may include an adjuvant. Adjuvants such as incomplete Freund's adjuvant, aluminum phosphate, aluminum hydroxide, or alum are materials well known in the art.

[0393] The invention also provides for pharmaceutical compositions. In addition to the active ingredients, these pharmaceutical compositions may contain suitable pharmaceutically acceptable carrier preparations which is used pharmaceutically.

[0394] Pharmaceutical compositions for oral administration are formulated using pharmaceutically acceptable carriers well known in the art in dosages suitable for oral administration. Such carriers enable the pharmaceutical compositions to be formulated as tablets, pills, dragees, capsules, liquids, gels, syrups, slurries, suspensions and the like, for ingestion by the patient.

[0395] Pharmaceutical preparations for oral use are obtained through a combination of active compounds with solid excipient, optionally grinding a resulting mixture, and processing the mixture of granules, after adding suitable auxiliaries, if desired, to obtain tablets or dragee cores. Suitable excipients are carbohydrate or protein fillers such as sugars, including lactose, sucrose, mannitol, or sorbitol; starch from corn, wheat, rice, potato, or other plants; cellulose such as methyl cellulose, hydroxypropylmethyl-cellulose, or sodium carboxymethyl cellulose; and gums including arabic and tragacanth; and proteins such as gelatin and collagen. If desired, disintegrating or solubilizing agents may be added, such as the cross-linked polyvinyl pyrrolidone, agar, alginic acid, or a salt thereof, such as sodium alginate.

[0396] Dragee cores are provided with suitable coatings such as concentrated sugar solutions, which may also contain gum arabic, talc, polyvinylpyrrolidone, carbopol gel, polyethylene glycol, and/or titanium dioxide, lacquer solutions, and suitable organic solvents or solvent mixtures. Dyestuffs or pigments may be added to the tablets or dragee coatings for product identification or to characterize the quantity of active compound, i.e., dosage.

[0397] Pharmaceutical preparations which are used orally include push-fit capsules made of gelatin, as well as soft, sealed capsules made of gelatin and a coating such as glycerol or sorbitol. Push-fit capsules can contain active ingredients mixed with a filler or binders such as lactose or starches, lubricants such as talc or magnesium stearate, and, optionally, stabilizers. In soft capsules, the active compounds may be dissolved or suspended in suitable liquids, such as fatty oils, liquid paraffin, or liquid polyethylene glycol with or without stabilizers.

[0398] Pharmaceutical formulations for parenteral administration include aqueous solutions of active compounds. For injection, the pharmaceutical compositions of the invention may be formulated in aqueous solutions, preferably in physiologically compatible buffers such as Hank's solution, Ringer' solution, or physiologically buffered saline. Aqueous injection suspensions may contain substances which increase the viscosity of the suspension, such as sodium carboxymethyl cellulose, sorbitol, or dextran. Additionally, suspensions of the active solvents or vehicles include fatty oils such as sesame oil, or synthetic fatty acid esters, such as ethyl oleate or triglycerides, or liposomes. Optionally, the suspension may also contain suitable stabilizers or agents which increase the solubility of the compounds to allow for the preparation of highly concentrated solutions.

[0399] For nasal administration, penetrants appropriate to the particular barrier to be permeated are used in the formulation. Such penetrants are generally known in the art.

[0400] The pharmaceutical compositions of the present invention may be manufactured in a manner known in the art, e.g. by means of conventional mixing, dissolving, granulating, dragee-making, levitating, emulsifying, encapsulating, entrapping or lyophilizing processes.

[0401] The pharmaceutical composition may be provided as a salt and are formed with many acids, including but not limited to hydrochloric, sulfuric, acetic, lactic, tartaric, malic, succinic, etc . . . Salts tend to be more soluble in aqueous or other protonic solvents that are the corresponding free base forms. In other cases, the preferred preparation may be a lyophilized powder in 1 mM-50 mM histidine, 0.1%-2% sucrose, 2%-7% mannitol at a pH range of 4.5 to 5.5 that is combined with buffer prior to use.

[0402] After pharmaceutical compositions comprising a therapeutic agent of the invention formulated in a acceptable carrier have been prepared, they are placed in an appropriate container and labeled for treatment of an indicated condition with information including amount, frequency and method of administration.

### EXAMPLES

[0403] The examples below are non-limiting and are merely representative of various aspects and features of the present invention.

### Example 1

### Identification of Differentially Expressed Nucleic Acid Sequences

[0404] The present invention relates to a method for the identification of nucleic acid sequences and/or genes which are differentially expressed in an animal which has been subjected to pain. In one embodiment, the animal is a pain model, that is, the animal has been artificially manipulated such that it meets the criteria for a state of pain as described above. In one embodiment the animal pain model is produced by transection of the sciatic nerve (axotomy). In an alternate embodiment, the animal pain model is the spared nerve injury model (SNI; Decosterd and Woolf, 2000 Pain 87: 149) in which one of the terminal branches of the sciatic nerve is spared from axotomy. In a further alternate embodiment, the animal pain model is an inflammation model (Stein et al., (1988) Pharmacol Biochem Behav 31: 445-451; Woolf et al., (1994) Neurosci. 62, 327-331) in which an irritant such as CFA is injected into an animal to induce inflammation.

[0405] Animal Pain Models

[0406] Axotomy of the sciatic nerve was performed on adult (200-250 g) male Sprague-Dawley rats. Under halothane (2%) anesthesia, the skin on the lateral surface of the thigh was incised and an incision made directly through the biceps femoris muscle exposing the sciatic nerve. The axotomy procedure involves transecting the sciatic nerve following ligation. The sciatic nerve was tight-ligated with 5.0 silk and sectioned distal to the ligation, removing 2-4 mm of the distal nerve stump. Great care was taken to avoid any contact with or transection of any collateral branches of the sciatic nerve proximal to the transection site, or any cutaneous nerve branches. Muscle and skin were closed in two layers, and animals were allowed to recover for 3-5 days prior to testing for signs of pain including mechanical allodynia, mechanical hyperalgesia, cold allodynia, and heat hyperalgesia using the criteria described above. Sham control animals (naïve) involved exposure of the sciatic nerve and its branched without any lesion.

[0407] The SNI nerve injury model was performed on adult (200-250 g) male Sprague-Dawley rats. Under halothane (2%) anesthesia, the skin on the lateral surface of the thigh was incised and a section made directly through the biceps femoris muscle exposing the sciatic nerve and its three terminal branches: the sural, common peroneal and tibial nerves.

[0408] The SNI procedure comprises an axotomy and ligation of the tibial and common peronial nerves leaving the sural nerve intact. The common peroneal and the tibial nerves were tight-ligated with 5.0 silk and sectioned distal to the ligation, removing 2-4 mm of the distal nerve stump. Great care was taken to avoid any contact with or stretchnig of the intact sural nerve. Muscle and skin were closed in two layers and animals were allowed to recover for at least one week prior to testing for signs of pain including mechanical allodynia, mechanical hyperalgesia, cold allodynia, and heat hyperalgesia using the criteria described above. Sham control animals (naïve) involved exposure of the sciatic nerve and its branched without any lesion.

[0409] The inflammation animal pain model was performed on adult male Sprague-Dawley rats (10-11 weeks old, 300-350 g). Inflammation was induced by an intra-plantar injection of complete Freund's adjuvant (CFA, Sigma, 1 μl-1 ml) into the left hind paw of rats under halothane (2.5%) anesthesia, producing an area of erythema, edema and tenderness restricted to the hindpaw (Stein et al., (1988) Pharmacol Biochem Behav 31: 445-451; Woolf et al., (1994) Neurosci. 62, 327-331). Animals were subsequently tested for signs of pain including mechanical allodynia, mechanical hyperalgesia, cold allodynia, and heat hyperalgesia using the criteria described above.

[0410] Total RNA Isolation

[0411] Following the surgical procedures described above and testing to insure that the axotomy and SNI model animals met the pain criteria described, control and pain model animals were rapidly killed by decapitation. Axotomy model animals were killed 3 days following axotomy, and SNI model animals were killed 10-15 days following surgery.

[0412] The dorsal root ganglia (DRG) from spinal levels L4-L5 were removed from the SNI, axotomy, and control animals and snap-frozen in a dry ice/ethanol slurry. DRGs from the two spinal levels were pooled for each animal and total RNA was extracted using Trizol (Invitrogen) according to the manufacturers instructions. Briefly, tissue samples were homogenized in a ground glass homogenizer in 1 ml of Trizol reagent per 50-100 mg of tissue. The samples were incubated for 5 min. at 15-30° C. to permit the complete dissociation of nucleoprotein complexes. Subsequently, 0.2 ml of chloroform was added per 1 ml of Trizol reagent. Samples were agitated and incubated at 15-30° C. for 2 to 3 minutes. Samples were then centrifuged at no more than 12,000×g for 15 minutes at 2-8° C. The aqueous phase was then transferred to a fresh tube and the RNA was precipitated by mixing with 0.5 ml of isopropyl alcohol per 1 ml Trizol reagent used for the initial homogenization. Samples were incubated at 15-30° C. for 10 minutes and centrifuged at 12,000×g for 10 minutes. The supernatant is then removed, and the RNA pellet was washed with 75% ethanol. The RNA pellet is then air dries and resuspended in either RNase-free water or 0.5% SDS solution. The integrity of the RNA samples was verified on a 1% agarose gel, and the RNA was quantified by measuring absorbance at 260/280 mm. cRNA was then prepared from 10 μg of total RNA using techniques that are well known in the art. Briefly, total RNA (7 to 10 μg) was isolated and reverse transcribed using a primer consisting of oligo-dT coupled to a T7 RNA polymerase binding site. The cDNA was made double stranded and biotinylated cRNA was synthesized using T7 polymerase. Unincorporated nucleotides were removed, and the cRNA was quantitated using methods known to those of skill in the art; a yield of cRNA between 25 and 80 μg was typical.

[0413] Array Hybridization

[0414] The cRNA samples from axotomy, SNI and naïve animals were randomly sheared to an approximate length of 50 nucleotides and subsequently hybridized to an Affymetrix rat genome U34 gene chip set. Briefly, labeled nucleic acid is denatured by heating for 2 minutes at 100° C., and incubated at 37° C. of 20-30 minutes before being placed on a nucleic acid array under a 22 mm×22 mm glass cover slip. Hybridization is carried out at 65° C. for 14 to 18 hours in a custom slide chamber with humidity maintained by a small reservoir of 3×SSC. The array is washed by submersion and agitation for 2-5 min in 2×SSC with 0.1% SDS, followed by 1×SSC, and 0.1×SSC. Finally, the array is dried by centrifugation for 2 minutes in a slide rack in a Beckman GS-6 tabletop centrifuge in Microplus carriers at 650 RPM for 2 min.

[0415] External standards were included in each hybridization to control for hybridization efficiency, to test for sensitivity and assist in the comparisons between data sets from different experiments. These external standards are cRNA transcribed from the bacterial genes bio b, bio c, bio d, cre, thr, and phe. The first hybridization was against a Test Chip, which contains probes against human, mouse and yeast mRNAs as well as probes against the exogenously added control RNA. The Test Chips are designed to determine the quality of the cRNA mixture. Stringent washing in the fluidics station reduces non-specific hybridization and the hybridized biotinylated cRNA was detected by incubation with phycoerythrin-streptavidin and was quantitated by scanning using the Hewlett-Packard GeneArray laser scanner. Following positive analysis of the Test Chip, the same hybridization mixture was then added to the Rat Genome U34 gene chip set which monitors the expression of >24,000 genes and EST clusters. The sequences include all rat sequence clusters from Build #34 of the UniGene Datablse (created from GenBank 107/dbEST Nov. 18, 1998) and supplemented with additional annoteted gene sequences from GenBank 110. The chips were hybridized, reacted with phycoerythrin-streptavidin, washed and then incubated with a polyclonal anti-streptavidin antibody coupled to phycoerythrin as an amplification step to aid in the detection of lower abundance transcripts. Following further washing, the expression chip was scanned as above. Analysis of the scanned data was performed using GeneChip software.

[0416] Gene Selection

[0417] Known or EST gene sequences were first selected as being potentially differentially expressed based on the fold change in hybridization between the naïve animals and either the axotomy or SNI pain models. This was measured as the ratio of the expression level, measured as the intensity of the hybridization signal of the cRNA probe on the microarray for a specific gene, of either SNI or axotomy to naïve. Based on previous studies which demonstrate that the expression of the heat shock protein Hsp27 in increased 1.5 fold after axotomy, a 1.4 fold change in expression in either the axotomy or SNI models relative to naïve was chosen as a numerical cutoff for differential expression. Genes identified as being differentially expressed based on the measurement of an at least 1.4 fold change in expression are shown in tables 1, 2, 3, 4, or 5. Table 1 shows a group of genes which have been previously suggested to exhibit regulated expression in pain models, but which have been evaluated for purposes of the present invention as being differentially expressed by at least 1.4 fold in both a rat axotomy pain model and a SNI pain model relative to the expression level in an animal not subjected to pain. Thus, from the genes and polynucleotides shown in Table 1, only those showing a axotomy/naïve or SNI/naïve ratio of +/−1.4 or greater were identified as being differentially expressed. Tables 2-3 show a number of genes which were identified by the methods of the present invention as being differentially expressed by at least 1.4 fold in an animal subjected to a nerve injury or inflammatory pain model. In addition, the polynucleotides indicated in Table 2, have been further confirmed as beind differentially expressed based on triplicate expression analysis (i.e., samples from three different animals hybridized to three different microarrays, wherein samples are obtained from several different animal pain models, and wherein the polynucleotide sequences are differentially expressed by at least 1.2 fold, with a significance of p<0.05 in at least one pain model). Table 4 shows a group of genes which exhibit an at least 1.4 fold increase in expression in the inflammation pain model. Table 5 shows a group of genes which exhibit an at least 1.4 fold decrease in expression in the inflammation pain model. The data in Tables 1, 3, 4, and 5 represent the average hybridization measurements obtained from at least two rat gene chips.

[0418] Genes identified as being differentially expressed based on an at least 1.4 fold change in expression were then screened by Northern analysis to verify differential expression.

[0419] Northern Analysis

[0420] For each gene suggested to be differentially expressed based on the microarray data, RT-PCR was performed on DRG total RNA obtained from the axotomy, SNI and naïve animal groups as described above. RT-PCR was performed according to techniques known in the art. The cDNA fragments generated in this manner were subsequently cloned into a PCRII vector using the TA cloning kit (Invitrogen). The identity of each fragment was verified by sequencing in each direction from the T3 and T7 polymerase sites present in the cloning vector. The cDNA molecules produced in this manner were then used to produce ³²P-labeled cDNA probes using the Prime-It kit from Stratagene. Subsequently, 5 to 10 μg of total RNA isolated from axotomy, SNI and naïve DRGs were separated on an agarose/formaldehyde gel in 1×MOPS buffer. Following staining with ethidium bromide and visualization under ultra violet light to determine the integrity of the RNA, the RNA is hydrolyzed by treatment with 0.05M NaOH/1.5M NaCl followed by incubation with 0.5M Tris-Cl (pH 7.4)/1.5M NaCl. The RNA is transferred to a commercially available nylon or nitrocellulose membrane (e.g. Hybond-N membrane, Amersham, Arlington Heights, Ill.) by methods well known in the art (Ausubel et al., supra, Sambrook et al., supra). Following transfer and UV cross linking, the membrane is hybridized with a ³²P-labeled cDNA probe, having a sequence complementary to the mRNA sequences identified as being differentially expressed by microarray analysis, in hybridization solution (e.g. in 50% formamide/2.5% Denhardt's/100-200 mg denatured salmon sperm DNA/0.1% SDS/5×SSPE) overnight at 65° C. The hybridization conditions can be varied as necessary as described in Ausubel et al., supra and Sambrook et al., supra. Following hybridization, the membrane is washed at room temperature in 2×SSC/0.1% SDS, at 42° C. in 1×SSC/0.1% SDS, at 65° C. in 0.2×SSC/0.1% SDS, and exposed to film overnight with an intensifying screen at −80° C. The stringency of the wash buffers can also be varied depending on the amount of background signal (Ausubel et al., supra). The film was subsequently developed and the intensity bands corresponding to the radiolabeled probe hybridized to RNA were quantified using methods known to those of skill in the art, for example, by digitizing the film and analyzing the band intensity with a computer software program such as NIH Image (NIH, Bethesda, Md.).

[0421] FIG. 1 shows an example of Northern data which confirms the differential expression, or lack thereof, of 22 genes which were initially screened by microarray analysis of cRNA samples obtained from animals subjected to the axotomy pain model. Table 8 shows the correlation of the data obtained from the microarray analysis for these 22 genes and the data obtained by Northern analysis.

### Example 2

### Verification by In Situ Hybridization

[0422] In addition to verification of differential expression using Northern analysis, the present invention provides that the differential expression of genes in an animal subjected to pain may be confirmed using in situ hybridization.

[0423] In situ hybridization is carried out on fresh frozen, 5 μm thick sections of the dorsal root ganglia from spinal levels L4-L5 obtained from animals subjected to pain, using isotopically-labeled probes. Forty-eight base pair oligonucleotide probes are designed to have 50% G-C content and be complementary to and selective for the desired mRNA. Probes are 3′-end labeled with ³⁵S or ³³P-dATP using a terminal transferase reaction and purified through a spin column. Hybridization is carried out such that homologies greater than 90% are required for detection of transcripts (Dagerlind et al., '92 Histochemistry 98:39). Generally, slides are brought to room-temperature and covered with a hybridization solution (50% formamide, 1× Dendhardt's solution, 1% sarcosyl, 10% dextran sulphate, 0.02M phosphate buffer, 4×SSC, 200 nM DTT, 500 mg/ml salmon sperm DNA) containing 107 cmp/ml of labeled probe. Slides are incubated in a humidified chamber at 43° C. for 14-18 hours, then washed 4×15 min in 1×SSC at 55° C. In the final rinse, slides are brought to room temperature, washed in dH2O, dehydrated in ethanol and air dried.

[0424] Autoradiograms are generated by dipping slides in NTB2 nuclear track emulsion and storing the dark at 4° C. Prior to conventional developing and fixation, sections are allowed to expose for 1-12 weeks, depending on the abundance of transcript. Unstained tissue is viewed under darkfield conditions using a fiber-optic darkfield stage adapter (MVI), while stained tissue is examined under brightfield conditions. Control experiments are conducted to confirm the specificity of the oligonucleotide probes. Sections are hybridized with labeled probe, labeled probe with a 1,000-fold excess of cold probe, or labeled probe with a 1,000-fold excess of another, dissimilar cold probe of the same length and similar G-C content.

[0425] The use of serial, thin sections permits the identification of the same cells in adjacent sections, allowing for comparisons to be made with other markers by in situ hybridization or immunohistochemistry. The technique unlike non-isotopic in situ using digoxygenin labeled riboprobes is suited to screening more than detailed anlysis of co-expression of multiple markers. FIGS. 2 and 3 show the results of in situ hybridization verification of the differential expression of five genes (GTPcyclo, IES-JE, CCHL2A, VGF, SNAP, c-jun, and TrkA) in the dorsal root ganglia of a rat axotomy pain model and a rat spared nerve injury pain model.

### Example 3

### Verification of Differential Expression by Real-Time PCR

[0426] In addition to verification of differential expression by Northern analysis or in situ hybridization, the differential expression of genes in an animal subjected to pain may be verified using real-time PCR and TaqMan® probes. The technique of real-time PCR is well known in the art (see, for example, U.S. Pat. Nos. 5,691,146; 5,779,977; 5,866,336; and 5,914,230).

[0427] cDNA samples obtained from a rat axotomy pain model were amplified using primers specific for 19 genes which had previously been examined by microarray analysis and SYBR Green I as the double stranded DNA binding dye. PCR products were generated using an ABI 7700 sequence detection system (Applied Biosystems, Foster City, Calif.). A comparison of the expression level measured by microarray analysis and that obtained by real-time PCR is shown in Table 9. A close correlation can be seen between the differential expression, or lack thereof, of genes examined by microarray analysis and using the Taqman® technique.

### Example 4

### Triplicate Analysis

[0428] As described above, a polynucleotide sequence is identified as being differentially regulated in an animal subjected to pain relative to an animal not subjected to the same pain if the sequence is differentially expressed by at least 1.4 fold, and additionally, if the differential expression attains a statistical significance over at least three replicate screens, in at least on pain model, with a p-value of less than 0.05. This example describes how to perform such a statistical analysis, using the axotomy and SNI pain models.

[0429] Surgical Procedures.

[0430] Adult male Sprague Dawley rats (200-300 g) are anesthetized with halothane. For the sciatic nerve transection (axotomy), the left sciatic nerve is exposed at the mid thigh level, ligated with 3/0 silk and sectioned distally. The wound is sutured in two layers, and the animals were allowed to recover.

[0431] Tissue and RNA Preparation.

[0432] Animals are terminally anesthetized with CO₂, the L4 and L5 DRGs rapidly removed, and stored at −80° C. Total RNA is extracted from homogenized DRG samples using acid phenol extraction (TRIzol reagent, Gibco-BRL). RNA concentration is evaluated by A₂₆₀ measurement and quality assessed by electrophoresis on a 1.5% agarose gel. Each RNA sample used for hybridization of each array can be extracted, for example, from rat L4 and L5 DRGs (10 ganglia pooled from 5 animals, per sample).

[0433] Microarray Analysis

[0434] Affymetrix rat genome U34A oligonucleotide microarrays, representing 8799 known transcripts and expressed sequence tags (ESTs), can be used (Affymetrix, Santa Clara, Calif.). Oligonucleotides are arranged in pairs corresponding to different regions of the target mRNA with multiple probe pairs. Each probe pair consists of a 25 nucleotide perfect match (PM) to the target region coupled with a 25-mer with a single mismatch (MM) at the 13^{th} nucleotide. Transcript abundance is estimated by analysis of signal intensity of the PM/MM pairs. The arrays are hybridized with biotin-labeled cRNA, prepared as per standard Affymetrix protocol. Briefly, total RNA (8 μg) from DRGs was reverse transcribed using an oligo-dT primer coupled to a T7 RNA polymerase binding site. Double-stranded cDNA can be made and biotinylated-cRNA synthesized using T7 polymerase. The cRNA is then hybridized for about 16 hours to an array, followed by binding with a streptavidin-conjugated fluorescent marker, and then incubated with a polyclonal anti-streptavidin antibody coupled to phycoerythrin as an amplification step. Following washing, the chips are scanned with a Hewlett-Packard GeneArray laser scanner and data analyzed using GeneChip software. External standards can be included to control for hybridization efficiency and sensitivity.

[0435] Hybridization levels for each species of mRNA detected on the arrays are expressed by intensity (signal) and as present (P), marginal (M) or absent (A) calls, calculated by Affymetrix software (MAS 5.0, α1=0.04 α2=0.06). For calculation of signal values, each array is scaled to a target signal of 2500 across all probe sets, to allow comparison between arrays.

[0436] The arrays are grouped for two comparisons: two triplicate sets of naïve data compared with one another, and one triplicate naïve set compared with one triplicate post-axotomy set. The individual naïve arrays included in each triplicate set are picked randomly. A probe set is determined undetected if it received an A call in all of the six arrays involved in the comparison. Detected are Present or Marginal by MAS5.0 in at least one array for each analysis. Mean signal and standard deviation are calculated for each detected probe set. The p-value for rejecting the null hypothesis that the mean signals were equal between the two triplicate sets is calculated using an unpaired, two-tailed t-test for independent samples with unequal variance (Satterthwaite's method). Fold-differences between the mean signals (A and B) in the two triplicate sets is calculated as max(A, B)/min(A, B) with down regulation relative to naïve expressed as negative.

[0437] As noted above, a polynucleotide sequence is considered to be differentially expressed according to the present invention if it is differentially expressed by at least 1.4 fold in an animal subjected to pain relative to an animal not subjected to the same pain, and optionally, is also statistically significantly differentially expressed with a p-value of less than 0.05 across at least three replicate expression screens.

### Example 5

### Pain-Specific Microarray Construction

[0438] A microarray according to the invention was constructed as follows.

[0439] cDNA samples obtained from the dorsal root ganglia of either naïve animals or animals which have been subjected to pain are amplified using primers specific for the genes which have been identified as being differentially expressed using the methods described above. PCR products (˜40 ul) in the same 96-well tubes used for amplification, are precipitated with 4 ul (1/10 volume) of 3M sodium acetate (pH 5.2) and 100 ul (2.5 volumes) of ethanol and stored overnight at −20° C. They are then centrifuged at 3,300 rpm at 4° C. for 1 hour. The obtained pellets were washed with 50 ul ice-cold 70% ethanol and centrifuged again for 30 minutes. The pellets are then air-dried and resuspended well in 20 ul 3×SSC overnight. The samples are then deposited either singly or in duplicate onto polylysine-coated slides (Sigma Cat. No. P0425) using a robotic GMS 417 arrayer (Genetic MicroSystems, MA). The boundaries of the DNA spots on the microarray are marked with a diamond scriber. The invention provides for arrays wherein 10-20,000 PCR products are spotted onto a solid support to prepare an array.

[0440] The arrays are rehydrated by suspending the slides over a dish of warm particle free ddH₂O for approximately one minute (the spots will swell slightly but not run into each other) and snap-dried on a 70-80° C. inverted heating block for 3 seconds. DNA is then UV crosslinked to the slide (Stratagene, Stratalinker, 65 mJ—set display to “650” which is 650×100 uJ). The arrays are placed in a slide rack. An empty slide chamber is prepared and filled with the following solution: 3.0 grams of succinic anhydride (Aldrich) is dissolved in 189 ml of 1-methyl-2-pyrrolidinone (rapid addition of reagent is crucial); immediately after the last flake of succinic anhydride dissolved, 21.0 ml of 0.2 M sodium borate is mixed in and the solution is poured into the slide chamber. The slide rack is plunged rapidly and evenly in the slide chamber and vigorously shaken up and down for a few seconds, making sure the slides never leave the solution, and then mixed on an orbital shaker for 15-20 minutes. The slide rack is then gently plunged in 95° C. ddH₂O for 2 minutes, followed by plunging five times in 95% ethanol. The slides are then air dried by allowing excess ethanol to drip onto paper towels. The arrays are then stored in the slide box at room temperature until use.

### Example 6

### Therapeutic Agent Screening

[0441] A candidate agent that increases or decreases the expression of a polynucleotide sequence that is differentially expressed in the sensory neurons of an animal subjected to pain is screened according to the following method.

[0442] An animal that has been subjected to pain is treated with a candidate agent for varying amounts of time. Typically an animal is treated by systemic administration of a candidate agent, such as by intravenous administration, on a hourly, daily, or weekly dosing schedule. Following administration, the animals are killed, and the dorsal root gangila are removed and used to prepare cRNA samples as described above. The cRNA samples are then hybridized to a pain-specific microarray, constructed according to the method described above. The hybridization of the cRNA samples to the microarray can be used to determine the level of expression of the genes in the animal subjected to pain which correspond to the differentially expressed genes comprising the microarray. Thus any changes in the predicted differential expression of a gene in an animal treated with a candidate agent is indicative of that agent being capable of increasing or decreasing the expression of a gene which is known to be differentially expressed in an animal subjected to pain.

### Example 7

### In Vivo Protein Activity Screening

[0443] Microarrays can be used to screen in vivo for genes that are regulated in pain as a result of the activity of specific protein signaling molecules. To do this, the changes in gene expression produced in the pain models are compared with the changes in gene expression produced in the same models when a particular signaling molecule is neutralized or inhibited by preventing its synthesis, release, transport, binding to a receptor or activation of a cellular response. Any resultant difference in gene expression profile will represent the contribution of the signaling molecule. Further confirmation can be produced by the administration of the signaling molecule in vivo to see if it induces a change in gene regulation.

[0444] Such an analysis has been performed looking at the contribution of the neurotrophin nerve growth factor (NGF) to inflammatory pain. Inflammation is known to produce an increase in NGF at the site of the inflammation and this acts on its high affinity receptor TrkA expressed on sensory neurons to change transcription of NGF-regulated genes in the sensory neuron cell body in the DRG. The pattern of expression of genes after inflammation induced in vivo by intraplantar CFA (at 3, 12 24 hrs and 5 days) was compared with naïve non-inflamed animals to detect inflammation-induced genes. This gene expression profile was then compared with arrays produced from RNA from inflamed animals treated with a neutralizing anti-NGF antibody. One example of a gene that was upregulated by CFA, but whose level did not increase in CFA animals treated with antiNGF was the NF-kappaB inhibitor alpha (I kappa B). I kappa B alpha was also upregulated 12 and 24 hrs after intraplantar NGF injection showing that it is an NGF regulated inflammatory-induced gene.

| Affymetrix accession | | | X63594cds RRRLIF1 R.rattus |
|---|---|---|---|
| #X63594cds_g_at | | | RL/IF-1 mRNA |
| | CFA | NGF | CFA + anti-NGF |
| | Fold | Fold | Fold |
| Ni | | | |
| 3 h | −1 | | |
| 6 h | 8.5 | | |
| 12 h | 2.1 | 3.5 | −1.8 |
| 24 h | 3.4 | 1.5 | 1.4 |
| 2 d | 1.1 | | |
| 5 d | 1.6 | | |

Affymetrix accession numbers #HX63594cds_g_at and X63594cds RRRLIF1 refer to sequences depicted in Table 2.

### Other Embodiments

[0445] Other embodiments will be evident to those of skill in the art. It should be understood that the foregoing detailed description is provided for clarity only and is merely exemplary. The spirit and scope of the present invention are not limited to the above examples, but are encompassed by the following claims.

LENGTHY TABLE
The patent application contains a lengthy table section. A copy of the table is available in electronic form from the USPTO web site (http://seqdata.uspto.gov/?pageRequest=docDetail&DocID=US20070015145A1) An electronic copy of the table will also be available from the USPTO upon request and payment of the fee set forth in 37 CFR 1.19(b)(3).

1. A composition comprising two or more isolated polynucleotides, wherein each of said two or more isolated polynucleoitdes is selected from the polynucleotides of Tables 1 or 2 or a sequence which hybridizes under high stringency conditions thereto, and wherein at least one of said two or more isolated polynucleotides is unique to Table 2, or a sequence which hybridizes under high stringency conditions thereto.

2. A composition comprising two or more isolated polynucleotides, wherein each of said two or more isolated polynucleotides is selected from the polynucleotides of Tables 1 or 2, or a sequence which hybridizes under high stringency conditions thereto, and wherein at least one of said two or more isolated polynucleotides is unique to Table 2, or a sequence which hybridizes under high stringency conditions thereto.

3. The composition of claim 1, or 2, wherein said each of said two or more isolated polynucleotides is differentially expressed in an animal subjected to pain relative to an animal not subjected to said pain by at least 1.2 fold across at least three replicate screens of neuronal tissue of an animal subjected to pain with a P-value of less than 0.05.

4. The composition of claim 1 or 2, wherein said each of said two or more isolated polynucleotides is differentially expressed by at least 1.4 fold in the neuronal tissue of an animal subjected to pain relative to said animal not subjected to said pain.

5. The composition of claim 1 or 2, wherein said each of said two or more isolated polynucleotides is differentially expressed by at least 2 fold in the neuronal tissue of an animal subjected to pain relative to said animal not subjected to said pain.

6. The composition of claim 1 or 2, wherein said neuronal tissue is selected from the group consisting of sensory neurons of the dorsal root ganglion, and dorsal horn neurons.

7. A plurality of vectors each comprising an isolated polynucleotide, wherein each of said isolated polynucleotides is selected from Table 1 or 2, or a sequence which hybridizes under high stringency conditions thereto, and wherein at least one of said isolated polynucleotides is unique to Table 2, or a sequence which hybridizes under high stringency conditions thereto.

8. A plurality of viral vectors each comprising an isolated polynucleotide, wherein each of said isolated polynucleotides is selected from Table 1 or 2, or a sequence which hybridizes under high stringency conditions thereto, and wherein at least one of said isolated polynucleotides is unique to Table 2, or a sequence which hybridizes under high stringency conditions thereto.

9. A host cell comprising the vectors of claim 7, or 8.

10. A method for identifying a nucleotide sequence which is differentially regulated in an animal subjected to pain, comprising:
(a) hybridizing a nucleic acid sample corresponding to RNA obtained from said animal to at least three replicates of a nucleic acid sample comprising one or more nucleic acid molecules of known identity;
(b) measuring the hybridization of said nucleic acid sample to said one or more nucleic acid molecules of known identity for each of said replicates, wherein a 1.2 fold difference in the hybridization, and a P-value of less than 0.05 across said at least three replicates, of said nucleic acid sample to said one or more nucleic acid molecules of known identity relative to a nucleic acid sample obtained from an animal which has not been subjected to said pain is indicative of the differential expression of said nucleotide sequence in said animal subjected to pain.

11. A method for identifying a nucleotide sequence which is differentially regulated in an animal subjected to pain, comprising:
(a) hybridizing a nucleic acid sample corresponding to RNA obtained from said animal to a nucleic acid sample comprising one or more nucleic acid molecules of known identity;
(b) measuring the hybridization of said nucleic acid sample to said one or more nucleic acid molecules of known identity, wherein a 1.4 fold difference in the hybridization of said nucleic acid sample to said one or more nucleic acid molecules of known identity relative to a nucleic acid sample obtained from an animal which has not been subjected to said pain is indicative of the differential expression of said nucleotide sequence in said animal subjected to pain.

12. A method for identifying a nucleotide sequence which is differentially regulated in an animal subjected to pain, comprising:
(a) hybridizing a nucleic acid sample corresponding to RNA obtained from said animal to at least three replicates of an array comprising a solid substrate and one or more nucleic acid molecules of known identity;
(b) wherein each nucleic acid member has a unique position and is stably associated with the solid substrate; and
(c) measuring the hybridization of said nucleic acid sample to said at least three replicates of said array, wherein a 1.2 fold difference in the hybridization, and a P-value of less than 0.05 across said at least three replicates, of said nucleic acid sample to said one or more nucleic acid molecules of known identity comprising said array relative to a nucleic acid sample obtained from an animal which has not been subjected to said pain is indicative of the differential expression of said nucleotide sequence in said animal subjected to pain.

13. A method for identifying a nucleotide sequence which is differentially regulated in an animal subjected to pain, comprising:
(a) hybridizing a nucleic acid sample corresponding to RNA obtained from an animal which has been subjected to pain to an array comprising a solid substrate and a plurality of nucleic acid members;
(b) wherein each nucleic acid member has a unique position and is stably associated with the solid substrate;
(c) measuring the hybridization of said nucleic acid sample to said array, wherein a 1.4 fold difference in the hybridization of said nucleic acid sample to one or more nucleic acid members comprising said array relative to a nucleic acid sample obtained from an animal which has not been subjected to said pain is indicative of the differential expression of said nucleotide sequence in said animal subjected to pain.

14. The method of claim 12, further comprising the step of verifying the differential expression of said nucleotide sequence by a molecular procedure selected from the group consisting of Northern analysis, in situ hybridization, and PCR.

15. A method for identifying a nucleotide sequence which is differentially regulated in an animal subjected to pain, comprising:
(a) hybridizing a nucleic acid sample corresponding to RNA obtained from an animal which has been subjected to pain to an array comprising a solid substrate and a plurality of nucleic acid members;
(b) wherein each nucleic acid member has a unique position and is stably associated with the solid substrate;
(c) measuring the hybridization of said nucleic acid sample to said array, wherein a 1.4 fold difference in the hybridization of said nucleic acid sample to one or more nucleic acid members comprising said array relative to a nucleic acid sample obtained from an animal which has not been subjected to said pain is indicative of the differential expression of said nucleotide sequence in said animal subjected to pain; and
(d) verifying the differential expression of said nucleotide sequence by a molecular procedure selected from the group consisting of Northern analysis, in situ hybridization, and PCR.

16. The method of claim 12, wherein a 1.4 fold change in the hybridization of said nucleic acid sample to one or more nucleic acid members comprising said array relative to a nucleic acid sample obtained from an animal which has not been subjected to said pain is indicative of the differential expression of said nucleotide sequence following pain.

17. The method of claim 11, 13, and 15, wherein a 2 fold change in the hybridization of said nucleic acid sample to one or more nucleic acid members comprising said array relative to a nucleic acid sample obtained from an animal which has not been subjected to said pain is indicative of the differential expression of said nucleotide sequence following pain.

18. The method of claim 10, 11, 12, 13, or 15 further comprising the step of labeling said nucleic acid sample with a detectable label prior to said hybridization to said array.

19. The method of claim 10, 11, 12, 13, or 15, further comprising the step of isolating said nucleic acid sample from said animal.

20. The method of claim 10, 11, 12, 13, or 15 wherein said nucleic acid sample is cRNA.

21. An array comprising:
(a) a plurality of polynucleotide members, wherein each of said polynucleotide members is selected from Table 1 or 2, and wherein at least one of said isolated polynucleotides is unique to Table 2; and
(b) a solid substrate, wherein each polynucleotide member has a unique position on said array and is stably associated with said solid substrate.

22. An array comprising:
(a) a plurality of polynucleotide members, wherein each of said polynucleotide members is selected from Table 1 or 2, and wherein at least one of said isolated polynucleotides is unique to Table 2, and wherein said plurality of polynucleotide members are obtained from neuronal tissue obtained from at least two different species of animal; and
(b) a solid substrate, wherein each polynucleotide member obtained from each of said two different species has a unique position on said array and is stably associated with said solid substrate.

23. The array of claim 21 or 22, wherein said plurality of polynucleotide members is differentially expressed by at least 1.2 fold across at least three replicate screens of neuronal tissue of an animal subjected to pain with a P-value of less than 0.05 relative to an animal not subjected to said pain.

24. The array of claim 21 or 22, wherein said plurality of polynucleotide members is differentially expressed by at least 1.4 fold in the neurons of said animal subjected to pain relative to an animal not subjected to said pain.

25. The array of claim 21 or 22, wherein said array comprises from 10 to 20,000 polynucleotide members.

26. The array of claim 21 or 22, further comprising negative and positive control sequences and quality control sequences selected from the group consisting of cDNA sequences encoded by housekeeping genes, plant gene sequences, bacterial sequences, PCR products and vector sequences.

27. A method of identifying an agent that increases or decreases the expression of a polynucleotide sequence that is differentially expressed in neuronal tissue of a first animal which is subjected to pain comprising:
(a) administering said agent to said first animal;
(b) hybridizing nucleic acid isolated from one or more sensory neurons of said first and a second animal to the array of claim 21 or 22; and
(c) measuring the hybridization of said nucleic acid isolated from said neuronal tissue of said first and second animal to said array; wherein an increase in hybridization of said nucleic acid from said first animal to one or more nucleic acid members of said array relative to hybridization of said nucleic acid from a second animal which is subjected to pain but to which is not administered said agent to one or more nucleic acid members of said array identifies said agent as increasing the expression of said polynucleotide sequence, and wherein a decrease in hybridization of said nucleic acid from said first animal to one or more nucleic acid members of said array relative to the hybridization of said nucleic acid from second animal to one or more nucleic acid members of said array identifies said agent as decreasing the expression of said polynucleotide sequence.

28. The method of claim 27, further comprising the step of verifying the increase or decrease in said hybridization by a molecular procedure selected from the group consisting of Northern analysis, in situ hybridization, and PCR.

29. The method of claim 27, further comprising the step of labeling the nucleic acid sample isolated from said first and second animal with a detectable label prior to said hybridization to said array.

30. The method of claim 29, wherein the nucleic acid sample isolated from said first animal is labeled with a different detectable label than the nucleic acid sample isolated from said second animal.

31. A method for identifying a compound which regulates the expression of a polynucleotide sequence which is differentially expressed in an animal subjected to pain, comprising:
(a) providing a cell comprising and capable of expressing one or more of the polynucleotide sequences shown in Tables 1 or 2;
(b) contacting said cell with a candidate compound; and
(c) measuring the expression of said one or more of the polynucleotide sequences shown in Tables 1 or 2, wherein an increase or decrease in the expression of said one or more of the polynucleotide sequences shown in Table 1 or 2 of at least 10% is indicative of regulation of said differentially expressed polynucleotide sequence.

32. A method for identifying a compound which regulates the activity of one or more of the polypeptides shown in Table 1 or 2, comprising:
(a) providing a cell comprising said one or more polypeptides;
(b) contacting said cell with a candidate compound; and
(c) measuring the activity of said one or more polypeptides, wherein an increase or decrease of the activity of said one or more polypeptides of at least 10% relative to the activity of said one or more polypeptides in said cell, wherein the cell is not contacted with the candidate compound, identifies said candidate compound as a compound which regulates the activity of said one or more polypeptides.

33. The method of claim 32, wherein said candidate compound is selected from the group consisting of small molecule, protein, RNAi, and antisense.

34. The method of claim 32, wherein said candidate compound is an antibody which binds to said polypeptide.

35. A method for producing a pharmaceutical formulation comprising:
(a) providing a cell comprising said one or more polypeptides;
(b) selecting a compound which regulates the activity of said one or more polypeptides; and
(c) mixing said compound with a carrier.

36. The method of claim 35, wherein said step of selecting comprises the steps of
(a) contacting said cell with a candidate compound; and
(b) measuring the activity of said one or more polypeptides, wherein an increase or decrease of the activity of said one or more polypeptides of at least 10% relative to the activity of said one or more polypeptides in said cell, wherein the cell is not contacted with the candidate compound, identifies said candidate compound as a compound which regulates the activity of said one or more polypeptides

37. A method for identifying a compound which regulates the activity, in an animal, of one or more of the polypeptides shown in Table 1 or 2, comprising:
(a) administering a candidate compound to an animal comprising said one or more polypeptides; and
(b) measuring the activity of said one or more polypeptides wherein an increase or decrease of the activity of said polypeptide of at least 10% relative to the activity of said one or more polypeptides in an animal to which the candidate compound is not administered, identifies said candidate compound as a compound which regulates the activity of said one or more polypeptides.

38. The method of claim 37, wherein said candidate compound is selected from the group consisting of small molecule, protein, RNAi, and antisense.

39. The method of claim 37, wherein said candidate compound is an antibody which binds to said polypeptide.

40. A method for identifying a small molecule which regulates the activity of one or more of the polypeptides indicated in Table 1 or 2, comprising:
(a) providing a cell comprising said one or more polypeptides;
(b) generating a small molecule library;
(c) providing a candidate small molecule, selected from said library;
(d) contacting said cell with said candidate small molecule; and
(e) measuring the activity of said one or more polypeptides, wherein an increase or decrease of the activity of said one or more polypeptides of at least 10% relative to the activity of said one or more polypeptides in said cell, wherein the cell is not contacted with the candidate small molecule, identifies said candidate small molecule as a small molecule which regulates the activity of said one or more polypeptides.

41. The method of claim 40, wherein said small molecule library comprises components selected from the group consisting of heterocyclics, aromatics, alicyclics, aliphatics, steroids, antibiotics, enzyme inhibitors, ligands, hormones, alkaloids, opioids, terpenes, porphyrins, toxins, and catalysts, and combinations thereof.

42. A method for identifying a compound useful in the treatment of pain, comprising:
(a) providing a host cell comprising a vector comprising one or more of the polynucleotides identified in Table 1 or 2;
(b) maintaining said host cell under conditions which permit the expression of said one or more polynucleotides;
(c) selecting a compound which regulates the activity of a polypeptide encoded by said one or more polynucleotides;
(d) administering said compound to an animal subjected to pain; and
(e) measuring the level of pain in said animal, wherein a decrease in the level of pain in said animal of at least 10%, identifies said compound as being useful for treating pain.

43. The method of claim 42, wherein said step of selecting includes the steps of
(a) contacting said cell with a candidate compound; and
(b) measuring the activity of the polypeptide encoded by said one or more polynucleotides, wherein an increase or decrease of the activity of said polypeptide of at least 10% relative to the activity of said polypeptide in said cell, wherein the cell is not contacted with the candidate compound, identifies said candidate compound as a compound which regulates the activity of said polypeptide.

44. A method of treating pain in an animal comprising administering to said animal an antisense polynucleotide capable of inhibiting the expression of one or more of the polynucleotide sequences indicated in Table 1 or 2.

45. A method of treating pain in an animal comprising administering to said animal a double stranded RNA molecule wherein one of the strands of said double stranded RNA molecule is identical to a portion of an mRNA transcript obtained from one or more of the polynucleotide sequences indicated in Table 1 or 2.

46. A method of treating pain in an animal in need thereof, comprising:
administering to said animal a therapeutically effective amount of an agent which modulates the activity of one or more of the polypeptides indicated in Table 1 or 2.

47. A method of treating pain in an animal in need thereof, comprising:
administering a therapeutically effective amount of an antibody which binds to one or more of the polypeptides indicated in Table 1 or 2.

48. A method of treating pain in an animal in need thereof, comprising:
administering a therapeutically effective amount of one or more of the polypeptides indicated in Table 1 or 2.

49. A pharmaceutical formulation comprising one or more polypeptides indicated in Table 1 or 2, and a carrier.

50. A pharmaceutical formulation comprising one or more antibodies which bind to one or more of the polypeptides indicated in Table 1 or 2, and a carrier.

The application's sequence listing, which the Patent Office published only in electronic form, follows.

SEQUENCE LISTING (14715 sequences)

SEQ ID NO: 1 - DNA, 1214 bp, Rattus norvegicus
  ref <308>: DATABASE ACCESSION NUMBER: EMBL / A09811
  ref <309>: DATABASE ENTRY DATE: 1993-09-02
gaattccgggccccgcgctgccgctgctcctgccgtcgctgctcttgctgctgctgttgggcgcgggcggttgcggtcctggggtgcgcgccgaggtgctgttccgctgcccaccctgcacgcccgagcgtctggccgcctgcggacccccacccgacgcgccctgcgccgagctggtgcgagagcccggctgcggttgctgctccgtgtgcgcacgacaggagggcgaagcttgcggcgtctacatcccgcgctgcgcccagacgttacgctgttaccccaacccgggctccgagctgcccctgaaggcactggtcaccggcgcgggtacctgtgaaaagagacgcgtgggcgccaccccacagcaggttgcagacagtgaggatgaccactcggagggaggcctggtggagaaccatgtggacggaaccatgaacatgttgggaggcagcagtgctggccggaagccccctaagtcaggcatgaaggaactggctgtgttccgggagaaggtcaacgagcagcaccggcagatgggcaaaggtgccaaacacctcagcctggaggagcccaagaagctgcgcccacctcctgccaggaccccttgccagcaggagctggaccaggtcctggagcgcatctccaccatgcgccttccggatgatcggggtcctctggaacatctctactccctgcatatccccaactgtgacaagcatggcctgtacaacctcaaacagtgcaagatgtctctgaatggacagcgtggggagtgctggtgtgtgaaccccaatactgggaagccaatccagggagctcccaccatccggggagaccccgagtgccatctcttctacaacgagcagcaggagaatgatggggctcacgcccaaagggtgcagtaaaccacagccagtcggtgcctggcttccccaccccaaacaccagcagaaatggagggtgtcagggtgatgggtgtggaggatttcccagttttgacacatgtatttatatttggaaagagaccaacactgagctcagaagcccccctgcgccccccagtggcagttaacctgtacctccgttcctgcttctaatagagagggtggtggcactggggatactgggtacaggcttgggaatggggaaagaaatttttatttttgaacccctgtgtctcttttacttaagattaaaggaaggaaacggaattc

SEQ ID NO: 2 - protein, 300 aa, Rattus norvegicus
  misc_feature (1)..(300): Xaa=Unknown amino acid
PGPALPLLLPSLLLLLLLGAGGCGPGVRAEVLFRCPPCTPERLAACGPPPDAPCAELVREPGCGCCSVCARQEGEACGVYIPRCAQTLRCYPNPGSELPLKALVTGAGTCEKRRVGATPQQVADSEDDHSEGGLVENHVDGTMNMLGGSSAGRKPPKSGMKELAVFREKVNEQHRQMGKGAKHLSLEEPKKLRPPPARTPCQQELDQVLERISTMRLPDDRGPLEHLYSLHIPNCDKHGLYNLKQCKMSLNGQRGECWCVNPNTGKPIQGAPTIRGDPECHLFYNEQQENDGAHAQRVQX

SEQ ID NO: 3 - DNA, 1421 bp, Homo sapiens
ggcgagggaggaggaagaagcggaggaggcggctcccgcgctcgcagggccgtgccacctgcccgcccgcccgctcgctcgctcgcccgccgcgccgcgctgccgaccgccagcatgctgccgagagtgggctgccccgcgctgccgctgccgccgccgccgctgctgccgctgctgctgctgctactgggcgcgagtggcggcggcggcggggcgcgcgcggaggtgctgttccgctgcccgccctgcacacccgagcgcctggccgcctgcgggcccccgccggttgcgccgcccgccgcggtggccgcagtggccggaggcgcccgcatgccatgcgcggagctcgtccgggagccgggctgcggctgctgctcggtgtgcgcccggctggagggcgaggcgtgcggcgtctacaccccgcgctgcggccaggggctgcgctgctatccccacccgggctccgagctgcccctgcaggcgctggtcatgggcgagggcacttgtgagaagcgccgggacgccgagtatggcgccagcccggagcaggttgcagacaatggcgatgaccactcagaaggaggcctggtggagaaccacgtggacagcaccatgaacatgttgggcgggggaggcagtgctggccggaagcccctcaagtcgggtatgaaggagctggccgtgttccgggagaaggtcactgagcagcaccggcagatgggcaagggtggcaagcatcaccttggcctggaggagcccaagaagctgcgaccaccccctgccaggactccctgccaacaggaactggaccaggtcctggagcggatctccaccatgcgccttccggatgagcggggccctctggagcacctctactccctgcacatccccaactgtgacaagcatggcctgtacaacctcaaacagtgcaagatgtctctgaacgggcagcgtggggagtgctggtgtgtgaaccccaacaccgggaagctgatccagggagcccccaccatccggggggaccccgagtgtcatctcttctacaatgagcagcaggaggctcgcggggtgcacacccagcggatgcagtagaccgcagccagccggtgcctggcgcccctgccccccgcccctctccaaacaccggcagaaaacggagagtgcttgggtggtgggtgctggaggattttccagttctgacacacgtatttatatttggaaagagaccagcaccgagctcggcacctccccggcctctctcttcccagctgcagatgccacacctgctccttcttgctttccccgggggaggaagggggttgtggtcggggagctggggtacaggtttggggagggggaagagaaatttttatttttgaacccctgtgtcccttttgcataagattaaaggaaggaaaagt

SEQ ID NO: 4 - protein, 325 aa, Homo sapiens
MLPRVGCPALPLPPPPLLPLLLLLLGASGGGGGARAEVLFRCPPCTPERLAACGPPPVAPPAAVAAVAGGARMPCAELVREPGCGCCSVCARLEGEACGVYTPRCGQGLRCYPHPGSELPLQALVMGEGTCEKRRDAEYGASPEQVADNGDDHSEGGLVENHVDSTMNMLGGGGSAGRKPLKSGMKELAVFREKVTEQHRQMGKGGKHHLGLEEPKKLRPPPARTPCQQELDQVLERISTMRLPDERGPLEHLYSLHIPNCDKHGLYNLKQCKMSLNGQRGECWCVNPNTGKLIQGAPTIRGDPECHLFYNEQQEARGVHTQRMQ

SEQ ID NO: 5 - DNA, 158 bp, Rattus norvegicus
  ref <308>: DATABASE ACCESSION NUMBER: EMBL / AA108277
  ref <309>: DATABASE ENTRY DATE: 2000-03-03
accctttgaactagaagctttctattctgaccctcaagcagttccatatccagaagcaaaaatcggccgttttgtcgttcagaatgtttctgcacagaagatggagaaaatctaaagtgaaagtgcgcgtgacacacatgcatttcacatatccgctc

SEQ ID NO: 6 - protein, 859 aa, Rattus norvegicus
  ref <308>: DATABASE ACCESSION NUMBER: Refseq / NP_038587
  ref <309>: DATABASE ENTRY DATE: 2002-01-07
MSVVGLELGSQSCYIAVARAGGIETIANEFSDRCTPSVISFGSKNRTIGVAAKNQQITHANNTVSSFKRFHGRAFNDPFIQKEKENLSYDLVPMKNGGVGIKVMYMDEEHFFSVEQITAMLLTKLKETAENNLKKPVTDCVISVPSFFTDAERRSVLDRAQIVGLNCLRLMNDMTAVALNYGIYKQDLPNAEEKPRVVVFVDMGHSSFQVSACAFNKGKLKVLGTAFDPFLGGKNFDEKLVEHFCAEFKTKYKLDAKSKIRALLRLHQECEKLKKLMSSNSTDLPLNIECFMNDKDVSGKMNRSQFEELCAELLQKIEVPLHSLMAQTQLKAEDVSAIEIVGGATRIPAVKERIAKFFGKDVSTTLNADEAVRRGCALQCAILSPAFKVREFSVTDAVPFPISLVWNHDSEETEGVHEVFSRNHAAPFSKVLTFLRRGPFELEAFYSDPQGVPYPEAKIGRFVVQNVSAQKDGEKSRVKVKVRVNTHGIFTISTASMVEKVPTEEEDGSSLEADMECFQNQRPTESSDVDKNIQQDNSEAGTQPQVQTDGQQTSQSPPSPELTSEESKTPDADKANEKKVDQPPEAKKPKIKVVNVELPVEANLVWQLGRDLLNMYIETEGKMIMQDKLEKERNDAKNAVEECVYEFRDKLCGPYEKFICEQEHEKFLRLLTETEDWLYEEGEDQAKQAYIDKLEELMKMGTPVKVRFQEAEERPKVLEELGQRLQHYAKIAADFRGKDEKYNHNDESEMKKVEKSVNEVMEWMNNVMNAQAKRSLDQDPVVRTHEIRAKVKELNNVCEPVVTQPKPKIESPKLERTPNGPNIDKKEDLEGKNNLGAERPHQNGECHPNEKGSVNMDLD

SEQ ID NO: 7 - DNA, 3612 bp, Homo sapiens
  ref <308>: DATABASE ACCESSION NUMBER: EMBL / AB003334
  ref <309>: DATABASE ENTRY DATE: 1999-03-05
gaggaagtgggacctccccttttgggtcggtagttcagcgccggcgccggtgtgcgagccgcggcagagtgaggcaggcaacccgaggtgcggagcgacctgcggaggctgagccccgctttctcccagggtttcttatcagccagccgccgctgtccccgggggagtaggaggctcctgacaggccgcggctgtctgtgtgtccttctgagtgtcagaggaacggccagaccccgcgggccggagcagaacgcggccagggcagaaagcggcggcaggagaagcaggcagggggccggaggacgcagaccgagacccgaggcggaggcggaccgcgagccggccatgtcggtggtggggttggacgtgggctcgcagagctgctacatcgcggtagcccgggccgggggcatcgagaccatcgccaatgagttcagcgaccggtgcaccccgtcagtcatatcatttggatcaaaaaatagaacaatcggagttgcagccaaaaatcagcaaatcactcatgcaaacaatacggtgtctaacttcaaaagatttcatggccgagcattcaacgaccccttcattcaaaaggagaaggaaaacttgagttacgatttggttccattgaaaaatggtggagttggaataaaggtaatgtacatgggtgaagaacatctatttagtgtggagcagataacagccatgttgttgactaagctgaaggaaactgctgaaaacagcctcaagaaaccagtaacagattgtgttatttcagtcccctccttctttacagatgctgagaggcgatctgtgttagatgctgcacagattgttggcctaaactgtttaagacttatgaatgacatgacagctgttgctttgaattacggaatttataagcaggatctcccaagcctggatgagaaacctcggatagtggtttttgttgatatgggacattcagcttttcaagtgtctgcttgtgcttttaacaagggaaaattgaaggtactgggaacagcttttgatcctttcttaggaggaaaaaacttcgatgaaaagttagtggaacatttctgtgcagaatttaaaactaagtacaagttggatgcaaaatccaaaatacgagcactcctacgtctgtatcaggaatgtgaaaaactgaaaaagctaatgagctctaacagcacagaccttccactgaatatcgaatgctttatgaatgataaagatgtttccggaaagatgaacaggtcacaatttgaagaactctgtgctgaacttctgcaaaagatagaagtacccctttattcactgttggaacaaactcatctcaaagtagaagatgtgagtgcagttgagattgttggaggcgctacacgaattccagctgtgaaggaaagaattgccaaattctttggaaaagatattagcacaacactcaatgcagatgaagcagtagccagaggatgtgcattacagtgtgcaatactttccccggcatttaaagttagagaattttccgtcacagatgcagttccttttccaatatctctgatctggaaccatgattcagaagatactgaaggtgttcatgaagtctttagtcgaaaccatgctgctcctttctccaaagttctcacctttctgagaagggggccttttgagctagaagctttctattctgatccccaaggagttccatatccagaagcaaaaataggccgctttgtagttcagaatgtttctgcacagaaagatggagaaaaatctagagtaaaagtcaaagtgcgagtcaacacccatggcattttcaccatctctacggcatctatggtggagaaagtcccaactgaggagaatgaaatgtcttctgaagctgacatggagtgtctgaatcagagaccaccagaaaacccagacactgataaaaatgtccagcaagacaacagtgaagctggaacacagccccaggtacaaactgatgctcaacaaacctcacagtctcccccttcacctgaacttacctcagaagaaaacaaaatcccagatgctgacaaagcaaatgaaaaaaaagttgaccagcctccagaagctaaaaagcccaaaataaaggtggtgaatgttgagctgcctattgaagccaacttggtctggcagttagggaaagaccttcttaacatgtatattgagacagagggtaagatgataatgcaagataaattggaaaaagaaaggaatgatgctaaaaatgcagttgaggaatatgtgtatgagttcagagacaagctgtgtggaccatatgaaaaatttatatgtgagcaggatcatcaaaattttttgagactcctcacagaaactgaagactggctgtatgaagaaggagaggaccaagctaaacaagcatatgttgacaagttggaagaattaatgaaaattggcactccagttaaagttcggtttcaggaagctgaagaacggccaaaaatgtttgaagaactaggacagaggctgcagcattatgccaagatagcagctgacttcagaaataaggatgagaaatacaaccatattgatgagtctgaaatgaaaaaagtggagaagtctgttaatgaagtgatggaatggatgaataatgtcatgaatgctcaggctaaaaagagtcttgatcaggatccagttgtacgtgctcaggaaattaaaacaaaaatcaaggaattgaacaacacatgtgaacccgttgtaacacaaccgaaaccaaaaattgaatcacccaaactggaaagaactccaaatggcccaaatattgataaaaaggaagaagatttagaagacaaaaacaattttggtgctgaacctccacatcagaatggtgaatgttaccctaatgagaaaaattctgttaatatggacttggactagataaccttaaattggcctattccttcaattaataaaatatttttgccatagtatgtgactctacataacatactgaaactatttatattttcttttttaaggatatttagaaattttgtgtattatatggaaaaagaaaaaaagcttaagtctgtagtctttatgatcctaaaagggaaaattgccttggtaactttcagattcctgtggaattgtgaattcatactaagctttctgtgcagtctcaccatttgcatcactgaggatgaaactgacttttgtcttttggagaaaaaaaactgtactgttgttcaagagggctgtgattaaaatctttaagcatttgttcctgccaaggtagttttcttgcattttgctctccattcagcatgtgtgtgggtgtggatgtttataaacaagactaagtctgacttcataagggctttctaaaaccatttctgtccaagagaaaatgactttttgctttgatattaaaaattcaatgagtaaaacaaaagctagtcaaatgtgttagcagcatgcagaacaaaaactttaaactttctctctcactatacagtatattgtcaatgtgaaagtgtggaatggaagaaatgtcgatcctgttgtaactgattgtgaacacttttatgagctttaaaataaagttcatcttatggtgtcatttct

SEQ ID NO: 8 - protein, 858 aa, Homo sapiens
  ref <308>: DATABASE ACCESSION NUMBER: SWISS-Prot / Q92598
  ref <309>: DATABASE ENTRY DATE: 2002-06-15
MSVVGLDVGSQSCYIAVARAGGIETIANEFSDRCTPSVISFGSKNRTIGVAAKNQQITHANNTVSNFKRFHGRAFNDPFIQKEKENLSYDLVPLKNGGVGIKVMYMGEEHLFSVEQITAMLLTKLKETAENSLKKPVTDCVISVPSFFTDAERRSVLDAAQIVGLNCLRLMNDMTAVALNYGIYKQDLPSLDEKPRIVVFVDMGHSAFQVSACAFNKGKLKVLGTAFDPFLGGKNFDEKLVEHFCAEFKTKYKLDAKSKIRALLRLYQECEKLKKLMSSNSTDLPLNIECFMNDKDVSGKMNRSQFEELCAELLQKIEVPLYSLLEQTHLKVEDVSAVEIVGGATRIPAVKERIAKFFGKDISTTLNADEAVARGCALQCAILSPAFKVREFSVTDAVPFPISLIWNHDSEDTEGVHEVFSRNHAAPFSKVLTFLRRGPFELEAFYSDPQGVPYPEAKIGRFVVQNVSAQKDGEKSRVKVKVRVNTHGIFTISTASMVEKVPTEENEMSSEADMECLNQRPPENPDTDKNVQQDNSEAGTQPQVQTDAQQTSQSPPSPELTSEENKIPDADKANEKKVDQPPEAKKPKIKVVNVELPIEANLVWQLGKDLLNMYIETEGKMIMQDKLEKERNDAKNAVEEYVYEFRDKLCGPYEKFICEQDHQNFLRLLTETEDWLYEEGEDQAKQAYVDKLEELMKIGTPVKVRFQEAEERPKMFEELGQRLQHYAKIAADFRNKDEKYNHIDESEMKKVEKSVNEVMEWMNNVMNAQAKKSLDQDPVVRAQEIKTKIKELNNTCEPVVTQPKPKIESPKLERTPNGPNIDKKEEDLEDKNNFGAEPPHQNGECYPNEKNSVNMDLD

SEQ ID NO: 9 - DNA, 158 bp, Rattus norvegicus; identical to SEQ ID NO: 5
  ref <308>: DATABASE ACCESSION NUMBER: EMBL / AA108277
  ref <309>: DATABASE ENTRY DATE: 2000-03-03

SEQ ID NO: 10 - protein, 859 aa, Rattus norvegicus; identical to SEQ ID NO: 6
  ref <308>: DATABASE ACCESSION NUMBER: Refseq / NP_038587
  ref <309>: DATABASE ENTRY DATE: 2002-01-07

SEQ ID NO: 11 - DNA, 3612 bp, Homo sapiens; identical to SEQ ID NO: 7
  ref <308>: DATABASE ACCESSION NUMBER: EMBL / AB003334
  ref <309>: DATABASE ENTRY DATE: 1999-03-05

SEQ ID NO: 12 - protein, 858 aa, Homo sapiens; identical to SEQ ID NO: 8
  ref <308>: DATABASE ACCESSION NUMBER: SWISS-Prot / Q92598
  ref <309>: DATABASE ENTRY DATE: 2002-06-15

SEQ ID NO: 13 - DNA, 221 bp, Rattus norvegicus
  misc_feature (1)..(221): n=a, c, g or t
  ref <308>: DATABASE ACCESSION NUMBER: EMBL / AA684537
  ref <309>: DATABASE ENTRY DATE: 2000-03-08
cttggctgtagtagccatggcggctataagcctnctgcagcgggcttcgntcgccgctctnacagctctntttggccgccgcgctggcactaggctcggagtcggaagttttntcacacggagctttccgaagactgtngctcctgtccggcacagtggggaccatggcaagaaactgtttgtaatcaagccttccttatactataacgcccgcttcctga

SEQ ID NO: 14 - protein, 119 aa, Rattus norvegicus
  ref <308>: DATABASE ACCESSION NUMBER: Refseq / NP_079592
  ref <309>: DATABASE ENTRY DATE: 2002-09-19
MKFYLMLTGIPVIIGITLVNIFIGEAELAEIPEGYIPEHWEYYKHPISRWIARNFYDGPEKNYEKTLAILQIESEKAELRLKEQEVRRLMRARGDGPWYQFPTPEKEFIDHSPKATPDN

SEQ ID NO: 15 - DNA, 1049 bp, Homo sapiens
  ref <308>: DATABASE ACCESSION NUMBER: EMBL / AF047181
  ref <309>: DATABASE ENTRY DATE: 1998-02-25
gtagccatggcggccatgagtttgttgcggcgggtttcggttactgcggtggcagctctgtctggccggccccttggcactcgcctcggatttgggggcttcctcactcgtggctttccgaaggctgctgctcctgttcgacacagtggagaccatgggaaaagactatttgtcatcagaccttctagattctatgacaggcgttttttgaagttattgagattctacattgcattgactgggattccagtagcaattttcataactctggtgaatgtattcattggtcaagctgaactagcagaaattccagaaggctatgtcccagaacactgggaatattataagcatcccatatcaagatggattgcccgtaatttctatgatagtcctgaaaagatatatgaaagaacaatggccgtccttcagattgaagctgaaaaggctgaattacgggtaaaggagctggaagtgcgaaaattgatgcatgtgagaggagatggaccctggtattactatgagacaattgacaaggaacttattgatcattctccgaaagcaactcctgacaattaagcctttttttctccaaatacaaagtatattctctttattggaaaataaattaataaatatattctgtatttttgctctccgtgaaaaacaaaagagcctctgacattactgtctctcagtgttggttcagattgaggcttttgtttgaggagtttggcttccagtccccaaagaaggtttaaaatgtactaataaaaactggagaaataggaatttgtgaacccctaaaattgtagcaactttgaaaggttagtgttttatttacctgacaaatggaagttatagaagtctaataatgttaagcaccagtaattatagtattttgtacaaatgcctgtactgtagatgtctgtattattgaggggcaactcaggattttaagttccataaagtattgaaccaactctaaaatgttaactccttaataaacagattctcagtaaacaaattttaaagttaaaaaaaaaaaaaaa

SEQ ID NO: 16 - protein, 189 aa, Homo sapiens
  ref <308>: DATABASE ACCESSION NUMBER: SWISS-Prot / O43674
  ref <309>: DATABASE ENTRY DATE: 2002-06-15
MAAMSLLRRVSVTAVAALSGRPLGTRLGFGGFLTRGFPKAAAPVRHSGDHGKRLFVIRPSRFYDRRFLKLLRFYIALTGIPVAIFITLVNVFIGQAELAEIPEGYVPEHWEYYKHPISRWIARNFYDSPEKIYERTMAVLQIEAEKAELRVKELEVRKLMHVRGDGPWYYYETIDKELIDHSPKATPDN

SEQ ID NO: 17 - DNA, 265 bp, Rattus norvegicus
  misc_feature (1)..(265): n=a, c, g or t
  ref <308>: DATABASE ACCESSION NUMBER: EMBL / AA686031
  ref <309>: DATABASE ENTRY DATE: 2000-03-08
ctctagaggaaagccatcatgttaaggatacctgtaaaaagggccttgataggcctttctaagtctcctaaaggatatgttcgatcaactggcacagcagcaagtaacttgattgaagtatttgttgatggtcagtctgtcatggtggaaccaggaaccactgtcctgcaggcctgcnagaaggttggcatgcaaatccctcgattctnttaccatgaaaggttgtctgtagctggaaattgcaggatgtgcctgggtagagatt

SEQ ID NO: 18 - protein, 727 aa, Rattus norvegicus
  ref <308>: DATABASE ACCESSION NUMBER: SWISS-Prot / AAH06660
  ref <309>: DATABASE ENTRY DATE: 2003-02-01
MLRIPIKRALIGLSNSPKGYVRTTGTAASNLIEVFVDGQSVMVEPGTTVLQACEKVGMQIPRFCYHERLSVAGNCRMCLVEIEKAPKVVAACAMPVMKGWNILTNSEKSKKAREGVMEFLLANHPLDCPICDQGGECDLQDQSMMFGSDRSRFLEGKRAVEDKNIGPLVKTIMTRCIQCTRCIRFASEIAGVDDLGTTGRGNDMQVGTYIEKMFMSELSGNVIDICPVGALTSKPYAFTARPWETRKTESIDVMDAVGSNIVVSTRTGEVMRILPRMHEDINEEWISDKTRFAYDGLKRQRLTEPMVRNEKGLLTYTSWEDALSRVAGMLQNFEGNAVAAIAGGLVDAEALVALKDLLNKVDSDNLCTEEIFPTEGAGTDLRSNYLLNTTIAGVEEADVVLLVGTNPRFEAPLFNARIRKSWLHNDLKVALIGSPVDLTYRYDHLGDSPKILQDIASGRHSFCEVLKDAKKPMVVLGSSALQRDDGAAILAAVSNMVQKIRVTTGVAAEWKVMNILHRIASQVAALDLGYKPGVEAIRKNPPKMLFLLGADGGCITRQDLPKDCFIVYQGHHGDVGAPMADVILPGAAYTEKSATYVNTEGRAQQTKVAVTPPGLAREDWKIIRALSEIAGITLPYDTLDQVRNRLEEVSPNLVRYDDIEETNYFQQASELAKLVNQEVLADPLVPPQLTIKDFYMTDSISRASQTMAKCVKAVTEGAQAVEEPSIC

SEQ ID NO: 19 - DNA, 2506 bp, Homo sapiens
  ref <308>: DATABASE ACCESSION NUMBER: Refseq / NM_005006
  ref <309>: DATABASE ENTRY DATE: 2002-11-05
cggacagtttagcagaacagcctccgcggctccggggagaagcaatatgttaaggatacctgtaagaagggccttagtaggcctttctaagtctcctaaaggatgtgttcgaacaactgccacagcagcaagcaacttgattgaagtatttgttgatggtcagtctgtcatggtggaaccgggaacgaccgtcctccaagcttgtgagaaggttggcatgcagatccctcgattctgttatcatgaaaggttgtctgttgctggaaactgcaggatgtgccttgttgaaattgagaaagcccctaaggttgtagctgcttgtgccatgccagtaatgaagggttggaatatcctaacaaactcagaaaaatccaaaaaggccagggaaggtgtgatggagttcttattagcaaatcacccattggactgtcctatttgtgaccagggaggtgaatgtgatctgcaggaccagtccatgatgtttggaaatgataggagccgatttttagaggggaagcgtgctgtggaagacaagaacattgggccattggtaaagaccatcatgacaagatgtatacagtgtactcgctgcatcaggtttgcaagtgagattgcaggagtagatgatttgggaacaacaggcagaggaaatgatatgcaagttggcacatacattgaaaagatgttcatgtctgaactgtctgggaatatcattgatatctgccctgtaggtgccctaacctctaagccctatgcctttactgcccggccttgggaaacaagaaagacagaatccattgatgtaatggatgcggttggaagtaatattgtggttagcacaagaactggagaagtgatgaggattttgccacgtatgcatgaggacatcaatgaagagtggatctctgataaaaccagatttgcctatgatgggctaaaacgtcaaagacttaccgagccaatggtcagaaatgaaaaagggcttttaacctatacttcttgggaggatgctctctctcgcgtagctggaatgttgcagagttttcaaggcaaagatgtggcagcaattgcaggtggcttggtggatgctgaagccctggtagctctcaaagatttgcttaatagagtggactctgacaccttatgcactgaagaggtcttccccactgcaggagctggcacagatttgcgttccaattatcttcttaatactacaattgctggtgtggaagaggcagatgttgttcttctggttggtacaaacccacgttttgaggcaccactgtttaatgcatggattcgaaagagctggctgcataatgacttaaaagtggcccttataggcagtccagtggacctcacttacacatatgaccacctgggagactcccccaaaattcttcaagacattgcttcgggaagccatccatttagccaggtcctaaaggaagctaaaaaaccaatggtggttttaggcagttctgcactccaaagaaatgatggagcagcaattcttgcagctgtttctagcattgcacaaaagattcggatgactagtggtgttactggtgattggaaagttatgaatatccttcataggattgcaagtcaagtagctgctttggaccttggctataagcctggggtggaagcaattcggaagaaccctcccaaggtgctgtttctcctgggagcagatggaggttgtatcacacgacaggatttgccaaaggattgtttcattatttatcaaggacatcatggtgatgttggggctcccatagctgatgttattctcccaggagctgcttacacagagaagtctgctacatatgtcaacactgagggtagagctcagcagactaaggtagcagtgacacctcctggcttggcaagagaagactggaaaattataagagcactctctgagattgctggaatgactcttccatatgatactctggatcaagtaaggaacagattggaagaattctctcctaatcttgttcgatatgatgatattgaaggggctaattacttccagcaagcaaatgagctctcaaagctagtgaaccagcagcttcttgctgacccacttgttccacctcagctaactctaaaagacttctacatgacagattcgattagcagagcctcacagacaatggccaaatgtgtcaaagctgtcacagagggtgcccaggcagtagaggaaccatccatatgctgaagcttctactaggatcccagttttgccgcagataattaatggacaactgtagtgcagtgatcctttacaggtttatttctttgtaaaaaaaaaataataataatttgaatcatgtaatatttaaggttatactatgcctatttgaaaatgatattagttatcaactttgcagtttgaaaaacatgtattgtgtgtaaaggttaaataacaaaactatgcagatgctcttaaaagcattgataacctttgtgacgaacataaagagatccttaaatt

SEQ ID NO: 20 - protein, 727 aa, Homo sapiens
  ref <308>: DATABASE ACCESSION NUMBER: SWISS-Prot / P28331
  ref <309>: DATABASE ENTRY DATE: 2002-06-15
MLRIPVRRALVGLSKSPKGCVRTTATAASNLIEVFVDGQSVMVEPGTTVLQACEKVGMQIPRFCYHERLSVAGNCRMCLVEIEKAPKVVAACAMPVMKGWNILTNSEKSKKAREGVMEFLLANHPLDCPICDQGGECDLQDQSMMFGNDRSRFLEGKRAVEDKNIGPLVKTIMTRCIQCTRCIRFASEIAGVDDLGTTGRGNDMQVGTYIEKMFMSELSGNIIDICPVGALTSKPYAFTARPWETRKTESIDVMDAVGSNIVVSTRTGEVMRILPRMHEDINEEWISDKTRFAYDGLKRQRLTEPMVRNEKGLLTYTSWEDALSRVAGMLQSFQGKDVAAIAGGLVDAEALVALKDLLNRVDSDTLCTEEVFPTAGAGTDLRSNYLLNTTIAGVEEADVVLLVGTNPRFEAPLFNAWIRKSWLHNDLKVALIGSPVDLTYTYDHLGDSPKILQDIASGSHPFSQVLKEAKKPMVVLGSSALQRNDGAAILAAVSSIAQKIRMTSGVTGDWKVMNILHRIASQVAALDLGYKPGVEAIRKNPPKVLFLLGADGGCITRQDLPKDCFIIYQGHHGDVGAPIADVILPGAAYTEKSATYVNTEGRAQQTKVAVTPPGLAREDWKIIRALSEIAGMTLPYDTLDQVRNRLEEFSPNLVRYDDIEGANYFQQANELSKLVNQQLLADPLVPPQLTLKDFYMTDSISRASQTMAKCVKAVTEGAQAVEEPSIC

SEQ ID NO: 21 - DNA, 308 bp, Rattus norvegicus
  misc_feature (1)..(308): n=a, c, g or t
  ref <308>: DATABASE ACCESSION NUMBER: EMBL / AA686579
  ref <309>: DATABASE ENTRY DATE: 2000-03-08
cggagacccccgggtgaatccaccgacaccatgtctgaccaggaggcaaaaccttcaactgaggacttaggagataagaaagaaggagaatacattaaactcaaagttattggacaggacagcagtgagatccatttcaaagtgaaaatgacaacacatctcaagaagctcaaagaatcgtactgtcaaagacagggagttccaatganttcactcaggtttctctttgaaggtcagagaattgctgataatcatactccaaaagaactgggaatggaggaagaagacgtgatttgaagtttatcagg

SEQ ID NO: 22 - protein, 101 aa, Rattus norvegicus
  ref <308>: DATABASE ACCESSION NUMBER: SWISS-Prot / AAC39959
  ref <309>: DATABASE ENTRY DATE: 2002-06-15
MSDQEAKPSTEDLGDKKEGEYIKLKVIGQDSSEIHFKVKMTTHLKKLKESYCQRQGVPMNSLRFLFEGQRIADNHTPKELGMEEEDVIEVYQEQTGGHSTV

SEQ ID NO: 23 - DNA, 308 bp, Rattus norvegicus; identical to SEQ ID NO: 21
  misc_feature (1)..(308): n=a, c, g or t
  ref <308>: DATABASE ACCESSION NUMBER: EMBL / AA686579
  ref <309>: DATABASE ENTRY DATE: 2000-03-08

SEQ ID NO: 24 - protein, 101 aa, Rattus norvegicus; identical to SEQ ID NO: 22
  ref <308>: DATABASE ACCESSION NUMBER: SWISS-Prot / AAC39959
  ref <309>: DATABASE ENTRY DATE: 2002-06-15

SEQ ID NO: 25 - DNA, 608 bp, Rattus norvegicus
  ref <308>: DATABASE ACCESSION NUMBER: EMBL / AA799276
  ref <309>: DATABASE ENTRY DATE: 2000-03-03
taataacaagtgtacaatttagcataaggaatcggagagcctctccagagaagtcggtttctttgctgcaagaagaatgaggttctgaacccttatccaagaacagaagccatcagccaagtctccacatttctctgcaaaatgttgtagcctctataactgtatgatagtgtaatgcatgccttcagttgtaagtggccagatcgcgctacagtgacattgaaacctgctctctaattggccctgtacagtttgcttatttataaattcatttaaaacactacagctgttgaatggttacaacctacgcctccggtcctaacttcagttgttctcctcggtgtgcagccagctgttccacactgtattattgtaacttatttagtgaagtcagaagcagtagacagatgttggtgcaatacaagtattgtgtgcatttatcgtaataaagtgctccgcgtcggttcagttcctcacagcttctcacagtgcatgtctgactgtagtctgtaaatagaggtcagtgtccgtgctgctaacaggtatcgatcgcacagacatgatttcaggtaaataaatcgattctacgataaatgggtaaaagaaaa

SEQ ID NO: 26 - protein, 1043 aa, Rattus norvegicus
  ref <308>: DATABASE ACCESSION NUMBER: SWISS-Prot / P11507
  ref <309>: DATABASE ENTRY DATE: 2001-10-16
MENAHTKTVEEVLGHFGVNESTGLSLEQVKKLKERWGSNELPAEEGKTLLELVIEQFEDLLVRILLLAACISFVLAWFEEGEETITAFVEPFVILLILVANAIVGVWQERNAENAIEALKEYEPEMGKVYRQDRKSVQRIKAKDIVPGDIVEIAVGDKVPADIRLTSIKSTTLRVDQSILTGESVSVIKHTDPVPDPRAVNQDKKNMLFSGTNIAAGKAMGVVVATGVNTEIGKIRDEMVATEQERTPLQQKLDEFGEQLSKVISLICIAVWIINIGHFNDPVHGGSWIRGAIYYFKIAVALAVAAIPEGLPAVITTCLALGTRRMAKKNAIVRSLPSVETLGCTSVICSDKTGTLTTNQMSVCRMFILDKVEGDTCSLNEFTITGSTYAPIGEVQKDDKPVKCHQYDGLVELATICALCNDSALDYNEAKGVYEKVGEATETALTCLVEKMNVFDTELKGLSKIERANACNSVIKQLMKKEFTLEFSRDRKSMSVYCTPNKPSRTSMSKMFVKGAPEGVIDRCTHIRVGSTKVPMTPGVKQKIMSVIREWGSGSDTLRCLALATHDNPLRREEMHLEDSANFIKYETNLTFVGCVGMLDPPRIEVASSVKLCRQAGIRVIMITGDNKGTAVAICRRIGIFGQDEDVTSKAFTGREFDELSPSAQRDACLNARCFARVEPSHKSKIVEFLQSFDEITAMTGDGVNDAPALKKSEIGIAMGSGTAVAKTASEMVLADDNFSTIVAAVEEGRAIYNNMKQFIRYLISSNVGEVVCIFLTAALGFPEALIPVQLLWVNLVTDGLPATALGFNPPDLDIMNKPPRNPKEPLISGWLFFRYLAIGCYVGAATVGAAAWWFIAADGGPRVSFYQLSHFLQCKEDNPDFEGVDCAIFESPYPMTMALSVLVTIEMCNALNSLSENQSLLRMPPWENIWLVGSICLSMSLHFLILYVEPLPLIFQITPLNLTQWLMVLKISLPVILMDETLKFVARNYLEPGKECAQPATKPSCSLSACTDGISWPFVLLIMPLVVWVYSTDTNFSDMFWS

SEQ ID NO: 27 - DNA, 4134 bp, Homo sapiens
  ref <308>: DATABASE ACCESSION NUMBER: EMBL / M23114
  ref <309>: DATABASE ENTRY DATE: 2000-03-04
gggtgattcagcgcccggcgaggcggaacgggccgcaagaggaggaggggagagcccgtccgcgcctgggctcccggggtggcacgagcccgcggccggagtgcgaggcggaggcgaggaggccgcggggacgggaggcgaggccggccgggcccccgaagccatggagaacgcgcacaccaagacggtggaggaggtgctgggccacttcggcgtcaacgagagtacggggctgagcctggaacaggtcaagaagcttaaggagagatggggctccaacgagttaccggctgaagaaggaaaaaccttgctggaacttgtgattgagcagtttgaagacttgctagttaggattttattactggcagcatgtatatcttttgttttggcttggtttgaagaaggtgaagaaacaattacagcctttgtagaaccttttgtaattttactcatattagtagccaatgcaattgtgggtgtatggcaggaaagaaatgctgaaaatgccatcgaagcccttaaggaatatgagcctgaaatgggcaaagtgtatcgacaggacagaaagagtgtgcagcggattaaagctaaagacatagttcctggtgatattgtagaaattgctgttggtgacaaagttcctgctgatataaggttaacttccatcaaatctaccacactaagagttgaccagtcaattctcacaggtgaatctgtctctgtcatcaagcacactgatcccgtccctgacccacgagctgtcaaccaagataaaaagaacatgctgttttctggtacaaacattgctgctgggaaagctatgggagtggtggtagcaactggagttaacaccgaaattggcaagatccgggatgaaatggtggcaacagaacaggagagaacaccccttcagcaaaaactagatgaatttggggaacagctttccaaagtcatctcccttatttgcattgcagtctggatcataaatattgggcacttcaatgacccggttcatggagggtcctggatcagaggtgctatttactactttaaaattgcagtggccctggctgtagcagccattcctgaaggtctgcctgcagtcatcaccacctgcctggctcttggaactcgcagaatggcaaagaaaaatgccattgttcgaagcctcccgtctgtggaaacccttggttgtacttctgttatctgctcagacaagactggtacacttacaacaaaccagatgtcagtctgcaggatgttcattctggacagagtggaaggtgatacttgttcccttaatgagtttaccataactggatcaacttatgcacctattggagaagtgcataaagatgataaaccagtgaattgtcaccagtatgatggtctggtagaattagcaacaatttgtgctctttgtaatgactctgctttggattacaatgaggcaaagggtgtgtatgaaaaagttggagaagctacagagactgctctcacttgcctagtagagaagatgaatgtatttgataccgaattgaagggtctttctaaaatagaacgtgcaaatgcctgcaactcagtcattaaacagctgatgaaaaaggaattcactctagagttttcacgtgacagaaagtcaatgtcggtttactgtacaccaaataaaccaagcaggacatcaatgagcaagatgtttgtgaagggtgctcctgaaggtgtcattgacaggtgcacccacattcgagttggaagtactaaggttcctatgacctctggagtcaaacagaagatcatgtctgtcattcgagagtggggtagtggcagcgacacactgcgatgcctggccctggccactcatgacaacccactgagaagagaagaaatgcaccttgaggactctgccaactttattaaatatgagaccaatctgaccttcgttggctgcgtgggcatgctggatcctccgagaatcgaggtggcctcctccgtgaagctgtgccggcaagcaggcatccgggtcatcatgatcactggggacaacaagggcactgctgtggccatctgtcgccgcatcggcatcttcgggcaggatgaggacgtgacgtcaaaagctttcacaggccgggagtttgatgaactcaacccctccgcccagcgagacgcctgcctgaacgcccgctgttttgctcgagttgaaccctcccacaagtctaaaatcgtagaatttcttcagtcttttgatgagattacagctatgactggcgatggcgtgaacgatgctcctgctctgaagaaagccgagattggcattgctatgggctctggcactgcggtggctaaaaccgcctctgagatggtcctggcggatgacaacttctccaccattgtggctgccgttgaggaggggcgggcaatctacaacaacatgaaacagttcatccgctacctcatctcgtccaacgtcggggaagttgtctgtattttcctgacagcagcccttggatttcccgaggctttgattcctgttcagctgctctgggtcaatctggtgacagatggcctgcctgccactgcactggggttcaaccctcctgatctggacatcatgaataaacctccccggaacccaaaggaaccattgatcagcgggtggctctttttccgttacttggctattggctgttacgtcggcgctgctaccgtgggtgctgctgcatggtggttcattgctgctgacggtggtccaagagtgtccttctaccagctgagtcatttcctacagtgtaaagaggacaacccggactttgaaggcgtggattgtgcaatctttgaatccccatacccgatgacaatggcgctctctgttctagtaactatagaaatgtgtaacgccctcaacagcttgtccgaaaaccagtccttgctgaggatgcccccctgggagaacatctggctcgtgggctccatctgcctgtccatgtcactccacttcctgatcctctatgtcgaacccttgccactcatcttccagatcacaccgctgaacgtgacccagtggctgatggtgctgaaaatctccttgcccgtgattctcatggatgagacgctcaagtttgtggcccgcaactacctggaacctggtaaagagtgtgtgcagcctgccaccaaatcctgctcgttctcggcatgcaccgatgggatttcctggccgtttgtgctgctcataatgcccctggtgatctgggtctatagcacagacactaactttagcgatatgttctggtcttgactgacagttttccataaagaagatgtttaacttaatcaattaatttttttattgtttaaagcaactgtctatttctgctgaattttcacatgaacatactggctggtgatggaggtttcatactctagattttgttttgctttttctgactccagtggggcaagattttccttttttatacacataattaaagtgtccattgacatgtacagagaactaacactattttatgcaaatatttttttgtagatgaaaaagcatgtacagtgttctgtttaatactcatccttgtataaaaaaaatagttgagccagcagacattgtcagcaaattaattggcagcagattttaggaaatgaatgtgtgtggttttttttctaaaactaaatagcatgtattgtgtcttttgcatgatgatccggatttaatttgatatcacagtctaatttttattcataagccaatttttctgcactgagcagagtcttgctacctcagtcagtattgttttggtttgctacttccctcacccactttggcctccgttcaccccaccccaccccacctctccccaccttacccccgccccgcttggcttcttctttaggattgtgatggttcgttctgtttacatcagttttaacgagaggtatgcctgtactcgcttgtgcagaaaacattgttccagattcaatcgactgggtttatgtcccttcacatagtttttaaggttatttatttaaatgtctaatgtattttattgtaacagacattgttttgccaacattgcctatttcagtggcacgtcatctagttttaaaaaaataaaacattttaaaaag

SEQ ID NO: 28 - protein, 1042 aa, Homo sapiens
  ref <308>: DATABASE ACCESSION NUMBER: SWISS-Prot / P16615
  ref <309>: DATABASE ENTRY DATE: 2002-06-15
MENAHTKTVEEVLGHFGVNESTGLSLEQVKKLKERWGSNELPAEEGKTLLELVIEQFEDLLVRILLLAACISFVLAWFEEGEETITAFVEPFVILLILVANAIVGVWQERNAENAIEALKEYEPEMGKVYRQDRKSVQRIKAKDIVPGDIVEIAVGDKVPADIRLTSIKSTTLRVDQSILTGESVSVIKHTDPVPDPRAVNQDKKNMLFSGTNIAAGKAMGVVVATGVNTEIGKIRDEMVATEQERTPLQQKLDEFGEQLSKVISLICIAVWIINIGHFNDPVHGGSWIRGAIYYFKIAVALAVAAIPEGLPAVITTCLALGTRRMAKKNAIVRSLPSVETLGCTSVICSDKTGTLTTNQMSVCRMFILDRVEGDTCSLNEFTITGSTYAPIGEVHKDDKPVNCHQYDGLVELATICALCNDSALDYNEAKGVYEKVGEATETALTCLVEKMNVFDTELKGLSKIERANACNSVIKQLMKKEFTLEFSRDRKSMSVYCTPNKPSRTSMSKMFVKGAPEGVIDRCTHIRVGSTKVPMTSGVKQKIMSVIREWGSGSDTLRCLALATHDNPLRREEMHLEDSANFIKYETNLTFVGCVGMLDPPRIEVASSVKLCRQAGIRVIMITGDNKGTAVAICRRIGIFGQDEDVTSKAFTGREFDELNPSAQRDACLNARCFARVEPSHKSKIVEFLQSFDEITAMTGDGVNDAPALKKAEIGIAMGSGTAVAKTASEMVLADDNFSTIVAAVEEGRAIYNNMKQFIRYLISSNVGEVVCIFLTAALGFPEALIPVQLLWVNLVTDGLPATALGFNPPDLDIMNKPPRNPKEPLISGWLFFRYLAIGCYVGAATVGAAAWWFIAADGGPRVSFYQLSHFLQCKEDNPDFEGVDCAIFESPYPMTMALSVLVTIEMCNALNSLSENQSLLRMPPWENIWLVGSICLSMSLHFLILYVEPLPLIFQITPLNVTQWLMVLKISLPVILMDETLKFVARNYLEPGKECVQPATKSCSFSACTDGISWPFVLLIMPLVIWVYSTDTNFSDMFWS

SEQ ID NO: 29 - DNA, 599 bp, Rattus norvegicus
  ref <308>: DATABASE ACCESSION NUMBER: EMBL / AA799336
  ref <309>: DATABASE ENTRY DATE: 2000-03-03
cgtagccatggcgtctcgtgtcctttgcgcctgtgtccgccgcctgcctgcggcctttgcgccgctgccccggcttcccacgttggctttggcccggccgctcagcaccattctctgccctgagggaatctggagaagaaccgggactctgcagcccaccttggcgctcgcgcaggtgcctggaacggtcacacatttgtgccgccagtacagtgatgcacccccactgacgttagaaggaatcagggaccgagttctgtatgtcttgaaactctatgataagattgacccagaaaagctctcagtaaattctcattttatgaaggacctgggcttagacagtttggaccaagtggaaattattatggccatggaagacgaatttgggtttgaaattcctgatatagatgcagagaagttaatgtgtccacaagaaattgtagattacattgcagataagaaggatgtgtatgactaaagtatcagagccttcttcctcactgtgaggactccagaggacacatgatggcatcgtggccaactgacagcggttctgttcgacttgtatttaaattgtctgagtgttttgccctttaaaa

SEQ ID NO: 30 - protein, 156 aa, Rattus norvegicus
  ref <308>: DATABASE ACCESSION NUMBER: SWISS-Prot / BAB26840
  ref <309>: DATABASE ENTRY DATE: 2002-06-15
MASRVLCACVRRLPAAFAPLPRLPTLALARPLSTTLCPEGIRRRPGALQSALALAQVPGTVTHLCRQYSDAPPLTLDGIKDRVLYVLKLYDKIDPEKLSVNSHFMKDLGLDSLDQVEIIMAMEDEFGFEIPDIDAEKLMCPQEIVDYIADKKDVYE

SEQ ID NO: 31 - DNA, 663 bp, Homo sapiens
  ref <308>: DATABASE ACCESSION NUMBER: Refseq / NM_005003
  ref <309>: DATABASE ENTRY DATE: 2002-11-05
agtgcatcctgggttggcgtagccatggcgtctcgtgtcctttcagcctatgtcagccgcctgcccgcggcctttgcgccgctgccccgggtccggatgctggccgtggcccggcctctcagcactgctctctgctccgcggggacccagacgaggctcgggactttgcagccggccttagtgctcgcgcaggttcctggtagagttacacagttgtgccgccagtatagcgacatgcctcctttgacgttagagggcatccaggaccgtgttctttacgtattgaaactctatgacaagattgacccagagaagctttcagtaaattctcattttatgaaagacctgggcttagacagtttggaccaagtggagattatcatggccatggaagacgaatttgggtttgaaattcctgatatagatgctgaaaagttaatgtgtccacaagaaattgtagattacattgcagataagaaagatgtatatgaataaagtatcagaccctttggctttgctgagagaggactcagatgatagtgacgaatgtctggcagtgaggacacattttggcattcttgctgactctgacagagtgattctgatggacttgtatttaaattgtatgtgttttactctttgaaaataaatctataaaaccaa

SEQ ID NO: 32 - protein, 156 aa, Homo sapiens
  ref <308>: DATABASE ACCESSION NUMBER: SWISS-Prot / O14561
  ref <309>: DATABASE ENTRY DATE: 2002-06-15
MASRVLSAYVSRLPAAFAPLPRVRMLAVARPLSTALCSAGTQTRLGTLQPALVLAQVPGRVTQLCRQYSDMPPLTLEGIQDRVLYVLKLYDKIDPEKLSVNSHFMKDLGLDSLDQVEIIMAMEDEFGFEIPDIDAEKLMCPQEIVDYIADKKDVYE

SEQ ID NO: 33 - DNA, 588 bp, Rattus norvegicus
  ref <308>: DATABASE ACCESSION NUMBER: EMBL / AA799389
  ref <309>: DATABASE ENTRY DATE: 2000-03-03
gatatggaagaggaaagggtgatcccgactgagaagggccggctcctagcagagcaacttgggtttgacttctttgaagccagtgccaaggagaacatcagtgtgaggcaggccttcgagcgtctggtggacgccatctgcgataagatgtctgactcaatggacacagacccctccgtgctgggcgcctccaagaccacacggctctcggacaccccgccgctgctccagcagaactgctcttgctaggcaaggcccgccctgctgttccccccatgtcatgcccacttctcctctgcttctctctgttactgtctgctccccgaaccccaagccagctgagttctttgccagcccctgtggttctctgcagatggccccagctacagatactaactgcaggttactgtgtgggtgaagactcctcttacaacagaagactccctcttaggaaggaggttcaacatagagacttggaaagaaccttttctgcccttaaaataaaattcccttcatttaccaagatacaactcccacacgcactccttaggggttgaccagtgtgtaaagtgaggcccagctgcacag

SEQ ID NO: 34 - protein, 219 aa, Rattus norvegicus
  ref <308>: DATABASE ACCESSION NUMBER: SWISS-Prot / Q63941
  ref <309>: DATABASE ENTRY DATE: 1999-07-15
MASVTDGNTGIRDASDQNFDYMFKLLIIGNSSVGKTSFLFRYADDTFTPAFVSTVGIDFKVKTVYRHEKRVKLQIWDTAGQERYRTITTAYYRGAMGFILMYDITNEESFNAVQDWATQIKTYSWDNAQVILVGNKCDMEEERVIPTEKGRLLAEQLGFDFFEASAKENISVRQAFERLVDAICDKMSDSMDTDPSVLGASKTTRLSDTPPLLQQNCSC

SEQ ID NO: 35 - DNA, 519 bp, Rattus norvegicus
  ref <308>: DATABASE ACCESSION NUMBER: EMBL / AA801441
  ref <309>: DATABASE ENTRY DATE: 2000-03-03
cagaaagttcatattcttccactctctgaagcaacagggatctgagcactaacaaaaagtggcaagcctggacccttcttgctatctggttccagagacaaaactattaagatgtgggacgtcagtactggcatgtgccttatgactctggtgggtcatgataattgggtacgtggagttctgttccattctggggggaagtttattttgagttgtgctgatgacaagaccctccgtgtatgggattacaagaacaagcgatgcatgaagaccctcaatgcgcatgaacactttgttacctccttggatttccataagacggcaccctatgtggttactggcagtgtagatcaaacagtaaaggtgtgggagtgccgttgattgagtcacatttggttcttcctcccttttttcctctggatgcactctgatgataccatggttaccccatttgagctctgtttaaataaatattgtcctttcatgtaaattattctggatgtagattgagcttattaa

SEQ ID NO: 36 - protein, 409 aa, Rattus norvegicus
  ref <308>: DATABASE ACCESSION NUMBER: SWISS-Prot / P43035
  ref <309>: DATABASE ENTRY DATE: 2002-06-15
VLSQRQRDELNRAIADYLRSNGYEEAYSVFKKEAELDMNEELDKKYAGLLEKKWTSVIRLQKKVMELESKLNEAKEEFTSGGPLGQKRDPKEWIPRPPEKYALSGHRSPVTRVIFHPVFSVMVSASEDATIKVWDYETGDFERTLKGHTDSVQDISFDHSGKLLASCSADMTIKLWDFQGFECIRTMHGHDHNVSSVAIMPNGDHIVSASRDKTIKMWEVQTGYCVKTFTGHREWVRMVRPNQDGTLIASCSNDQTVRVWVVATKECKAELREHEHVVECISWAPESSYSSISEATGSETKKSGKPGPFLLSGSRDKTIKMWDVSTGMCLMTLVGHDNWVRGVLFHSGGKFILSCADDKTLRVWDYKNKRCMKTLNAHEHFVTSLDFHKTAPYVVTGSVDQTVKVWECR

SEQ ID NO: 37 - DNA, 5243 bp, Homo sapiens
  ref <308>: DATABASE ACCESSION NUMBER: EMBL / L13385
  ref <309>: DATABASE ENTRY DATE: 2000-03-04
cggcggaggcggcggtgcagcgctccggtggaatgaatcttacttgttgaatatcttctggttactagttggattcatttgtgaaagaatcattttcccctgtgtggaagacacttagtggcatatttaaattataagtccacggatcaaaaagctttttgatttcccaaaggagggacataccactatatcagataagcttgacattacagccaagatggtgctgtcccagagacaacgagatgaactaaatcgagctatagcagattatcttcgttcaaatggctatgaagaggcatattcagtttttaaaaaggaagctgaattagatgtgaatgaagaattagataaaaagtatgctggtcttttggaaaaaaaatggacatctgttattagattacaaaagaaggttatggaattagaatcaaagctaaatgaagcaaaagaagaatttacgtcaggtggacctcttggtcagaaacgagacccaaaagaatggattccccgtccgccagaaaaatatgcattgagtggtcacaggagtccagtcactcgagtcattttccatcctgtgttcagtgttatggtctctgcttcagaggatgctacaattaaggtgtgggattatgagactggagattttgaacgaactcttaaaggacatacagactctgtacaggacatttcattcgaccacagcggcaagcttctggcttcctgttctgcagatatgaccattaaactatgggattttcagggctttgaatgcatcagaaccatgcacggccatgaccacaatgtttcttcagtagccatcatgcccaatggagatcatatagtgtctgcctcaagggataaaactataaaaatgtgggaagtgcaaactggctactgtgtgaagacattcacaggacacagagaatgggtacgtatggtacggccaaatcaagatggcactctgatagccagctgttccaatgaccagactgtgcgtgtatgggtcgtagcaacaaaggaatgcaaggctgagctccgagagcatgagcatgtggtagaatgcatttcctgggctccagaaagctcatattcctccatctctgaagcaacaggatctgagactaaaaaaagtggtaaacctgggccattcttgctgtctggatccagagacaagactattaagatgtgggatgtcagtactggcatgtgccttatgaccctcgtgggtcatgataactgggtacgtggagttctgttccattctggggggaagtttattttgagttgtgctgatgacaagaccctacgcgtatgggattacaagaacaagcgatgcatgaagaccctcaatgcgcatgaacactttgttacctccttggatttccacaagacggcaccctatgtcgtcactggcagcgtagatcaaacagtaaaagtgtgggagtgccgttgattgtgtctccttcggcccctcctccctcttttcctctggatgcactctgatgataccatggttaccccattgagctctgtttaaataaatattgtcctttcatgtaaattattctggatgtagattgagcttattaaatgttacacacaaagtattcatgcatggtgaatccaaattgtatactgtaaatttacatacgttgtctagaagtaccatagggtttaaaaacctgggctggcattggtcacaccaggcctaagaaggcagaagttgaatcaattgaactagggcactaaactgaatagttgacagtgtcattttatgttggattattaattcctgtttttctttctgctatctgttggtgcctgacttgatggcctcatttggggaaaagtggtggttattagggcttttcctgaaatgtgtatctatgtaacatcacttaagtgtgcttaataaatctcctgtaaggattttagatgataaggctacaattcagaatcttctgaaccatctatgtaatgaatggggattatacattggaatttttgtcatgacacatttgccaaatcagtaggatatatttgttttggcagcctatcacgcagaggctagtggtatatttatgtaagaaaatgactgtaaatctcaagaaaaatctcagcagctaatagcaactcatttatttcattttggtcttaatgctttgtaaacaggtcaaaaaatactgtcatactctaagcttctattttccacactggacatacttctagttgtattctccatactattagactgtgtagtgatgtgacttccaagtagaatttaatctccccattgagtgtgtcatggtacaaatcactattcgtttttggtgttttttagggatgtgcaatgtgcattacataatgacagaaatactgagaaggttctgtgtgcccatttgaaaggagtgggaggaatacagcagtttgtttttcaacatgaatctgatattgatttaaactgtgtttcacttacaagttttaaaaaaatgacagggtttaatggagcgtgcataaaaatgtactgttttcaccttttgtttatatgtaaatgtttgtaagtatatgggcctatctgtaagtgggtaagtctgtatgtgtgtatcatacacatcaacctccatgtccttagtcctgggtttttgaaaaagtgctaaaacggacaagtagaataaatgttgctgtggaatgccatgctttagaacaaaccctttttgatcttaatgcttctgaaaactaggtctgactctggggatttttttccagccgaaggaaaatcacttccgttatgtccccctctaatttagccgctcgacattttacacaacccggatatgttgtatattttgacccaaagttacaggtaggtttaagagaatttttagccatgacttttggagcactattccattgtcagttattaataaagaattccattgcttagctaaccaacaggttttttttgtttccaagagagttatttgaaaagttaacagaacaatgagataacagtgacagtttaacaaagataaaattctgaactgcgttttattcatttgtgtactatgtgattttttaaatgtcccctttagtatttaatggaaaattggttcctgcaaaagacaaagggtgagagttagcgtcctgtagatacacacagagactaggccgtatattaactagaagcagctttatgtctagcttgtgtctttttgtttgtttgcttgtttgtttttagattcctgagagatgtctctggaagggaaagttttgagaactaatggctatttttgaggacaaaaattacatcttaagctaattccttaaatacatacagtaggtgaattttcaggacaatattgcctcacaaccctgcttacattgaaaagtctttttcccttagctcttctgactggatttttctacaaaactatggaaaatatctttgttcttgtttgctgctattttctgtcctattttgagaaatataaatacatagaaatggtgcatcttaacatttgtttgtacatgtataaatgtcttgtattttaattcatttttagcatgaattgtttaagggtaagccacaacatctagaaatcactcatagatattgaacaataaaggagaatggtaccgatgcaggaggaagcaagcgtgtcttcccctgcagcacacagcgacttgcgttgacaaaggaggaggaaacgattactctgtaaacaaagttatccttacttgggagattgccacagcctgctgctgagttgagttaccagacatcctccatgtgagaagcagcgaacattgaatctcagggatggcccacaactgggtccacatgtaatgagccctgtttaataacgaaggggtgggggagagcagtccgtctacaacctggaatcagatttgcaaaatttcctgcactgctgtctgacactgtcctgttgatgccctttctgactgtgttctctgttttctctgtctgctgtctaaccctgtgccttgcctgggataaggacaatgatgaggttactggtttggattgtaagtagaggacttttattaattggtttagaggttcactgctgctttgtcactttctcaatcaaattggccacttaagaaataaagagctggtagaattgcatcctcagatgattattgactgtgtgtgtgtgtgaaaacagacattccagtgccacccaaatatatatctgtaacgtgcccaagaaatcctagctgcgctcttgagagtgcatgccatggagactggtttagacaccgcgtggagcctagttgcctgttgtcacggcatcttgcactttaggagactaagaccgtcctggttcgtctgtgtgtggtgtgaccaatggtgtgcccagagcactactctcaaaatcactagtgttagcaagtcgtcccgggctggggagcgttcgccgtagtctttggaagctttggctttagatttaccaagccccgcctccccgctgccagtgccctgctctcccgttcgcctctttctgtttctgtgtgaactttcccggtaatatcactcgttaaataggttttctttaaacttaattaaggaaaaactatttaaaggtaaaggatattttgttgacatcggtggctcgatcatccttaagcaactgaagttaaaattgttgaaggaaaaggcacttaaattggttactttcatgtccagctgtatataagtccagtgtgttcatctagatgacgcaaagaatctcctggtagagaagcgacatgtaaaaaactggtggaaaaaggttttggattttttttccagtggggtggggggagggcaagctggatttacaggtcacggctggactgaatgggcctttttatcttcccactgtatcatggaagtagctgcttgcttgtactgtccatccttcaggcatccctaaagctcactctgaagatgttagagacaaacacaaactcttcgagttaaagttgatcctgacactgacatgaaggcaagccttgatttcgtatgaacgttgctgaagtggtaattgaggaaaacagttccccagattgttaagagttcactgaagatattgacacaattttaaaaaatcagtaaaggaatgtatataatattgctctcgtgttttacagtaagatttgttgctctcagactgtgtaaaacaaaatttattcatgttttctgcatattaaaaaatcttattgtaccaactggtaaaccg

SEQ ID NO: 38 - protein, 409 aa, Homo sapiens
  ref <308>: DATABASE ACCESSION NUMBER: SWISS-Prot / P43034
  ref <309>: DATABASE ENTRY DATE: 2002-06-15
VLSQRQRDELNRAIADYLRSNGYEEAYSVFKKEAELDVNEELDKKYAGLLEKKWTSVIRLQKKVMELESKLNEAKEEFTSGGPLGQKRDPKEWIPRPPEKYALSGHRSPVTRVIFHPVFSVMVSASEDATIKVWDYETGDFERTLKGHTDSVQDISFDHSGKLLASCSADMTIKLWDFQGFECIRTMHGHDHNVSSVAIMPNGDHIVSASRDKTIKMWEVQTGYCVKTFTGHREWVRMVRPNQDGTLIASCSNDQTVRVWVVATKECKAELREHEHVVECISWAPESSYSSISEATGSETKKSGKPGPFLLSGSRDKTIKMWDVSTGMCLMTLVGHDNWVRGVLFHSGGKFILSCADDKTLRVWDYKNKRCMKTLNAHEHFVTSLDFHKTAPYVVTGSVDQTVKVWECR

SEQ ID NO: 39 - DNA, 481 bp, Rattus norvegicus
  ref <308>: DATABASE ACCESSION NUMBER: EMBL / AA933181
  ref <309>: DATABASE ENTRY DATE: 2000-03-03
gcacgaggcgagtcctgtgctgccgagcggatcccagtgtgcggcggcacgcggctgtggcggcggcggcggcgcctccagggctccggctccggctcctgctgttgctcctctcggccgcggcactgatccccacaggtgatgggcagaatctgtttactaaggacgtgacggtgattgaaggagaagctgcaaccatcagctgtcaagtcaataagagtgatgactccgtgattcagctactgaaccccaacaggcagaccatttacttcagggacttcaggcctttgaaggacagcaggtttcagctgctgaatttttctagcagtgaactcaaagtgtcactgacaaatgtctcaatttcggatgaagggaggtacttctgccagctctacacggaccctccgcagaagttataccaccatcacagttctggtccctccacgtaacttgatgatcgatatccagaaagtcacggcat

SEQ ID NO: 40 - DNA, 1329 bp, Homo sapiens
  ref <308>: DATABASE ACCESSION NUMBER: Refseq / NM_014333
  ref <309>: DATABASE ENTRY DATE: 2002-11-05
atggcgagtgtagtgctgccgagcggatcccagtgtgcggcggcagcggcggcggcggcgcctcccgggctccggctccggcttctgctgttgctcttctccgccgcggcactgatccccacaggtgatgggcagaatctgtttacgaaagacgtgacagtgatcgagggagaggttgcgaccatcagttgccaagtcaataagagtgacgactctgtgattcagctactgaatcccaacaggcagaccatttatttcagggacttcaggcctttgaaggacagcaggtttcagttgctgaatttttctagcagtgaactcaaagtatcattgacaaacgtctcaatttctgatgaaggaagatacttttgccagctctataccgatcccccacaggaaagttacaccaccatcacagtcctggtcccaccacgtaatctgatgatcgatatccagaaagacactgcggtggaaggtgaggagattgaagtcaactgcactgctatggccagcaagccagccacgactatcaggtggttcaaagggaacacagagctaaaaggcaaatcggaggtggaagagtggtcagacatgtacactgtgaccagtcagctgatgctgaaggtgcacaaggaggacgatggggtcccagtgatctgccaggtggagcaccctgcggtcactggaaacctgcagacccagcggtatctagaagtacagtataagcctcaagtgcacattcagatgacttatcctctacaaggcttaacccgggaaggggacgcgcttgagttaacatgtgaagccatcgggaagccccagcctgtgatggtaacttgggtgagagtcgatgatgaaatgcctcaacacgccgtactgtctgggcccaacctgttcatcaataacctaaacaaaacagataatggtacataccgctgtgaagcttcaaacatagtggggaaagctcactcggattatatgctgtatgtatacgatccccccacaactatccctcctcccacaacaaccaccaccaccaccaccaccaccaccaccaccatccttaccatcatcacagattcccgagcaggtgaagaaggctcgatcagggcagtggatcatgccgtgatcggtggcgtcgtggcggtggtggtgttcgccatgctgtgcttgctcatcattctggggcgctattttgccagacacaaaggtacatacttcactcatgaagccaaaggagccgatgacgcagcagacgcagacacagctataatcaatgcagaaggaggacagaacaactccgaagaaaagaaagagtacttcatctag

SEQ ID NO: 41 - protein, 442 aa, Homo sapiens
  ref <308>: DATABASE ACCESSION NUMBER: Refseq / NP_055148
  ref <309>: DATABASE ENTRY DATE: 2002-11-05
MASVVLPSGSQCAAAAAAAAPPGLRLRLLLLLFSAAALIPTGDGQNLFTKDVTVIEGEVATISCQVNKSDDSVIQLLNPNRQTIYFRDFRPLKDSRFQLLNFSSSELKVSLTNVSISDEGRYFCQLYTDPPQESYTTITVLVPPRNLMIDIQKDTAVEGEEIEVNCTAMASKPATTIRWFKGNTELKGKSEVEEWSDMYTVTSQLMLKVHKEDDGVPVICQVEHPAVTGNLQTQRYLEVQYKPQVHIQMTYPLQGLTREGDALELTCEAIGKPQPVMVTWVRVDDEMPQHAVLSGPNLFINNLNKTDNGTYRCEASNIVGKAHSDYMLYVYDPPTTIPPPTTTTTTTTTTTTTILTIITDSRAGEEGSIRAVDHAVIGGVVAVVVFAMLCLLIILGRYFARHKGTYFTHEAKGADDAADADTAIINAEGGQNNSEEKKEYFI

SEQ ID NO: 42 - DNA, 506 bp, Rattus norvegicus
  ref <308>: DATABASE ACCESSION NUMBER: EMBL / AA944073
  ref <309>: DATABASE ENTRY DATE: 2000-03-03
cgtgttagctgttgtttcgacttcgagtacaatccattaacatccgacctccacatttactctcatcacagcagactaacggcaatttcttccctttctttctagagactcctgcgccatgagagcgaagtggaggaagaagagaatgcgcaggctgaagcgcaagagaagaaagatgaggcagaggtccaagtaaaccatcttgtgcacccacgaagcctgcgggagcagaagtaagggatgctgaagcccggaacaagtggatggactgtatgctgctgtcggtaataagtcgcagtagacccggaatgtcacctcgccgagatcagctgggaaagtgactaccttcctcacagccacaacagtcccgctggtcctctgccctggacctttggcattctgggctaattctgtgctcttgtgggcaagtgtaactcgtgtacaagaaaacctcttgctgtcagctgaagagtcaatggaacccactgaggcatatgcattgcggc

SEQ ID NO: 43 - protein, 25 aa, Rattus norvegicus [sequence omitted]

SEQ ID NO: 44 - DNA, 462 bp, Homo sapiens
  ref <308>: DATABASE ACCESSION NUMBER: EMBL / BC014383
  ref <309>: DATABASE ENTRY DATE: 2002-09-02
ggggtctctcggccttagcgccatttttttggaaacctctgcgccatgagagccaagtggaggaagaagcgaatgcgcaggctgaagcgcaaaagaagaaagatgaggcagaggtccaagtaaaccgctagcttgttgcaccgtggaggccacaggagcagaaacatggaatgccagacgctggggatgctggtacaagttgtgggactgcatgctactgtctagagcttgtctcaatggatctagaacttcatcgccctctgatcgccgatcacctctgagacccaccttgctcataaacaaaatgcccatgttggtcctctgccctggacctgtgacattctggactatttctgtgtttatttgtggccgagtgtaacaaccatataataaatcacctcttccgctttttagctgaagaaaaaaaaaaaataaaaaaaaaaaaaaaaaaaaaaaaaaaaa

SEQ ID NO: 45 - protein, 25 aa, Homo sapiens [sequence omitted]

SEQ ID NO: 46 - DNA, 1468 bp, Rattus norvegicus
  ref <308>: DATABASE ACCESSION NUMBER: EMBL / AB000098
  ref <309>: DATABASE ENTRY DATE: 1998-01-15
cgcccgggcaggtgtaccatggcggtctctctcctgctgcggggaggacgaatccgggcgctgaaggctgcccttctcgaggcaaaggtgttccgaggagaactggcttctacagtgcccctgtctacagagtccgagaataataaaaaggcggcaggaccaactagcaagacggaaagtgtgttcaaagatgtggtgggagcagaggagagggccaagctcctagacactcacacagcagcggcactgtccaaaagctcccctccacccagttcttacccatcagtggagaacacaggtggggctgtcgcaggcctgccgctcacagacttgtcaagaaagactttggtagcgtttcctcagaaagttacgcctccaccgcatgcctgggcttctgactcggaggctcggcggcatgtccagaaagtgacgaaagattcatcttcatcttcctcatccagctcctcagattcagactctgatggggaggaacatggctccgacattggtccccgagtggcaagcaaaagcaaggcagggttttccaaacctgaggcttctcgtccctcgaagaacggagcccctaagatcacagtttttgcaaaagagaaggccaaggtgcagaagccacacacagatgtcacctacccagagaagcccctgcagcctaagaagaaagggactttcaccaagcctgtagaagatagtaaagaaatcaggtccaagctcatgacatccaagccacagtccagtgaggttttggagcaaaaaatgaaggaaaaacagcaccagggaaaacggagaccagacaagacaggaaaggaaagcacagagctgtttgaagctgaaggaattttacccggccacaggaaagccagagtttccacacagcccacaaccggaacacaagaggccagcgcagaactccggccagccgctgcccccgagtcgggagctagacaggaagccaaagggccagagctcgaatggaagaccgcttctcccctggtcagaaaagaaagcctggagaagcaggtgccagaagggagcttccaggcggaggaggagacctcaggagatcagacactagggagatattcgaagacagttcctgttgaggagaaaaatacctttggagagagagctggaccacaactggaggggacgttccaggcgccagccggcgaagccccgcccactgatgcaggcccaccccaggaagccccaggcgacacacaggagcccacactggttcccgagtcgagtgacaccaccacctacaagaacctgcagcatcatgagtacaacgcattcaccttcctagacctgaacctggacctctccaagttcaggctgccacagccgtcttcgggacgagagtcgccccggcactgaactcaactcagggtagacccccgtgtggtcccttgaattcttgcctgtgagaataaaagtcagaggcacaaat

SEQ ID NO: 47 - protein, 458 aa, Rattus norvegicus
  ref <308>: DATABASE ACCESSION NUMBER: SWISS-Prot / BAA24351
  ref <309>: DATABASE ENTRY DATE: 2002-10-01
MAVSLLLRGGRIRALKAALLEAKVFRGELASTVPLSTESENNKKAAGPTSKTESVFKDVVGAEERAKLLDTHTAAALSKSSPPPSSYPSVENTGGAVAGLPLTDLSRKTLVAFPQKVTPPPHAWASDSEARRHVQKVTKDSSSSSSSSSSDSDSDGEEHGSDIGPRVASKSKAGFSKPEASRPSKNGAPKITVFAKEKAKVQKPHTDVTYPEKPLQPKKKGTFTKPVEDSKEIRSKLMTSKPQSSEVLEQKMKEKQHQGKRRPDKTGKESTELFEAEGILPGHRKARVSTQPTTGTQEASAELRPAAAPESGARQEAKGPELEWKTASPLVRKESLEKQVPEGSFQAEEETSGDQTLGRYSKTVPVEEKNTFGERAGPQLEGTFQAPAGEAPPTDAGPPQEAPGDTQEPTLVPESSDTTTYKNLQHHEYNAFTFLDLNLDLSKFRLPQPSSGRESPRH

SEQ ID NO: 48 - DNA, 1028 bp, Homo sapiens
  ref <308>: DATABASE ACCESSION NUMBER: EMBL / BF690363
  ref <309>: DATABASE ENTRY DATE: 2000-12-25
aagaacggtggaaggttcatcttcgttaaccgagggccctcagtgtcgaggtgactcccggcctgaggagggctgaggcatcctgaattttggagagttcgaggttgaggtctaagaaggtgtacgtgctgtagtcatgatgctgcaggttcttgtaggtagtgttgtcaaacggctcagcaggcactggggctggctcctgtgtgccgcctcggtcgtcccctggcgcggctgcatcttccatggcctcgcccttggcctcaagcttcagcgctgctgtcttttcatggaaaccgtggttattctcaacaggaactgtctccaaattgcttggtggtatctgatcttccacgattgcctgtccacccttcaggtggccttctattccctgcgtccctgaggtttcctttctgggcaggggaggggccgccttgcgctggggctctggcacgggtttttccagatgcccctctgccgccccaggaggactggcttgcagctgcccctctgctctggcctcttctgccaacacagcaggcgctgggctgcccgttcggtggcgcagactaccctgacttttgtgtggacacggtaagggtcctttggacttcaaatggcttttggctttctttatctatttcagtttaatctactgtcttctgccattgttttcctttaagctttgcttcaagctcttcatctacttgagatctgggcatcgtggtattctggtctcgccatatccctgaccttctgatggcttagcacggacccgttctccttggctggtggagacttcactgatcagtacatggtcacatgcggctcttgcagcaggttttcactttcgctgcatacggaccaccggggggcccgttcaaaggaagaaagccgggtttgaaagcccccgccttgtcacactcggaggaactgaaacagccgatcataagacaggctgcaacaggaacacggatctcttccacacgaacaacgaccgcttaacacaattatacacgacaagcgcataa

SEQ ID NO: 49 - DNA, 1468 bp, Rattus norvegicus; identical to SEQ ID NO: 46
  ref <308>: DATABASE ACCESSION NUMBER: EMBL / AB000098
  ref <309>: DATABASE ENTRY DATE: 1998-01-15

SEQ ID NO: 50 - protein, 458 aa, Rattus norvegicus; identical to SEQ ID NO: 47
  ref <308>: DATABASE ACCESSION NUMBER: SWISS-Prot / BAA24351
  ref <309>: DATABASE ENTRY DATE: 2002-10-01

SEQ ID NO: 51 - DNA, 1028 bp, Homo sapiens; identical to SEQ ID NO: 48
  ref <308>: DATABASE ACCESSION NUMBER: EMBL / BF690363
  ref <309>: DATABASE ENTRY DATE: 2000-12-25

SEQ ID NO: 52 - DNA, 1468 bp, Rattus norvegicus; identical to SEQ ID NO: 46
  ref <308>: DATABASE ACCESSION NUMBER: EMBL / AB000098
  ref <309>: DATABASE ENTRY DATE: 1998-01-15

SEQ ID NO: 53 - protein, 458 aa, Rattus norvegicus; identical to SEQ ID NO: 47
  ref <308>: DATABASE ACCESSION NUMBER: SWISS-Prot / BAA24351
  ref <309>: DATABASE ENTRY DATE: 2002-10-01

SEQ ID NO: 54 - DNA, 1028 bp, Homo sapiens; identical to SEQ ID NO: 48
  ref <308>: DATABASE ACCESSION NUMBER: EMBL / BF690363
  ref <309>: DATABASE ENTRY DATE: 2000-12-25

SEQ ID NO: 55 - DNA, 1468 bp, Rattus norvegicus; identical to SEQ ID NO: 46
  ref <308>: DATABASE ACCESSION NUMBER: EMBL / AB000098
  ref <309>: DATABASE ENTRY DATE: 1998-01-15

SEQ ID NO: 56 - protein, 458 aa, Rattus norvegicus; identical to SEQ ID NO: 47
  ref <308>: DATABASE ACCESSION NUMBER: SWISS-Prot / BAA24351
  ref <309>: DATABASE ENTRY DATE: 2002-10-01

SEQ ID NO: 57 - DNA, 1028 bp, Homo sapiens; identical to SEQ ID NO: 48
  ref <308>: DATABASE ACCESSION NUMBER: EMBL / BF690363
  ref <309>: DATABASE ENTRY DATE: 2000-12-25

SEQ ID NO: 58 - DNA, 4514 bp, Rattus norvegicus
  ref <308>: DATABASE ACCESSION NUMBER: EMBL / AB000216
  ref <309>: DATABASE ENTRY DATE: 1997-05-29
tgaagtttgtggagcgctttctcaccggctggtccgggacgatagccggcgcctcgctcttcggtgaccgccccattctctcgggattccttctctgtggtgacggacgctctagacgctcggtaagggaagctgaggctggcggcgggagttcagaggaggagcgcggagaggttgctcgctgacagcggcgcggctggacgcggacggcgtcgggctctggccggctgagagcttcgcccaccttccccgcggcctgtgcgcaggcgatgctgcggccccgaggcgcggcgcggcgagcagggagggcgcctccgagagcctagagctggtttccgtcctcttccccggggcaagtgggcatggaacagtgagagcccctcgctcggcgaggccgcgcgcggaggctccccatggccgggacgtacagctccacattgaagactctggaggacttgaccttggactccgggtatggggccggcgactcctgccgctcgctcagcctttcgtcttccaagtccaactcgcaggcgctcaactcttcggcgccgcagcaccgcggggcggcctggtggtgctactccggctccatgaacagccgccacaacagctgggacaccgtgaacacagtgctgcccgaggatcccgaagtggccgacctcttctcgcgctgcccgcggctcccggagctagaggagttcccttggaccgagggagacgtggctcgggtgctccgcaaaagcgtcggcggccggaggctgccctcattctccgccgaggctgtgaggcgcttggccggactcctccgccgggcgctcatccgcgtggcccgggaggcgcagcgcctaagcgtgctgcacgccaagtgtacccgcttcgaggtgcagagtgcggtgcgcctggtgcacagctgggcgctggccgagagctgcgcgctggcagcggtcaaggcgttgtccctctatagcatgagcgctggcgatgggctgcgccgcggcaagtcggcacgctgcggcctcactttctccgtgggccgtttcttccgttggatggtggacactcgcatctccgtgcgcatccatgagtatgcggccatctcgcttacggcttgcatggagaacttggtggaggagatccgggctagggtcctggcgagtcagagccctgatggcggaggggcaggaggcggagaggtatccgctgaggccttggagatggtcatcaacaacgatgccgagctctggggagtcctgcaaccctatgagcatctcatctgcggcaagaacgccaatggtgtcctctccctccctgcctacttcagtccctacaatggtgggtccctgggccatgatgagcgagcagatgcctatgctcagctggagcttcggacactggagcagtcactcctggctacctgtgtgggcagcatctccgagctgagtgatctggtctctcgagccatgcaccacatgcaggggcgccaccctctgtgcccaggcaccagccctgctcgccaggcccgccagccaccacagcccatcacatggtcccccgatgctctccatacactctactacttcctgagatgtccacagatggagtccatggagaaccccaacctggatcccccaagaatgaccctgaataatgaacggcccttcatgctgctgccaccactgatggagtggatgcgggtggcaatcacctatgcagaacaccgtcgcagcctcactgtggacagtggcgatatccggcaggcagcccggctgctgctaccaggcctggactgcgagccccgccagctcaaacccgagtgctgcttcagttccttccggaggctggacgctcgagctgctactgaacgcttcaaccaggacctgggcttccgcatgctcaactgtgggagaacagacctcatcagccagccatcgagccctgggccagacggggtgaacacaatggatgaccagggtctgacaccgctaatgtacgcctgtgctactggggatgaagccatggtccagatgctcatcgatgctggagcaaacttggatatccaggtcccaagcaactctcccaggcatccttctgtccatccagacagcaggcactggacctccctgacattcgcggtgctgcacggacacatctctgtagtgcagctgctacttgatgctggtgcccatgtggagggctcggccgtgaacagtggggaggacagctatgccgagacaccccttcagctggcctctgcagccgggaactatgagctggtgagcttgctactgagccgaggtgccgaccccctcctcagcatgctggaagccaatggcatggcttcttccctccatgaggatatgaactgcttcagccactcagctgcccatggccacaggaatgtcttgaggaagctcctgactcagccacagcaggctaaagcagatgtgctgtccctagaagagatcttggctgagggcgtggaggaaagcgacacatcgagccagggcagtagcgaggggcctgtgaggttaagccggacccgaacgaaggccctgcaggaagccatgtactacagtgctgaacacggctacgtggacatcacgatggagctgagggcactaggtgtcccctggaagctgcacatctggatagagtctctgcggacctctttctcacagtcacggtactcggtggtgcagggcctcctgagagatttcagctccatcaaggaggaggagtacaatgaggagctggtgacagaaggcttgcagctcatgtttgacatcctcaagaccagcaaaaatgactccgtcctccagcagctggccaccatcttcactcactgctatggcaccagccccatccccagcatcccggagatccggaagaccctgccagccaggctagatcctcactttctgaacaacaaggagatgtctgatgtaaccttcctcgtggaaggaaagctgttttatgcacacaaagtccttttggtgacagcatctaacaggttcaaaaccttaatgaccaataagtcagagcaagatggggacaacagcaaaaccattgagatcagcgacatcaagtaccacatctttcagatgctgatgcagtacctgtactatggaggaacagagtccatggagatccccacggctgacatcctgcagctcctgtcagctgccaacctgttccagctagatgccctgcagagacactgtgagatcctgtgctcccagacccttagtgtggagagtgctgtcaacacctacaaatacgccaagatccacaacgccccagagctggccctcttctgtgaaggcttcttcctcaagcacatgaaggccctgctggagcagatgccttccggcagctcatctatggccgaagcagcaaagtccagggcctggacccactgcaggatctgcagagcaccctagctgagcgagtacattctgtctacgtcacctcccgggtgtgagccagggtggatggtgactgctatctgagggtgtacaaaggtctgttaaagccagaaaccaccagcgacacccccagtggagggaggcttgtaggccttctggggtaggctctcggggggtacgtcctgctcttcccctagattaccctctgtggtgttgactgatcctgaggtggaaggagagtccacttcactgttgctcggccagtaactggcaggggtgtgacgtaattgcaccctgagggctaccctgtgccctctcccctccagtggctcagcgtcgagccgatccacctcagcaccagccatcctggctggggatgttaggatcacaggcattcttatgaatgtagaaagtgtccgagcccaggccactgggtgcaggagccgctatgtttggtttcctaacagagagaggctaagtcctgccctccaagctgtgcctttgaaagggctgggccctgttggtgaaaaccagacctccagtgccctccctacaagactactaacgagagtctgaactgggaatccctgagcaccgggtatgctgggctacaggagctggcagccacaggaggcccagccccatcatgtctgtaggctgaggcagcagggcttcaatggcctcaagtgcagggcgccttccactcagggctggggtgcaagagcacacttctcacctgggttccgtgactctggggcatgaacggacagggccttggtggaagagaagctgtgtcctctcccctcctgtcctcagtcttggctccccatcctctgacctgtttgtggacagacgctgggacacgatcaagaacagctaccttagaaactatttattcatcagaagcccccagggcttgcaatcctggaacaatattttcaacttgctgcttgtgctggatgtacaaaagaatgaatggtattttattgctgtaatattgtatgatactgtaactataccttaatgttgttacttactgtaaatgtactatggttttatcaacaataaacactcattaacattgac

SEQ ID NO: 59 - protein, 1009 aa, Rattus norvegicus
  ref <308>: DATABASE ACCESSION NUMBER: SWISS-Prot / BAA19969
  ref <309>: DATABASE ENTRY DATE: 2003-02-01
MAGTYSSTLKTLEDLTLDSGYGAGDSCRSLSLSSSKSNSQALNSSAPQHRGAAWWCYSGSMNSRHNSWDTVNTVLPEDPEVADLFSRCPRLPELEEFPWTEGDVARVLRKSVGGRRLPSFSAEAVRRLAGLLRRALIRVAREAQRLSVLHAKCTRFEVQSAVRLVHSWALAESCALAAVKALSLYSMSAGDGLRRGKSARCGLTFSVGRFFRWMVDTRISVRIHEYAAISLTACMENLVEEIRARVLASQSPDGGGAGGGEVSAEALEMVINNDAELWGVLQPYEHLICGKNANGVLSLPAYFSPYNGGSLGHDERADAYAQLELRTLEQSLLATCVGSISELSDLVSRAMHHMQGRHPLCPGTSPARQARQPPQPITWSPDALHTLYYFLRCPQMESMENPNLDPPRMTLNNERPFMLLPPLMEWMRVAITYAEHRRSLTVDSGDIRQAARLLLPGLDCEPRQLKPECCFSSFRRLDARAATERFNQDLGFRMLNCGRTDLISQPSSPGPDGVNTMDDQGLTPLMYACATGDEAMVQMLIDAGANLDIQVPSNSPRHPSVHPDSRHWTSLTFAVLHGHISVVQLLLDAGAHVEGSAVNSGEDSYAETPLQLASAAGNYELVSLLLSRGADPLLSMLEANGMASSLHEDMNCFSHSAAHGHRNVLRKLLTQPQQAKADVLSLEEILAEGVEESDTSSQGSSEGPVRLSRTRTKALQEAMYYSAEHGYVDITMELRALGVPWKLHIWIESLRTSFSQSRYSVVQGLLRDFSSIKEEEYNEELVTEGLQLMFDILKTSKNDSVLQQLATIFTHCYGTSPIPSIPEIRKTLPARLDPHFLNNKEMSDVTFLVEGKLFYAHKVLLVTASNRFKTLMTNKSEQDGDNSKTIEISDIKYHIFQMLMQYLYYGGTESMEIPTADILQLLSAANLFQLDALQRHCEILCSQTLSVESAVNTYKYAKIHNAPELALFCEGFFLKHMKALLEQMPSGSSSMAEAAKSRAWTHCRICRAP

SEQ ID NO: 60 - DNA, 313 bp, Homo sapiens
  ref <308>: DATABASE ACCESSION NUMBER: EMBL / AA281565
  ref <309>: DATABASE ENTRY DATE: 2000-03-03
caatgttaatgagtgtttattgttgataaaaccatagcacatttacagtaagtaacaacattaaggtatagttacagtattatacaatattacagcaataaaataccattcattcctttgtacatcccgcacaagcagcaagttgaaaatatctttccaggattgcaagccctggggcgttctgatgaataaatagtttctaaggtagctgttcttgatgctgtcccagcatctgtccacaaacaggccagaggatggggagccaagactgaggacaggatgggaggggacatagcttctcttccaccgaggc

SEQ ID NO: 61 - protein, 294 aa, Homo sapiens
  ref <308>: DATABASE ACCESSION NUMBER: SWISS-Prot / CAB45239
  ref <309>: DATABASE ENTRY DATE: 2001-06-01
MAGTYSSTLKTLEDLTLDSGYGAGDSCRSLSLSSSKSNSQALNSSAQQHRGAAWWCYSGSMNSRHNSWDTVNTVLPEDPEVADLFSRCPRLPELEEFPWTEGDVARVLRKGAGGRRLPQFSAEAVRRLAGLLRRALIRVAREAQRLSVLHAKCTRFEVQSAVRLVHSWALAESCALAAVKALSLYSMSAGDGLRRGKSARCGLTFSVGRFFRWMVDTRISVRIHEYAAISLTACMENLVEEIRARVMASHSPDGGGAGGGEVSAEALEMVINNDAELWGVLQPYEHLICGKNAN

SEQ ID NO: 62 - DNA, 2138 bp, Rattus norvegicus
  ref <308>: DATABASE ACCESSION NUMBER: EMBL / AB000929
  ref <309>: DATABASE ENTRY DATE: 1999-01-21
cctggaggtatcttccaacatggctaggtggcagagagtctactggttgcgttctctcttcttcgcccttgtgacttcagtaaattcattaagccttcctcagtcagagaatcctgccttcccaggcactctcatttgtgataaagatgaagtgagagtagaattttcaagcagatttgacatggaaaagtggaatccttccttggtggatacctttggtaatgaaatttcgaactgcacttatgctctggacttggaaaagtttatcctgaaattcccttacgagacctgtactataaaagtgattggtggataccaggtgaacatcagagtgcaggacaccaatgctgatgtaagctataaagatgacgtgcatcactttttctgcccagctattcaagcagagattcatgaggtctcagaaattgttgtctgcatggaggatctcatatctttttctttcccacaacttttctctaggcttgctgatgaaaatcagaatgtatctgagatgggatggattattaagattggcaatggtacaagagtccacactctgcccctgaaggatgctatagtacaaggatttaatctcctgattgacagccagaaaataaccctccatgtgccagccaatgctaccggagtagctcactatgtgcaagagagcagctatctctatactgtacagctgaagctcttgttctcaagtcctgggcagaagatcaccttctcttcacaagctatctgtgcaccagatctttctgtggcttgtaatgtgacacacatgagtcttactataccagaatttcctgggaagctaaaatctgtgggctttggacaaaggaacatccctgaggatcaatggcatgccaatggaattgacaaagaagcaacaaatggcttgagactgcatttcagaaaatctctcttgaagacaaaaccctctgaaaagtgtccattctaccagttctacttctcttcactcgagctgacctttaacttccaaggggacatgctatccacagtgattgatcccgagtgccactgtgagtcaccggtctccatagatgaactgtgtacacgggatgggtttatggactttgaggtctacagccaccaaacaaaacctgcactaaacctggagagcctcctggtgggaaactcctcctgccagcctattttcaaggttcagtctctggggcttgcaagatttcacatacctctgaatggatgtggaacacgacagaaatttgaaggtgataaagtcatctatgagaatgaaatccatgctctctgggaaaatccaccgtcaaacattattttcagaaacagtgagttcaggatgaccgtgagatgccattacatcagagacagtatgctactaagggcccatatcaaaagccattcttctccagtggcctctgtaaagccaggtccactagcgttggtcctacaaacctacccagacatatcctaccaacggccttataggaagaatgagtaccctctagtgaggtacctccgccagcccatctacatggaagtgacagtcttgaatagaaatgatcccaacatcaagctggttttagatgactgctgggcaacaacttttgaggacccagcctctgtcccccagtggcagatcattatggatggctgtgaatatgaactggacaattaccgcactactttccacgcagccaactcctctgcagcccattctggtcactaccagaggtttgatgtgaagacttttgcctttgtgtcagagtctcgggggctctccagcctgatctacttccactgcagtgccttgatctgtaaccaagcctcccctctgtgctctgtgacttgccctgcaccactgaggaacaaacgagaggccagcaaagaaggcacaatgacggttagcctcccaggacctattatcttgttgtcagatgactcttcatccaaaggtgtaatgaaccctgacagctatgagattaccaaagatattgcttctaaaacattgggtgctgtggctgcactagtgggctcagcagtcatcataggtttcatctgttacctgcataagaaaagaattgtaaggttcaattcctgattggacttttgcaaataaaagaggctgcagt

SEQ ID NO: 63 - protein, 695 aa, Rattus norvegicus
  ref <308>: DATABASE ACCESSION NUMBER: SWISS-Prot / BAA24487
  ref <309>: DATABASE ENTRY DATE: 2003-02-01
MARWQRVYWLRSLFFALVTSVNSLSLPQSENPAFPGTLICDKDEVRVEFSSRFDMEKWNPSLVDTFGNEISNCTYALDLEKFILKFPYETCTIKVIGGYQVNIRVQDTNADVSYKDDVHHFFCPAIQAEIHEVSEIVVCMEDLISFSFPQLFSRLADENQNVSEMGWIIKIGNGTRVHTLPLKDAIVQGFNLLIDSQKITLHVPANATGVAHYVQESSYLYTVQLKLLFSSPGQKITFSSQAICAPDLSVACNVTHMSLTIPEFPGKLKSVGFGQRNIPEDQWHANGIDKEATNGLRLHFRKSLLKTKPSEKCPFYQFYFSSLELTFNFQGDMLSTVIDPECHCESPVSIDELCTRDGFMDFEVYSHQTKPALNLESLLVGNSSCQPIFKVQSLGLARFHIPLNGCGTRQKFEGDKVIYENEIHALWENPPSNIIFRNSEFRMTVRCHYIRDSMLLRAHIKSHSSPVASVKPGPLALVLQTYPDISYQRPYRKNEYPLVRYLRQPIYMEVTVLNRNDPNIKLVLDDCWATTFEDPASVPQWQIIMDGCEYELDNYRTTFHAANSSAAHSGHYQRFDVKTFAFVSESRGLSSLIYFHCSALICNQASPLCSVTCPAPLRNKREASKEGTMTVSLPGPIILLSDDSSSKGVMNPDSYEITKDIASKTLGAVAALVGSAVIIGFICYLHKKRIVRFNS

SEQ ID NO: 64 - DNA, 2266 bp, Homo sapiens
  ref <308>: DATABASE ACCESSION NUMBER: EMBL / M90366
  ref <309>: DATABASE ENTRY DATE: 1999-07-02
atggcgtgcaggcagagaggaggctcttggagtccctcaggctggttcaatgcaggctggagcacctacaggtcgatttctctcttcttcgcccttgtgacttcagggaactccatagatgtttctcagttggtaaatcctgcctttccaggcactgtcacttgcgatgaaagggaaataacagtggagttcccaagcagtcctggcaccaagaaatggcatgcatctgtggtggatcctcttggtctcgacatgccgaactgcacttacatcctggacccagaaaagctcaccctgagggctacctatgataactgtaccaggagagtgcatggtggacaccagatgaccatcagagtcatgaacaacagtgctgccttaagacacggagctgtcatgtatcagttcttctgtccagctatgcaagtagaagagacccaggggctttcagcatctacaatctgccagaaggatttcatgtctttttccttgccacgggtcttctctggcttggctgacgacagtaaggggaccaaagttcagatgggatggagcattgaggttggtgatggtgcaagagccaaaactctgaccctgccagaggccatgaaggaaggcttcagcctcttgattgacaaccacaggatgaccttccatgtgccattcaatgccactggagtgactcactatgtgcaaggtaacagtcatctctacatggtgtctctgaagcttacatttatatctcctggacagaaggtgatcttctcttcacaagctatttgtgcaccagatcctgtgacctgcaatgccacacacatgactctcaccataccagagtttcctgggaagcttaagtctgtgagctttgaaaaccagaacattgatgtgagccagctgcatgacaatggaattgatctagaagcaacaaatggcatgaaattgcatttcagcaaaactctgctcaaaacgaaattatctgaaaaatgcctactccatcagttctacttagcttcactcaagctgacctttctccttcggccagagacagtatccatggtgatctatcctgagtgtctctgtgagtcacccgtttctatagttacaggggagctgtgcacccaggatgggtttatggacgtcgaggtctacagctaccaaacacaaccagctcttgacctgggtactctgagggtgggaaactcatcctgccagcctgtctttgaggctcagtctcaggggctggtacggttccacatacccctgaatggatgtggaacgagatataagttcgaagatgataaagtcgtctatgaaaacgaaatacatgctctctggacggattttcctccaagcaaaatatctagagacagtgagttcagaatgacagtgaagtgttcttatagcaggaatgacatgctactaaacatcaacgttgaaagccttactcctccagtggcctcagtgaagttgggtccatttaccttgatcctgcaaagctacccagataattcctaccaacaaccttatggggaaaacgagtaccctctagtgagattcctccgccaaccaatttacatggaagtgagagtcctaaacagggatgaccccaacatcaagctggtcttagatgactgctgggcgacgtccaccatggatccagactctttcccccagtggaacgttgtcgtggatggctgtgcatatgacctggacaactaccagaccaccttccatccagtcggctcctctgtgacccatcctgatcactatcagaggtttgacatgaaggcttttgcctttgtatcagaagcccacgtgctctctagcctggtctacttccactgcagtgccttaatctgtaatcgactctcccctgactccccactgtgttctgtgacctgccctgtgtcctctaggcacaggcgagccacaggggccactgaagcagagaaaatgacagtcagcctcccaggacccattctcctgttgtcagatgactcctcattcagaggtgtcggctcatctgatctaaaagcaagtgggagcagtggggagaagagtaggagtgaaacaggggaggaggttggctcacgaggtgctatggacaccaaagggcacaagactgctggagatgttggttccaaagctgtggctgctgtggctgcctttgcaggtgtggtggcaactctaggcttcatctactacctgtacgagaaaaggactgtgtcaaatcactaaatgggcttctaaataaagcagtcaaaat

SEQ ID NO: 65 - protein, 745 aa, Homo sapiens
  ref <308>: DATABASE ACCESSION NUMBER: SWISS-Prot / Q05996
  ref <309>: DATABASE ENTRY DATE: 2001-10-16
MACRQRGGSWSPSGWFNAGWSTYRSISLFFALVTSGNSIDVSQLVNPAFPGTVTCDEREITVEFPSSPGTKKWHASVVDPLGLDMPNCTYILDPEKLTLRATYDNCTRRVHGGHQMTIRVMNNSAALRHGAVMYQFFCPAMQVEETQGLSASTICQKDFMSFSLPRVFSGLADDSKGTKVQMGWSIEVGDGARAKTLTLPEAMKEGFSLLIDNHRMTFHVPFNATGVTHYVQGNSHLYMVSLKLTFISPGQKVIFSSQAICAPDPVTCNATHMTLTIPEFPGKLKSVSFENQNIDVSQLHDNGIDLEATNGMKLHFSKTLLKTKLSEKCLLHQFYLASLKLTFLLRPETVSMVIYPECLCESPVSIVTGELCTQDGFMDVEVYSYQTQPALDLGTLRVGNSSCQPVFEAQSQGLVRFHIPLNGCGTRYKFEDDKVVYENEIHALWTDFPPSKISRDSEFRMTVKCSYSRNDMLLNINVESLTPPVASVKLGPFTLILQSYPDNSYQQPYGENEYPLVRFLRQPIYMEVRVLNRDDPNIKLVLDDCWATSTMDPDSFPQWNVVVDGCAYDLDNYQTTFHPVGSSVTHPDHYQRFDMKAFAFVSEAHVLSSLVYFHCSALICNRLSPDSPLCSVTCPVSSRHRRATGATEAEKMTVSLPGPILLLSDDSSFRGVGSSDLKASGSSGEKSRSETGEEVGSRGAMDTKGHKTAGDVGSKAVAAVAAFAGVVATLGFIYYLYEKRTVSNH

SEQ ID NO: 66 - DNA, 2347 bp, Rattus norvegicus
  ref <308>: DATABASE ACCESSION NUMBER: EMBL / AB002111
  ref <309>: DATABASE ENTRY DATE: 1998-07-13
ggagcttctgtttccgggtacggtttctgtcacaaagccgagccctcctttcgcaggtggcgtcacgggtcctctgctccgtgcccgaggtcagcaagcaaggacgggcgcttcccagccagccaccggagccgggcctcgcagctctgggactgcagctcgagcgacacgttccttggcccacacctatctccgagtcacgctctgccctgtgaggtgccatgcagaaggactaagactcagcacccgtttgatacaaaacaagttcatgctccctagagtgttcgtgggaaaagtaaatcccagtacacacaagacactatggctgagcatggggctcatatcacaactgcttcggtggcggacgaccagccatccatctttgaggtggtagcacaggacagtttaatgacagcagtgagacccgctcttcagcatgtggtcaaggttcttgcagaatcaaatcctgcgcactatggcttcttttggaggtggtttgatgaaatcttcactctgctagactttctgctccagcagcattatctttctagaactagtgcctcattttctgaacacttttatgggttaaagcggattgtagcggggagctcgccgcagcttcagagaccagccagtgctggcctccccaaggaacacctctggaaatccgctatgttccttgttcttcttccctatctgaaagtgaagctggagaagctggcttctaccttgagagaagaagacgaatactctattcaccccccttcttctcactggaaacgattctacagagtcttcctggctgcctacccgtttgttaccatgacctgggaaggctggttccttacacaacaacttcggtacatattgggaaaagctgagcatcactctcccctgctgaaactggctggagttcggctaggtcgactgacagctcaggacatacaagctatggaacacagactggttgaagccagtgcaatgcaggagcccgtcagaagcattggtaagaagataaagtcagcactgaagaaagctgtgggaggtgttgccttatccctctctactggcctctctgtgggtgtattcttcctgcagtttcttgactggtggtactcttctgagaaccaagagaccatcaagtcactgactgccctgcccactccaccaccacctgtgcacctcgactacaactctgattctcccctcttacccaaaatgaaaacagtgtgcccactgtgtcgtaaagctcgggtcaatgatacggttcttgccacctctggctatgtattctgttaccgctgtgtgtttaattatgtgagaagtcaccaagcctgtcccattacagggtatccaacggaagtccagcatctaattaaactctactctccagagaactgaaagagagattagtgtattctctcacagctcaagttctatactataggaccacaagatggttttagtatggcaatcaacaatgattcataactacattaacttttagtagttatatggatttctttaaaaggatatatccacttggtcctaaccttatggtttgctctctaccaagctgtttaagcaggagaatcaggattgtaggtggtgtgagggcccatgtggaggtgggttataaaagaccacctcacttaagagtaaggttttaagttgtggtagtgtagtgtcagcactctggagatggaggcgggagtttgagttcaaggccaccaaagggggagtgtcaaaagtaaaatgaaagtaagagactgattaagagggataaaatagcataggaaaccccaggttagatcttacaaagcaagtggtttgggaagcaggccttctctttagaaaacatttctctacttttgaagtagaggctttatcagacacggactttctctttatagaaatatctataaaccctttagagaaaagccccctccatctatcatgacttactaacatctaccacagtttatcagtatttgaagatttccttcatgatccatacctgcctgtctagggaagggtttgtttatggggcggagtctggaaatttcaatatgaataaaaactagcaatggtgagatgcagtaaaatctttatctaatgtttacctgatgcctacctaatagatatctaatgagtaaaagctttctgcttgctcttatgagtttgctcagttgataggaatcatgctaggtattatgaaagtttctatgaaacatttaattaaattttaacaatacatgattctaggaaagaattgttccatgctgtcatgattatgtggaaactcaaaagatcacttcaggagtttaaataaatttttattcagatc

SEQ ID NO: 67 - protein, 359 aa, Rattus norvegicus
  ref <308>: DATABASE ACCESSION NUMBER: SWISS-Prot / O88177
  ref <309>: DATABASE ENTRY DATE: 2001-10-16
MAEHGAHITTASVADDQPSIFEVVAQDSLMTAVRPALQHVVKVLAESNPAHYGFFWRWFDEIFTLLDFLLQQHYLSRTSASFSEHFYGLKRIVAGSSPQLQRPASAGLPKEHLWKSAMFLVLLPYLKVKLEKLASTLREEDEYSIHPPSSHWKRFYRVFLAAYPFVTMTWEGWFLTQQLRYILGKAEHHSPLLKLAGVRLGRLTAQDIQAMEHRLVEASAMQEPVRSIGKKIKSALKKAVGGVALSLSTGLSVGVFFLQFLDWWYSSENQETIKSLTALPTPPPPVHLDYNSDSPLLPKMKTVCPLCRKARVNDTVLATSGYVFCYRCVFNYVRSHQACPITGYPTEVQHLIKLYSPEN

SEQ ID NO: 68 - DNA, 2609 bp, Homo sapiens
  ref <308>: DATABASE ACCESSION NUMBER: EMBL / U91521
  ref <309>: DATABASE ENTRY DATE: 2000-03-04
cgcccgggcaggtctcccttcaaacgtggcgtcgtgggttgtttgcgcctcgcctggggtcagcgagcaaggacgggcgcgggcggggatactcaaagccaacagctggagtcagccctcgtgtcccgggctcacagtggcacgactgaatcctcagagtcggctggcttttgagctctcacgattggggaggagggggcgtttctggttcgcagctccagaggattgcgttccttcccccatacctgtcccccacagtcacgctctgccctgacgtgcagcatttgacaagttaccccctcgccacatactacttccacccacgtccgagttaactttgttcttaaccttcttgagactaccctcggcctccaggtctttttttcccagttcatttttgcccataagattgagtttcgagtttcagatatcatgcagaaagtttacctttaagactgagcacccatctgatactcttcctcccgaaaaagttcatgctcacgagagagtttgtgggaaaagtgaaagccagtacacgcaggaaactatggctgagcacggggctcacttcacagctgcttctgtggccgatgaccagccatccatctttgaggtggtagcacaggacagtttaatgacagcagtgagacccgctcttcagcatgtggtcaaggttcttgcagaatcaaatcccacccactatggcttcttgtggaggtggtttgatgaaatctttactctgctagatcttctgctccagcaacattatctgtctagaaccagtgcctcattttctgaaaacttttacggcttaaagagaattgtaatgggggacactcacaagtctcagagattggctagtgctggtctcccaaagcagcagctttggaaatctattatgttcctggttcttcttccctatctgaaagtgaagctggagaagctggtttctagcctgagagaagaggatgaatattctattcatcccccttcttcccgctggaaacgattttacagagctttcctggcagcctacccatttgtgaacatggcctgggaaggatggtttcttgtacaacaacttcgatacatcctaggaaaagctcagcatcactcaccactgctgaggctggctggagttcagctaggtcgactgacagttcaggatatacaagctctggagcacaaaccagctaaggccagcatgatgcagcaaccagccaggagtgttagtgagaagataaactcagctctgaagaaagctgttgggggtgttgccttatccctgtctactggcctttctgtgggtgtattcttcttgcagttccttgactggtggtactcatctgaaaatcaagaaaccatcaagtcattgactgccctgcctactccaccaccacctgtacacctagactataactctgattctcccctcttacccaaaatgaagactgtgtgcccactgtgtcgtaaaacccgggtgaatgatactgttcttgccacctctggctatgtgttttgttaccgctgtgtgtttcattatgtgaggagtcaccaagcttgtcccatcacaggttatccaacagaagtacaacatctgattaaactctactcccctgagaactgaaagggaatcatgtcttatcctcacaacaaaagtattgcgctgtaatgtcacagagctggtttcagcatggtattgagttgacacttctcagcctcaattcataactatatgaactttaaatgattatatggatttctttaaaaggatatgcccatttgatcctaaccttttagcctgctctctagaaccctacttacagttgaccaagctgcttaaagtagaaggatcaggactggcaggggatatgagggccagtgtagagattaaacagaataatgagtacacaagtttttgcctatccctttccttaaaatataagaaataaaggagctcttacgaaaaacccaggttagaccgcataaaaaataaagtgaacagtgaggtggtagcaagacttctttttagaaaagaaagcatttacctgcctgtctgtaaggtggaaatttcatcagtttgcaaacgataagaaatgcagacttgctcttgatagaaatgcttagaaacactctgggggggaaaaaagctccttccatatactgtgagacatttgttaagtgacatctattgtttatcagcttttaaggataaaaaaggtattttaaaagttggatatttaggatatttgaggatattcctttatgagctctccatatccttcttgagaaactggttaaaaaaggaataggggtagagtgttacagagagtagtctgaagattcctgtgtaaaagcaaagctaacaagcaatgaagacatgaagcaaaatactaatctaattgtgtaaagaaaggatattttaataagttctttctgcttgctgctaagagtttgctaaagtgtcatgaattattctggttattactaaagtttctatgaaacaagtagattttaagaataaatgtttctggaaaaggactatgttatgattttgtagaaatgtaaagattacttgaggtgtttaaaataaatttttcattcagact

SEQ ID NO: 69 - protein, 359 aa, Homo sapiens
  ref <308>: DATABASE ACCESSION NUMBER: SWISS-Prot / O00623
  ref <309>: DATABASE ENTRY DATE: 2002-06-15
MAEHGAHFTAASVADDQPSIFEVVAQDSLMTAVRPALQHVVKVLAESNPTHYGFLWRWFDEIFTLLDLLLQQHYLSRTSASFSENFYGLKRIVMGDTHKSQRLASAGLPKQQLWKSIMFLVLLPYLKVKLEKLVSSLREEDEYSIHPPSSRWKRFYRAFLAAYPFVNMAWEGWFLVQQLRYILGKAQHHSPLLRLAGVQLGRLTVQDIQALEHKPAKASMMQQPARSVSEKINSALKKAVGGVALSLSTGLSVGVFFLQFLDWWYSSENQETIKSLTALPTPPPPVHLDYNSDSPLLPKMKTVCPLCRKTRVNDTVLATSGYVFCYRCVFHYVRSHQACPITGYPTEVQHLIKLYSPEN

SEQ ID NO: 70 - DNA, 975 bp, Rattus norvegicus
  ref <308>: DATABASE ACCESSION NUMBER: EMBL / AB003515
  ref <309>: DATABASE ENTRY DATE: 1997-05-20
cccgcctgccgagtagtcgtcgctgccgccgccgcctccgttgttgttgtggtcgcttcgccgaagtctgcggctcaaagagccggctccgtcgcttcccgccgccatgaagtggatgtttaaggaggaccactcgctggaacacagatgcgtggaatccgcgaagatcagagcgaaataccccgaccgggttccggtgatcgttgagaaagtctctggctctcagattgttgacattgacaagaggaagtacttggtcccatctgacatcactgtggctcagttcatgtggatcatcaggaaaaggatccagcttccttctgagaaggccatcttcttgtttgtggacaagacagtcccacagtccagcctaactatgggacagctttacgagaaggaaaaagatgaagatggattcttgtatgtggcctacagcggagagaacacttttggcttctgagcccttgctgggctaggtgcacccttcctgcttgtgtatcctgtaaataactggctgttctcagttactccgccggagcctccacacagacctactagtgcatttgtaactggatttatttcttaatatattggaaggttttgttttccttagattagtaaattatcatacagagttttattttcagttttcttttgtgcactgtcctcatggctatatgctccaaggaacctgtcctccggaatcacatttaatgaagatacttccgaaatgaagggcggtaggtgtggtattaaagtgacaaggagggatgacgcattgttctggattatgttcggagtgttagacggctaagtattaaaagcccccaaattaaatccttagcaatcagaacacttgcttcactagattttgccaactgcaaatcatgttggactgagctaatctgttctttctgagactataaggtaaatgattaacaataaagcctccatgtaaaaggcaaaaaaaaaaaa

SEQ ID NO: 71 - protein, 117 aa, Rattus norvegicus
  ref <308>: DATABASE ACCESSION NUMBER: SWISS-Prot / O08765
  ref <309>: DATABASE ENTRY DATE: 2002-06-15
MKWMFKEDHSLEHRCVESAKIRAKYPDRVPVIVEKVSGSQIVDIDKRKYLVPSDITVAQFMWIIRKRIQLPSEKAIFLFVDKTVPQSSLTMGQLYEKEKDEDGFLYVAYSGENTFGF

SEQ ID NO: 72 - DNA, 450 bp, Homo sapiens
  ref <308>: DATABASE ACCESSION NUMBER: Refseq / NM_007285
  ref <309>: DATABASE ENTRY DATE: 2002-05-17
ggctgccgctgccgctgccgccgtcgttgttgttgtgctcggtgcgctgagctccgcggctccgcgagccggttccgtccccttcccgccgccgccatgaagtggatgttcaaggaggaccactcgctggaacacagatgcgtggagtccgcgaagattcgagcgaaatatcccgacagggttccggtgattgtggaaaaggtctcaggctctcagattgttgacattgacaaacggaagtacttggttccatctgatatcactgtggctcagttcatgtggatcatcaggaaaaggatccagcttccttctgaaaaggcgatcttcctgtttgtggataagacagtcccacagtccagcctaactatgggacagctttacgagaaggaaaaagatgaagatggattcttatatgtggcctacagcggagagaacacttttggcttctga

SEQ ID NO: 73 - protein, 117 aa, Homo sapiens; identical to SEQ ID NO: 71

SEQ ID NO: 74 - DNA, 781 bp, Rattus norvegicus
  ref <308>: DATABASE ACCESSION NUMBER: EMBL / AB003991
  ref <309>: DATABASE ENTRY DATE: 1997-05-23
atggccgaggacgcagacatgcgtaatgaactggaggagatgcagaggagggctgaccagctggctgatgagtccctggaaagcacccgtcgcatgctgcagctggtcgaagagagtaaagatgctggcatcaggactttggttatgttggatgagcaaggcgaacaactcgatcgtgtcgaagaaggcatgaaccatatcaaccaagacatgaaggaggccgagaaaaatttaaaagatttaggcaaatgctgtggccttttcatatgtccttgtaacaagcttaaatccagtgatgcttacaaaaaagcctggggcaataatcaggatggagtagtggccagccagcctgcccgtgtggtggatgaacgggagcagatggccatcagtggtggcttcatccgcagggtaacaaacgatgcccgggaaaatgaaatggatgaaaacctggagcaggtgagcggcatcatcggaaacctccgtcatatggccctagacatgggcaatgagattgacacccagaatcgccagattgacaggatcatggagaaggctgactccaacaaaaccagaattgatgaagccaaccaacgtgcaacaaagatgctgggaagtggttaaatctgcccttctgctgtgctctcctccaatgttgttggacaagagagaagagagctccttcatgcttctctcatggtattacctagtaagactcacacacacacacacacacacacacacacacagggatctctcagtttctgacttcctttctctccag

SEQ ID NO: 75 - protein, 206 aa, Rattus norvegicus
  ref <308>: DATABASE ACCESSION NUMBER: SWISS-Prot / BAA20151
  ref <309>: DATABASE ENTRY DATE: 2002-06-15
MAEDADMRNELEEMQRRADQLADESLESTRRMLQLVEESKDAGIRTLVMLDEQGEQLERIEEGMDQINKDMKEAEKNLTDLGKFCGLCVCPCNKLKSSDAYKKAWGNNQDGVVASQPARVVDEREQMAISGGFIRRVTNDARENEMDENLEQVSGIIGNLRHMALDMGNEIDTQNRQIDRIMEKADSNKTRIDEANQRATKMLGSG

SEQ ID NO: 76 - DNA, 781 bp, Rattus norvegicus; identical to SEQ ID NO: 74
  ref <308>: DATABASE ACCESSION NUMBER: EMBL / AB003991
  ref <309>: DATABASE ENTRY DATE: 1997-05-23

SEQ ID NO: 77 - protein, 206 aa, Rattus norvegicus; identical to SEQ ID NO: 75
  ref <308>: DATABASE ACCESSION NUMBER: SWISS-Prot / BAA20151
  ref <309>: DATABASE ENTRY DATE: 2002-06-15

SEQ ID NO: 78 - DNA, 781 bp, Rattus norvegicus; identical to SEQ ID NO: 74
  ref <308>: DATABASE ACCESSION NUMBER: EMBL / AB003991
  ref <309>: DATABASE ENTRY DATE: 1997-05-23

SEQ ID NO: 79 - protein, 206 aa, Rattus norvegicus; identical to SEQ ID NO: 75
  ref <308>: DATABASE ACCESSION NUMBER: SWISS-Prot / BAA20151
  ref <309>: DATABASE ENTRY DATE: 2002-06-15

SEQ ID NO: 80 - DNA, 781 bp, Rattus norvegicus; identical to SEQ ID NO: 74
  ref <308>: DATABASE ACCESSION NUMBER: EMBL / AB003991
  ref <309>: DATABASE ENTRY DATE: 1997-05-23

SEQ ID NO: 81 - protein, 206 aa, Rattus norvegicus; identical to SEQ ID NO: 75
  ref <308>: DATABASE ACCESSION NUMBER: SWISS-Prot / BAA20151
  ref <309>: DATABASE ENTRY DATE: 2002-06-15

SEQ ID NO: 82 - DNA, 781 bp, Rattus norvegicus; identical to SEQ ID NO: 74
  ref <308>: DATABASE ACCESSION NUMBER: EMBL / AB003991
  ref <309>: DATABASE ENTRY DATE: 1997-05-23

SEQ ID NO: 83 - protein, 206 aa, Rattus norvegicus; identical to SEQ ID NO: 75
  ref <308>: DATABASE ACCESSION NUMBER: SWISS-Prot / BAA20151
  ref <309>: DATABASE ENTRY DATE: 2002-06-15

SEQ ID NO: 84 - DNA, 781 bp, Rattus norvegicus; identical to SEQ ID NO: 74
  ref <308>: DATABASE ACCESSION NUMBER: EMBL / AB003991
  ref <309>: DATABASE ENTRY DATE: 1997-05-23

SEQ ID NO: 85 - protein, 206 aa, Rattus norvegicus; identical to SEQ ID NO: 75
  ref <308>: DATABASE ACCESSION NUMBER: SWISS-Prot / BAA20151
  ref <309>: DATABASE ENTRY DATE: 2002-06-15

SEQ ID NO: 86 - DNA, 621 bp, Rattus norvegicus
  ref <308>: DATABASE ACCESSION NUMBER: EMBL / AB003992
  ref <309>: DATABASE ENTRY DATE: 1997-05-23
atggccgaggacgcagacatgcgtaatgaactggaggagatgcagaggagggctgaccagctggctgatgagtccctggaaagcacccgtcgcatgctgcagctggtcgaagagagtaaagatgctggcatcaggactttggttatgttggatgagcaaggcgaacaactggaacgcattgaggaagggatggaccaaatcaataaggatatgaaagaagcagaaaagaatttgacggacctaggaaaattctgcgggctttgtgtgtgtccctgtaacaagcttaaatccagtgatgcttacaaaaaagcctggggcaataatcaggatggagtagtggccagccagcctgcccgtgtggtggatgaacgggagcagatggccatcagtggtggcttcatccgcagggtaacaaacgatgcccgggaaaatgaaatggatgaaaacctagagcaggtgagcggcatcatcggaaacctccgtcatatggccctagacatgggcaatgagattgacacccagaatcgccagattgacaggatcatggagaaggctgactccaacaaaaccagaattgatgaagccaaccaacgtgcaacaaagatgctgggaagtggttaa

SEQ ID NO: 87 - protein, 206 aa, Rattus norvegicus; identical to SEQ ID NO: 75
  ref <308>: DATABASE ACCESSION NUMBER: SWISS-Prot / BAA20152
  ref <309>: DATABASE ENTRY DATE: 2002-06-15

SEQ ID NO: 88 - DNA, 2053 bp, Homo sapiens
  ref <308>: DATABASE ACCESSION NUMBER: Refseq / NM_003081
  ref <309>: DATABASE ENTRY DATE: 2002-11-05
catctttgatgagggcagagctcacgttgcattgaagacgaaacctcggggaggtcaggcgctgtctttccttccctccctgctcggcggctccaccacagttgcaacctgcagaggcccggagaacacaaccctcccgagaagcccaggtccagagccaaacccgtcactgaccccccagcccaggcgcccagccactccccaccgctaccatggccgaagacgcagacatgcgcaatgagctggaggagatgcagcgaagggctgaccagttggctgatgagtcgctggaaagcacccgtcgtatgctgcaactggttgaagagagtaaagatgctggtatcaggactttggttatgttggatgaacaaggagaacaactcgatcgtgtcgaagaaggcatgaaccatatcaaccaagacatgaaggaggctgagaaaaatttaaaagatttagggaaatgctgtggccttttcatatgtccttgtaacaagcttaaatcaagtgatgcttacaaaaaagcctggggcaataatcaggacggagtggtggccagccagcctgctcgtgtagtggacgaacgggagcagatggccatcagtggcggcttcatccgcagggtaacaaatgatgcccgagaaaatgaaatggatgaaaacctagagcaggtgagcggcatcatcgggaacctccgtcacatggccctggatatgggcaatgagatcgatacacagaatcgccagatcgacaggatcatggagaaggctgattccaacaaaaccagaattgatgaggccaaccaacgtgcaacaaagatgctgggaagtggttaagtgtgcccacccgtgttctcctccaaatgctgtcgggcaagatagctccttcatgcttttctcatggtattatctagtaggtctgcacacataacacacatcagtccacccccattgtgaatgttgtcctgtgtcatctgtcagcttcccaacaatactttgtgtcttttgttctctcttggtctctttctttccaaaggttgtacatagtggtcatttggtggctctaactccttgatgtcttgagtttcatttttcattttctctcctcggtggcatttgctgaataacaacaatttaggaatgctcaatgtgctgttgattctttcaatccacagtattgttcttgtaaaactgtgacattccacagagttactgccacggtcctttgagtgtcaggctctgaatctctcaaaatgtgccgtctttggttcctcatggctgttatctgtctttatgatttcatgattagacaatgtggaattacataacaggcattgcactaaaagtgatgtgatttatgcatttatgcatgagaactaaatagatttttagattcctacttaaacaaaaactttccatgacagtagcatactgatgagacaacacacacacacacaaaacaacagcaacaacaacagaacaacaacaaagcatgctcagtattgagacactgtcaagattaagttataccagcaaaagtgcagtagtgtcacttttttcctgtcaatatatagagacttctaaatcataatcatccttttttaaaaaaaagaattttaaaaaagatggatttgacacactcaccatttaatcatttccagcaaaatatatgtttggctgaaattatgtcaaatggatgtaatatagggtttgtttgctgcttttgatggctacgttttggagagagcaatcttgctgtgaaacagtgtggatgtaaattttataaggctgactcttactaaccaccatttcccctgtggtttgttatcagtacaattctttgttgcttaatctagagctatgcacaccaaattgctgagatgtttagtagctgataaagaaaccttttaaaaaaataatataaatgaatgaaatataaactgtgagataaatatcattatagcatgtaatattaaattcctcctgtctcctctgtcagtttgtgaagtgattgacattttgtagctagtttaaaattattaaaaattatagactcc

SEQ ID NO: 89 - protein, 206 aa, Homo sapiens; identical to SEQ ID NO: 75
  ref <308>: DATABASE ACCESSION NUMBER: SWISS-Prot / P13795
  ref <309>: DATABASE ENTRY DATE: 2002-06-15

SEQ ID NO: 90 - DNA, 621 bp, Rattus norvegicus; identical to SEQ ID NO: 86
  ref <308>: DATABASE ACCESSION NUMBER: EMBL / AB003992
  ref <309>: DATABASE ENTRY DATE: 1997-05-23

SEQ ID NO: 91 - protein, 206 aa, Rattus norvegicus; identical to SEQ ID NO: 75
  ref <308>: DATABASE ACCESSION NUMBER: SWISS-Prot / BAA20152
  ref <309>: DATABASE ENTRY DATE: 2002-06-15

SEQ ID NO: 92 - DNA, 2053 bp, Homo sapiens; identical to SEQ ID NO: 88
  ref <308>: DATABASE ACCESSION NUMBER: Refseq / NM_003081
  ref <309>: DATABASE ENTRY DATE: 2002-11-05

SEQ ID NO: 93 - protein, 206 aa, Homo sapiens; identical to SEQ ID NO: 75
  ref <308>: DATABASE ACCESSION NUMBER: SWISS-Prot / P13795
  ref <309>: DATABASE ENTRY DATE: 2002-06-15

SEQ ID NO: 94 - DNA, 2015 bp, Rattus norvegicus
  ref <308>: DATABASE ACCESSION NUMBER: EMBL / AB004096
  ref <309>: DATABASE ENTRY DATE: 2000-02-01
gtgagagttcctttatacgttacacattcctcctctaagacgagaccactccaggctgaaagtagtgaagattttaaaacttactctgatgaaaactttctttttaaaacagggcgccatcgttgtattggagaaaattttgcctatgttcaaattaagacaatttggtccactatgcttcgtttatatgaatttgacctcatcaatggatattttcccagtgtgaattatacaacaatgattcataccccagaaaacccagtaatccgttacaaacgaagatcaaaatgaagaaaggaacaaggagccagtgtggagacgggactgcaagctgcagcttggcagagaatgaagctttgacacagctttcatactgtactgttttttaagtgtgtggttctgaaagccagtttgattttaatgttttattaactcggtgatttttgtcagacctaatggcatttgaaacagttataatagttctgataggatttcagggaagccaagtttatgttagaaatcgtttaggggagcctcggtattcagagatgatacagaatatagcatccaggtaactaacttcagaagcacacgttgccgtagggagattccggcttggaactagtttgggaagttttaagcctggtcagatgctacagaggcaatgggtcattggtgtggttgggccacttctgtgcgtaaagatgtgagagggtgaaggataagttttctgcgaagctctagatggtgtgagtgccctttgtagtgttaactgagagcaccactccagcgagatggcagcaatcttggaccttatcttgataaccttatttcctaaaaataataaatactaaagagtacttatgttattggttccagaaaaatccaaaatcaaatccttgtggaatttttaattttaattaaaaaaaaaaaaaaacaagtaccatgattttaaaagtgtatgattctgagcttagtgaattctggccttgagattgaggaatggggacatggtatcattgcccgtgttctttggaggctgtgctcaggagccaacctaacagattgttaccatgggcctaattctgacctgcccataatctgtattaggaatcaagagatctgttgctgggtgtggtgctgcacacctgtaatactagtgctcgggctgaggcagaaggattgagagtttgaggccaacctagagctacatagcaagacttaacaccctccccaaaataaaaccttttttctctaaagtatgtgtactggctggtcttaggtgacaacctgacacacgctagggtcatcagagaaaagggaacctcagttgaggaaatgctgtaaggatgcttagtggtcaatgagagagggcccagcccactgtgggtggttccacccctaggctggtcatcctgggtcctaagaaagcaggctgactaagacaccaggagcaagacagtaagcagcatccttcatggcctctgcatcagctcctgccttaggttcctgacccgcttgagttcccgtcctgactttctttgataatgaacagtagtatggaagtgtaagccaaataacccacccccaccctcccaacttgctttttgctcatggtgttttgtagcaatagaaaccctaactgttacagctgtaagaggcttttgaagactcttcaaatgaaggcccaaatctctgctgttaaaggtttcagattaaaattctctatgagaaaagttttgctggtctatattcatggatttgaagctgtgcttcagtaagtacagttcaagaggtctgggaatggggttggggatttagctcagtggtagagcgcttgcctaggaagcgcaaggccctgggttcggtccccagctccgaaaaaaagaacaaaaaaaaaagaggtctgggaattcagaaacttagatcctatttgcctgaaatcggctcccttcagtattacctttagttatttagataagtcactctcgtgatccgttgacctgcaggtcgac

SEQ ID NO: 95 - protein, 503 aa, Rattus norvegicus [sequence omitted]

SEQ ID NO: 96 - DNA, 3172 bp, Homo sapiens
  ref <308>: DATABASE ACCESSION NUMBER: EMBL / U23942
  ref <309>: DATABASE ENTRY DATE: 1999-07-02
gctgggtttagtaggagacctggggcaaggccccctgtggacgaccatctgccagcttctctcgttccgtcgattgggaggagcggtggcgacctcggccttcagtgtttccgacggagtgaatggcggcggcggctgggatgctgctgctgggcttgctgcaggcgggtgggtcggtgctgggccaggcgatggagaaggtgacaggcggcaacctcttgtccatgctgctgatcgcctgcgccttcaccctcagcctggtctacctgatccgtctggccgccggccacctggtccagctgcccgcaggggtgaaaagtcctccatacattttctccccaattccattccttgggcatgccatagcatttgggaaaagtccaattgaatttctagaaaatgcatatgagaagtatggacctgtatttagttttaccatggtaggcaagacatttacttaccttctggggagtgatgctgctgcactgctttttaatagtaaaaatgaagacctgaatgcagaagatgtctacagtcgcctgacaacacctgtgtttgggaagggagttgcatacgatgtgcctaatccagttttcttggagcagaagaaaatgttaaaaagtggccttaacatagcccactttaaacagcatgtttctataattgaaaaagaaacaaaggaatactttgagagttggggagaaagtggagaaaaaaatgtgtttgaagctctttctgagctcataattttaacagctagccattgtttgcatggaaaggaaatcagaagtcaactcaatgaaaaggtagcacagctgtatgcagatttggatggaggtttcagccatgcagcctggctcttaccaggttggctgcctttgcctagtttcagacgcagggacagagctcatcgggaaatcaaggatattttctataaggcaatccagaaacgcagacagtctcaagaaaaaattgatgacattctccaaactttactagatgctacatacaaggatgggcgtcctttgactgatgatgaagtagcagggatgcttattggattactcttggcagggcagcatacatcctcaactactagtgcttggatgggcttctttttggccagagacaaaacacttcaaaaaaaatgttatttagaacagaaaacagtctgtggagagaatctgcctcctttaacttatgaccagctcaaggatctaaatttacttgatcgctgtataaaagaaacattaagacttagacctcctataatgatcatgatgagaatggccagaactcctcagactgtggcagggtataccattcctccaggacatcaggtgtgtgtttctcccactgtcaatcaaagacttaaagactcatgggtagaacgcctggactttaatcctgatcgctacttacaggataacccagcatcaggggaaaagtttgcctatgtgccatttggagctgggcgtcatcgttgtattggggaaaattttgcctatgttcaaattaagacaatttggtccactatgcttcgtttatatgaatttgatctcattgatggatactttcccactgtgaattatacaactatgattcacacccctgagaacccagttatccgttacaaacgaagatcaaaatgaaaaaggttgcaaggaacgaatatatgtgattatcactgtaagccacaaaggcattcgaagagaatgaagtgtacaaaacaactcttgtagtttactgtttttttaagtgtgtaattctaaaagccagtttatgatttaggattttgttaactgaatggttctatcaaatataatagcatttgacacattttctaatagttatgatacttatacatgtgctttcaggaagttccttggtgaaacaattgttgaggggggatctaggtaattggcagattctaaataatataatttccagatagtaattttaagagtactcatcgctcttgccaaataagttcagggtattcaaatcttggactagtcctgcaaggtataaagaataaaaatcccagtgagatacttggaaaccacagtttattattatttatctgggcaattattgtgtgtgtgaggatggaagggtagggaataatcgaacatctaaagccttgaataagagaatactaattgttttggtatgatgatactcagaaatggagatattataggaaaaagaaatcctttggaattttaactaaaatcactgcatatgggaaattaagagatccaggaccatatttgataagagttcctaaaaataatgtaattattaatgctaaagactgctcatgtatcttgatctaattactaaataaattacatatttatttacctgataaatatgtatctagttctacaaggtcacatttatgtggaagtccaaagtcaagtccttaggggataattttgttttgggctcagttgttccctgcttccttttttttttttttttttttttgagatggagtctcgctctgttgcccaggctggagtgcagtggtgcgatctcagctcactgcatcctctgcctcccgggttcaagcaattctctgcctcagcctcccaagtagttgggattacaggcacctgccaccatgcctggctaattttttgtatttttagtagagacgggggtttcactatgttggctaggctggtcttgaactcctgagcctcgtgagtccacccgccttggcctcccaaagtgctgggattacaggcatgagccaccgcacctggccttccctgcttcctctctagaatccaattagggatgtttgttactactcatattgattaaaacagttaacaaacttttttctttttaaaatgtgagatcagtgaactctggttttaagataatctgaaacaaggtccttgggagtaataaaattggtcacattctgtaaagcacattctgtttaggaatcaacttatctcaaattgtaactcggggcctaactatatgagatggctgaaaaaataccacatcgtctgttttcactaggtgatgccaaaatattttgctttatgtatattacagttctttttaaaacactggaagactcatgttaaactctaattgtgaaggcagaatctctgctaatttttcagattaaaattctctttgaaaaaat

SEQ ID NO: 97 - protein, 503 aa, Homo sapiens [sequence omitted]

SEQ ID NO: 98 - DNA, 2015 bp, Rattus norvegicus; identical to SEQ ID NO: 94
  ref <308>: DATABASE ACCESSION NUMBER: EMBL / AB004096
  ref <309>: DATABASE ENTRY DATE: 2000-02-01

SEQ ID NO: 99 - protein, 503 aa, Rattus norvegicus [sequence omitted]

SEQ ID NO: 100 - DNA, 3172 bp, Homo sapiens; identical to SEQ ID NO: 96
  ref <308>: DATABASE ACCESSION NUMBER: EMBL / U23942
  ref <309>: DATABASE ENTRY DATE: 1999-07-02

SEQ ID NO: 101 - protein, 503 aa, Homo sapiens [sequence omitted]

SEQ ID NO: 102 - DNA, 2015 bp, Rattus norvegicus; identical to SEQ ID NO: 94
  ref <308>: DATABASE ACCESSION NUMBER: EMBL / AB004096
  ref <309>: DATABASE ENTRY DATE: 2000-02-01

SEQ ID NO: 103 - protein, 503 aa, Rattus norvegicus [sequence omitted]

SEQ ID NO: 104 - DNA, 3172 bp, Homo sapiens; identical to SEQ ID NO: 96
  ref <308>: DATABASE ACCESSION NUMBER: EMBL / U23942
  ref <309>: DATABASE ENTRY DATE: 1999-07-02

SEQ ID NO: 105 - protein, 503 aa, Homo sapiens [sequence omitted]

SEQ ID NO: 106 - DNA, 2015 bp, Rattus norvegicus; identical to SEQ ID NO: 94
  ref <308>: DATABASE ACCESSION NUMBER: EMBL / AB004096
  ref <309>: DATABASE ENTRY DATE: 2000-02-01

SEQ ID NO: 107 - protein, 503 aa, Rattus norvegicus [sequence omitted]

SEQ ID NO: 108 - DNA, 3172 bp, Homo sapiens; identical to SEQ ID NO: 96
  ref <308>: DATABASE ACCESSION NUMBER: EMBL / U23942
  ref <309>: DATABASE ENTRY DATE: 1999-07-02

SEQ ID NO: 109 - protein, 503 aa, Homo sapiens [sequence omitted]

SEQ ID NO: 110 - DNA, 3373 bp, Rattus norvegicus
  ref <308>: DATABASE ACCESSION NUMBER: EMBL / AB004276
  ref <309>: DATABASE ENTRY DATE: 2001-10-03
agtccaacggcggaactgcggagaaattctgtccctccgtgtatggctctccagctttccgtaagattatcatttccatcatcacaagccaaggtaatccaggcacctgggcccggtgaagactgagaggattcttttgacaataaacaatgactgcttcccagaatcaacaccgtcatggccggctggtgctgttctgtacgctgatggggacgctgtgcaagatcggggtaggtcagattcgctactcggtgccagaagagacagataaaggcactgttgtaggaaacatctccaaggacctggggctggagccccgcgagctggcggagcgaggggtccgcatcgtctctagaggtaggtcgcagcttttctcccatgaatccgcggggcgcaacttggtcaccgcgagcaggatagaccgggaggagctgtgcgcccagagtattccctgtcttgtaaatattaacatcctagttgaggagaaagggaaactctttggagtagaaataactgatattaacgataataatccgaagttccatgttggggatctggaggtgaaaattaacgaaatcgctgcccctggagcacggtatccacttccaaaagctgttgacccagatgtgggcataaactccctccagagttaccagctcagccccaaccggcacttctctctggacattcagaggggagacgacggaactataaacccagagctggtgctggagaacaccctggaccgagaggaagagccctctcaccacctgatcctcaccgcctccgatgccgaacgccgccgctccagcacagcgctcatccaggtcacagtgttggataccaacgacaatgcccctgttttcgaccaaccggtttaccgcgtgaaagtcctcgagaacgtgaccccaggcactctgctgctcacagtgagagctagcgacccggatgagggtgccaacggaaaagtgacatataaattccaaaaaatcaatgacaaacaatcgctactattccatcttcatgaaaacacgggggaaatgacagtagcaaagaatctggactatgaagaatgctcattgtatgaaatggaaatacaggctgaagatgtgggggcgcttctggggaggagcaaagtggtaattatggtagaagatgtaaatgacaatcggccagaagtgaccattacatccttgtttaacccggtattggaaaattctcttcccgggacagtaattgccttcttgaatgtgcatgaccgagactctggaaagaacggccaagttgtctgttacacgcatgataacttaccttttaaattagaaaagtcaatagataattattatagattggtgacatggaaatatttggaccgagaaaaagtctccatctacaatatcacagtgatagcctcagatctaggagcccactctgtcactgaaacttacattgccctgattgtggcagacactaatgacaaccctcctcgttttcctcacacctcctacacagcctatattccagagaacaacctgaggggcgcctccatcttctcactgactgcacatgatcctgacagtcaggaaaatgcacaggtcacttactctgtgtctgaggacaccatacagggagtgcctttgtcctcttatatctccatcaactcagatactggtgtcctgtatgcactgcactcttttgacttcgagaagatacaagacttgcagctactggttgttgccactgacagtggaagcccacctctcagcagcaatgtgtcattgagcttgtttgtgttggaccagaacgacaacgcacctgagattctatatcctagcttccccacagatggctccactggtgtggaactagcaccccgctctgcagagcctggatacctagtgaccaaagtggtggcagtggacaaagactcaggacagaatgcttggctgtcctaccgtctgctgaaggccagcgaacctgggctcttctctgtaggacttcacacgggtgaggtgcgtacagcgagggccctgctggacagagatgctctcaaacagaatctggtgatggccgtgcaggaccatggccaaccccctctctcggccactgtaactctcactgtggcagtggctaacagcatccctgaggtgttggctgacttgagcagcattaggacccctggggtaccagaggattctgatatcacgctccacctggtggtggcagtggctgtggtctcctgtgtcttccttgtctttgtcattgtcctcctagctctcaggcttcagcgctggcagaagtctcgccagctccagggctccaaaggtggattggctcctgcacctccatcacattttgtgggcatcgacggggtacaggcttttctacaaacctattctcatgaagtctcgctcacttcaggctcccagacaagccacattatctttcctcagcccaactatgcagacatgctcattaaccaagaaggctgtgagaaaaatgattccttattaacatccatagattttcatgagagtaaccgtgaagatgcttgcgccccgcaagccccgcccaacactgactggcgtttctctcaagcccagagacccggcacgagcggatcccaaaatggggatgaaaccggcacctggcccaacaaccagttcgatacagagatgctgcaagccatgatcttggcctctgccagtgaagccgctgatgggagctccactctgggagggggcactggcactatgggtttgagcgctcgatatggaccccagtttaccctgcagcacgtgcctgactaccgccagaacgtgtacatccctggcagcaatgccacactgaccaacgcagctggcaaacgagatggcaaggctccggcaggcggcaatggcaacaacaacaagtcgggcaagaaagagaagaagtaatatggaggccaggccttgagccacagggcagcctccctccccagccagtccagcttgtccttacttgtacccaggcctcagaatttcagggctcaccccaggattctggtaggagccacagccaggccatgctccccgttgggaaacagaaacaagtgcccaagccaacaccccctctttgtaccctaggggggttgaatatgcaaagagagttctgctgggaccccctatccaatcagtgattgtacccacataggtagcagggttagtgtggatacacacacacacacacacacacacacacacacaccccttgtcctccgcagtgcctgccactttctgggactttctcatccccctacgcccttcctttatcctctcccacccagacacagctgctggagaataaatttggggatgctgatgctaaaaaaaaa

SEQ ID NO: 111 - protein, 928 aa, Rattus norvegicus
  ref <308>: DATABASE ACCESSION NUMBER: SWISS-Prot / BAA20359
  ref <309>: DATABASE ENTRY DATE: 2002-10-01
MTASQNQHRHGRLVLFCTLMGTLCKIGVGQIRYSVPEETDKGTVVGNISKDLGLEPRELAERGVRIVSRGRSQLFSHESAGRNLVTASRIDREELCAQSIPCLVNINILVEEKGKLFGVEITDINDNNPKFHVGDLEVKINEIAAPGARYPLPKAVDPDVGINSLQSYQLSPNRHFSLDIQRGDDGTINPELVLENTLDREEEPSHHLILTASDAERRRSSTALIQVTVLDTNDNAPVFDQPVYRVKVLENVTPGTLLLTVRASDPDEGANGKVTYKFQKINDKQSLLFHLHENTGEMTVAKNLDYEECSLYEMEIQAEDVGALLGRSKVVIMVEDVNDNRPEVTITSLFNPVLENSLPGTVIAFLNVHDRDSGKNGQVVCYTHDNLPFKLEKSIDNYYRLVTWKYLDREKVSIYNITVIASDLGAHSVTETYIALIVADTNDNPPRFPHTSYTAYIPENNLRGASIFSLTAHDPDSQENAQVTYSVSEDTIQGVPLSSYISINSDTGVLYALHSFDFEKIQDLQLLVVATDSGSPPLSSNVSLSLFVLDQNDNAPEILYPSFPTDGSTGVELAPRSAEPGYLVTKVVAVDKDSGQNAWLSYRLLKASEPGLFSVGLHTGEVRTARALLDRDALKQNLVMAVQDHGQPPLSATVTLTVAVANSIPEVLADLSSIRTPGVPEDSDITLHLVVAVAVVSCVFLVFVIVLLALRLQRWQKSRQLQGSKGGLAPAPPSHFVGIDGVQAFLQTYSHEVSLTSGSQTSHIIFPQPNYADMLINQEGCEKNDSLLTSIDFHESNREDACAPQAPPNTDWRFSQAQRPGTSGSQNGDETGTWPNNQFDTEMLQAMILASASEAADGSSTLGGGTGTMGLSARYGPQFTLQHVPDYRQNVYIPGSNATLTNAAGKRDGKAPAGGNGNNNKSGKKEKK

SEQ ID NO: 112 - DNA, 4605 bp, Homo sapiens
  ref <308>: DATABASE ACCESSION NUMBER: Refseq / NM_018920
  ref <309>: DATABASE ENTRY DATE: 2001-09-29
atggcggctcagccgaggggcggggactacagaggattcttcctgctctccatcctcctggggaccccctgggaagcctgggcaggacgtattctctactccgtgtcggaggagacggacaaagggtcctttgtgggagacatcgccaaggacctggggctggagccccgggagctggcggagcgcggagtccgcatcatctccagaggtaggacgcagcttttcgccctgaaccagcgcagcggcagcttggtcactgcgggcaggatagaccgggaagagatctgcgctcagagtgcgcggtgtctggtaaactttaacatcctgatggaagataaaatgaatctttaccctatagacgtggaaataatagatattaatgacaacgttccaagattcttgacggaagaaataaatgtaaaaataatggagaatacagctcctggggttcggtttccgttaagcgaggctggggatccagatgtgggcacgaactccctccagagttaccagctcagccccaatcgccacttctccctggctgtgcaaagtggagacgatgaaactaagtacccggaactggtgctggagcgggtgctggaccgggaggaagagcgggttcaccacctggtcctcacagcctctgatggcggcgacccgccccgatccagcaccgcccacatccaggtgacagtggtggatgtgaatgaccacacgcctgtcttctctctgcctcagtaccaagtaactgtccccgagaatgtgccagtgggtacaagactgctcacggtacatgctatcgacctggacgagggagtcaatggggaagtgacatattcttttcggaaaataactcctaaacttccaaagatgtttcatctgaactcgcttacaggagaaatatcaactttagaaggattagattatgaagaaactgccttctatgaaatggaggttcaggctcaagatggtcctggtagtctgacaaaggcaaaagtactgatcacagttttagatgtaaatgataatgctccagaagtgactatgacgtctttaagtagctcaatccctgaagacacacctcttgggacagtcattgctcttttctacctacaagacagagattctggaaagaatggtgaggtgacctgcaccattccagaaaacctaccttttaaattagaaaaatcaatagataattattatagattggtcacaaccaaaaacttggaccgggaaacactctctttgtataacatcacactgaaagccacagatggtggaactcctcccttgtccagggaaactcacatattcatgcaggtggcagacaccaacgataacccacccaccttcccccactcatcctactcagtctacatcgctgagaacaaccccagaggggcctccattttcttagtgactgcacaggaccacgacagtgaggataatgcccagatcacttattccttggccgaagacaccatccagggggctccagtgtcctcctatgtctccataaactctgacactggagtcctgtacgcgctgcaatcctttgattatgagcagttgagagaactacaactaagagtgactgcacatgacagcggggacccgcctctcagcagcaacatgtcactgagcctgttcgtgctggaccagaatgacaacccgcccgagatcctgtacccggccctccccacagatggttctactggcatggagctggcaccccgctccgcagagcccggctacctggtgaccaaggtggtggcggtggacaaagattcaggccagaacgcctggctgtcatacctcctgcttaaggccagcgagccaggactctttgcggttgggctgtacacgggcgaggtgcgcacggctcgggccctgctggacagagatgccctcaagcagagcctcgtggtggccgtccaggaccacggtcagcctcctctgtcagccaccgtcacactcaccgtggctgtggctgacagcatccccgaagtcttggccgacctgggcagccttgagccctccgacggtccttacaactatgacctcacgttgtacctggtggtggcggtggccacagtctcctgcgtcttcctagccttcgtcctcgtactgctggcgctcaggctgcggcgctggcacaagtcacgcctgctgcaggcttcagaaggtggcttggcgaacgtgcccacctcgcactttgtgggcatggacggggtgcaggctttcctgcagacctattcccatgaggtctccctcaccgcggactctcggaagagtcacctgatcttcccccagcccaactatgtagacatgctcatcagccaggagagctgtgagaaaaatgattctttgctaacatccgtagattttcaggaatgtaaagaaaacctgccaagtattcagcaagccccgcccaacacggactggcgtttctctcaggcccagagacccggcaccagcggctcccaaaatggcgatgacaccggcacctggcccaacaaccagtttgacacagagatgctgcaagccatgatcttggcgtccgccagtgaagctgctgatgggagctccaccctgggagggggtgccggcaccatgggattgagcgcccgctacggaccccagttcaccctgcagcacgtgcccgactaccgccagaatgtctacatcccaggcagcaatgccacactgaccaacgcagctggcaagcgggatggcaaggccccagcaggtggcaatggcaacaagaagaagtcgggcaagaaggagaagaagtaacatggaggccaggccaagagccacagggcggcctctccccaaccagcccagcttctccttacctgcacccaggcctcagagtttcagggctaacccccagaatactggtaggggccaaggccatgctccccttgggaaacagaaacaagtgcccagtcagcacctaccccttcccccccagggggttgaatatgcaaaagcagttccgctgggaacccccatccaatcaactgctgtacccatgggggtagtggggttactgtagacaccaagaaccatttgccacaccccgtttagttacagctgaactcctccatcttccaaatcaatcaggcccatccatcccatgcctccctcctccccaccccactccaacagttcctctttcccgagtaaggtggttggggtgttgaagtaccaagtaacctacaagcctcctagttctgaaaagttggaagggcatcatgacctcttggcctctcctttgattctcaatcttcccccaaagcatggtttggtgccagccccttcacctccttccagagcccaagatcaatgctcaagttttggaggacatgatcaccatccccatggtactgatgcttgctggatttagggagggcattttgctaccaagcctcttcccaacgccctggggaccagtcttctgttttgtttttcattgtttgacgtttccactgcatgccttgacttcccccacctcctcctcaaacaagagactccactgcatgttccaagacagtatggggtggtaagataaggaagggaagtgtgtggatgtggatggtgggggcatggacaaagcttgacacatcaagttatcaaggccttggaggaggctctgtatgtcctcaggggactgacaacatcctccagattccagccataaaccaataactaggctggacccttcccactacataatagggctcagcccaggcagccagctttgggctgagctaacaggaccaatggattaaactggcatttcagtccaaggaagctcgaagcaggtttaggaccaggtccccttgagaggtcagaggggcctctgtgggtgctgggtactccagaggtgccactggtggaagggtcagcggagccccagcaggaagggtgggccagccaggccattcttagtccctgggttggggaggcagggagctagggcagggaccaaatgaacagaaagtctcagcccaggatggggcttcttcaacagggcccctgccctcctgaagcctcagtccttcaccttgccaggtgccgtttctcttccgtgaaggccactgcccaggtccccagtgcgccccctagtggccatagcctggttaaagttccccagtgcctccttgtgcatagaccttcttctcccacccccttctgcccctgggtccccggccatccagcggggctgccagagaaccccagacctgcccttacagtagtgtagcgccccctccctctttcggctggtgtagaatagccagtagtgtagtgcggtgtgcttttacgtgatggcgggtgggcagcgggcggcgggctccgcgcagccgtctgtccttgatctgcccgcggcggcccgtgttgtgttttgtgctgtgtccacgcgctaaggcgaccccctcccccgtactgacttctcctataagcgcttctcttcgcatagtcacgtagctcccaccccaccctcttcctgtgtctcacgcaagttttatactctaatatttatatggctttttttcttcgacaaaaaaataataaaacgtttcttctgaaaagctg

SEQ ID NO: 113 - protein, 932 aa, Homo sapiens
  ref <308>: DATABASE ACCESSION NUMBER: Refseq / NP_061743
  ref <309>: DATABASE ENTRY DATE: 2001-09-29
MAAQPRGGDYRGFFLLSILLGTPWEAWAGRILYSVSEETDKGSFVGDIAKDLGLEPRELAERGVRIISRGRTQLFALNQRSGSLVTAGRIDREEICAQSARCLVNFNILMEDKMNLYPIDVEIIDINDNVPRFLTEEINVKIMENTAPGVRFPLSEAGDPDVGTNSLQSYQLSPNRHFSLAVQSGDDETKYPELVLERVLDREEERVHHLVLTASDGGDPPRSSTAHIQVTVVDVNDHTPVFSLPQYQVTVPENVPVGTRLLTVHAIDLDEGVNGEVTYSFRKITPKLPKMFHLNSLTGEISTLEGLDYEETAFYEMEVQAQDGPGSLTKAKVLITVLDVNDNAPEVTMTSLSSSIPEDTPLGTVIALFYLQDRDSGKNGEVTCTIPENLPFKLEKSIDNYYRLVTTKNLDRETLSLYNITLKATDGGTPPLSRETHIFMQVADTNDNPPTFPHSSYSVYIAENNPRGASIFLVTAQDHDSEDNAQITYSLAEDTIQGAPVSSYVSINSDTGVLYALQSFDYEQLRELQLRVTAHDSGDPPLSSNMSLSLFVLDQNDNPPEILYPALPTDGSTGMELAPRSAEPGYLVTKVVAVDKDSGQNAWLSYLLLKASEPGLFAVGLYTGEVRTARALLDRDALKQSLVVAVQDHGQPPLSATVTLTVAVADSIPEVLADLGSLEPSDGPYNYDLTLYLVVAVATVSCVFLAFVLVLLALRLRRWHKSRLLQASEGGLANVPTSHFVGMDGVQAFLQTYSHEVSLTADSRKSHLIFPQPNYVDMLISQESCEKNDSLLTSVDFQECKENLPSIQQAPPNTDWRFSQAQRPGTSGSQNGDDTGTWPNNQFDTEMLQAMILASASEAADGSSTLGGGAGTMGLSARYGPQFTLQHVPDYRQNVYIPGSNATLTNAAGKRDGKAPAGGNGNKKKSGKKEKK

SEQ ID NO: 114 - DNA, 1416 bp, Rattus norvegicus
  ref <308>: DATABASE ACCESSION NUMBER: EMBL / AB004277
  ref <309>: DATABASE ENTRY DATE: 2001-10-03
ccgggccttattggaggacgactctgatacccaacaggtggtggtcctggtgagggacaatggtgacccttcactatcctccacagcaacagtattgctggttctggaggacgaggatgcagaggaaatgcccaaatccagcgacttcctcacacaccctcccgagcggtcagacctcaccctttatcttattgtggcgctggcagctgtcagtctcttatccctagttaccttcactttcatgtcagctaagtgtctgcggaggcatgaagatagggaccggggtgggggccagtgctgcaggggccaggactcgccctccagggagttctataaacagtccagtcccaaccttcaggtcagctcagatggcactctaaagtacatggaggtgaccctgcggcccacagattctcagagccattgctacaggacgtgcttttctccagcctccgatggcagtgacttcactttcctcaggcccctcagcgttcagcagccctcagccttggcgctggagcccgaggccttgcgttcccggtctagtacgctgcgggagcggagccagcaagccccgcccaacactgactggcgtttctctcaagcccagagacccggcacgagcggatcccaaaatggggatgaaaccggcacctggcccaacaaccagttcgatacagagatgctgcaagccatgatcttggcctctgccagtgaagccgctgatgggagctccactctgggagggggcactggcactatgggtttgagcgctcgatatggaccccagtttaccctgcagcacgtgcctgactaccgccagaacgtgtacatccctggcagcaatgccacactgaccaacgcagctggcaaacgagatggcaaggctccggcaggcggcaatggcaacaacaacaagtcgggcaagaaagagaagaagtaatatggaggccaggccttgagccacagggcagcctccctccccagccagtccagcttgtccttacttgtacccaggcctcagaatttcagggctcaccccaggattctggtaggagccacagccaggccatgctccccgttgggaaacagaaacaagtgcccaagccaacaccccctctttgtaccctaggggggttgaatatgcaaagagagttctgctgggaccccctatccaatcagtgattgtacccacataggtagcagggttagtgtggatacacacacacacacacacacacacacacacacacacacaaacaccatgccacactcccctagttacagctgaactccccatcttccaacccagtcaggctcattcatctccagcctccctgtcccaacctccctttgagtaacacctctcttttgagccaggtagttgggctgttggggtgacaggttgagctaagg

SEQ ID NO: 115 - protein, 313 aa, Rattus norvegicus
  ref <308>: DATABASE ACCESSION NUMBER: SWISS-Prot / BAA20360
  ref <309>: DATABASE ENTRY DATE: 2001-12-01
RALLEDDSDTQQVVVLVRDNGDPSLSSTATVLLVLEDEDAEEMPKSSDFLTHPPERSDLTLYLIVALAAVSLLSLVTFTFMSAKCLRRHEDRDRGGGQCCRGQDSPSREFYKQSSPNLQVSSDGTLKYMEVTLRPTDSQSHCYRTCFSPASDGSDFTFLRPLSVQQPSALALEPEALRSRSSTLRERSQQAPPNTDWRFSQAQRPGTSGSQNGDETGTWPNNQFDTEMLQAMILASASEAADGSSTLGGGTGTMGLSARYGPQFTLQHVPDYRQNVYIPGSNATLTNAAGKRDGKAPAGGNGNNNKSGKKEKK

SEQ ID NO: 116 - DNA, 4641 bp, Homo sapiens
  ref <308>: DATABASE ACCESSION NUMBER: Refseq / NM_018929
  ref <309>: DATABASE ENTRY DATE: 2001-09-29
atggggcccaagacactcccacagctcgctgggaaatggcaagtgctgtgcatgttgtccttgtgctgctggggctgggtgtctgggcagcttcgttactcagtggtggaggagtctgagccggggacgctggtggggaatgttgctcaggatctgggcttaaagatgacagatctgttgagccggcggctgcaattgggctctgaggagaatgggcgctatttttccctgagcttgatgagtggtgccctggcagtgaatcaaaagattgaccgagaaagcctatgtggagccagcaccagctgcctgctgccagtgcaggtggtgactgaacaccccctggagctaatccgtgtagaggtagagatcctggatctcaatgacaactctcctagctttgccacccctgagcgagagatgcgcatctcagaatcagcagcatctggggcacgattcccactggacagtgcccaggatccggatgtgggcaccaatactgtgagcttttacactctaagccccaacagccacttctctctgaatgtgaagaccctaaaagatgggaagccattcccagagctggtgctagagcagcagctggatcgtgaagcccaggcaagacatcagctggtgcttactgctgtggatggggggaccccagcccgctcagggaccacccttatctctgtcatcgtgctggacatcaatgataatgctccaaccttccaatcctcagttctacgtgtgggaatcccagagaatgcacccattggtactctgctgctccgcctcaatgccactgatccagacgagggcaccaacggccaactagactattcttttggagaccacacatctgaggcagtgcggaacctctttggcctagaccctagcagtggggcaatccatgtgttgggtcccatagactttgaggagtcacgtttctatgaaattcatgcaagagcccgtgaccagggacagcctgccatggagggccactgtgtgattcaagtggatgtgggggatgtcaatgacaatgccccagaggtgctattggcctctttggccaaccctgtcctagagagcacaccagtgggcacagtagtggggttgtttaatgtgcgagaccgggactcaggtagaaatggtgaagtgagccttgatatctctccggacctgccatttcagattaagccttctgagaaccactactcgctgctaaccagccagcctttggaccgggaggccacatcccactatatcatcgagctgctggccagcgatgctggttcaccttccctacacaaacatctcaccatcaggctcaacatttcagatgtcaatgacaatgcaccccgcttcaaccagcagctttacactgcttacatcctagaaaaccggcctccgggctcccttctttgcactgtggctgcctcagatccagacactggggataatgcccgcctcacctactccattgtaggaaatcaggttcagggagccccagcctcctcctttgtgtatgtcaacccagaggatggacggatctttgcccagcgtacctttgactatgaattgctgcagatgctgcagattgtggtgggggttcgagactccggctctcccccattgcatgccaacacatctctgcatgtgtttgtcctagacgagaatgataatgccccagctgtgctgcacccacggccagactgggaacactcagccccccagcgtctccctcgctctgctcctcctggctccttggtcaccaaggtgacagccgtggatgctgatgcaggccacaatgcgtggctctcctactcactgttgccacagtccacagccccaggactgttcctcgtgtctacacacactggtgaggtgcgcacagcccgggccttactggaggatgactctgacacccagcaggtggtggtcctggtgagggacaatggtgacccttcactctcctccacagccacagtgctgctggttctggaggatgaggaccctgaggaaatgcccaaatccagtgacttcctcatacaccctcctgagcgttcagaccttaccctttacctcattgtggctctagcgaccgtcagtctcttatccctagtcaccttcacctttctgtcagcgaagtgccttcagggaaacgcagacggggacgggggtggagggcagtgctgcaggcgccaggactcaccctccccggacttctataagcagtccagccccaacctgcaggtgagctcggacggcacgctcaagtacatggaggtgacgctgcggcccacagactcgcagagccactgctacaggacgtgcttttcaccggcctcggacggcagtgacttcacttttctaagacccctcagcgttcagcagcccacagctctggcgctggagcctgacgccatccggtcccgctctaatacgctgcgggagcggagccagcaagccccgcccaacacggactggcgtttctctcaggcccagagacccggcaccagcggctcccaaaatggcgatgacaccggcacctggcccaacaaccagtttgacacagagatgctgcaagccatgatcttggcgtccgccagtgaagctgctgatgggagctccaccctgggagggggtgccggcaccatgggattgagcgcccgctacggaccccagttcaccctgcagcacgtgcccgactaccgccagaatgtctacatcccaggcagcaatgccacactgaccaacgcagctggcaagcgggatggcaaggccccagcaggtggcaatggcaacaagaagaagtcgggcaagaaggagaagaagtaacatggaggccaggccaagagccacagggcggcctctccccaaccagcccagcttctccttacctgcacccaggcctcagagtttcagggctaacccccagaatactggtaggggccaaggccatgctccccttgggaaacagaaacaagtgcccagtcagcacctaccccttcccccccagggggttgaatatgcaaaagcagttccgctgggaacccccatccaatcaactgctgtacccatgggggtagtggggttactgtagacaccaagaaccatttgccacaccccgtttagttacagctgaactcctccatcttccaaatcaatcaggcccatccatcccatgcctccctcctccccaccccactccaacagttcctctttcccgagtaaggtggttggggtgttgaagtaccaagtaacctacaagcctcctagttctgaaaagttggaagggcatcatgacctcttggcctctcctttgattctcaatcttcccccaaagcatggtttggtgccagccccttcacctccttccagagcccaagatcaatgctcaagttttggaggacatgatcaccatccccatggtactgatgcttgctggatttagggagggcattttgctaccaagcctcttcccaacgccctggggaccagtcttctgttttgtttttcattgtttgacgtttccactgcatgccttgacttcccccacctcctcctcaaacaagagactccactgcatgttccaagacagtatggggtggtaagataaggaagggaagtgtgtggatgtggatggtgggggcatggacaaagcttgacacatcaagttatcaaggccttggaggaggctctgtatgtcctcaggggactgacaacatcctccagattccagccataaaccaataactaggctggacccttcccactacataatagggctcagcccaggcagccagctttgggctgagctaacaggaccaatggattaaactggcatttcagtccaaggaagctcgaagcaggtttaggaccaggtccccttgagaggtcagaggggcctctgtgggtgctgggtactccagaggtgccactggtggaagggtcagcggagccccagcaggaagggtgggccagccaggccattcttagtccctgggttggggaggcagggagctagggcagggaccaaatgaacagaaagtctcagcccaggatggggcttcttcaacagggcccctgccctcctgaagcctcagtccttcaccttgccaggtgccgtttctcttccgtgaaggccactgcccaggtccccagtgcgccccctagtggccatagcctggttaaagttccccagtgcctccttgtgcatagaccttcttctcccacccccttctgcccctgggtccccggccatccagcggggctgccagagaaccccagacctgcccttacagtagtgtagcgccccctccctctttcggctggtgtagaatagccagtagtgtagtgcggtgtgcttttacgtgatggcgggtgggcagcgggcggcgggctccgcgcagccgtctgtccttgatctgcccgcggcggcccgtgttgtgttttgtgctgtgtccacgcgctaaggcgaccccctcccccgtactgacttctcctataagcgcttctcttcgcatagtcacgtagctcccaccccaccctcttcctgtgtctcacgcaagttttatactctaatatttatatggctttttttcttcgacaaaaaaataataaaacgtttcttctgaaaagctg

SEQ ID NO: 117 - protein, 944 aa, Homo sapiens
  ref <308>: DATABASE ACCESSION NUMBER: Refseq / NP_061752
  ref <309>: DATABASE ENTRY DATE: 2001-09-29
MGPKTLPQLAGKWQVLCMLSLCCWGWVSGQLRYSVVEESEPGTLVGNVAQDLGLKMTDLLSRRLQLGSEENGRYFSLSLMSGALAVNQKIDRESLCGASTSCLLPVQVVTEHPLELIRVEVEILDLNDNSPSFATPEREMRISESAASGARFPLDSAQDPDVGTNTVSFYTLSPNSHFSLNVKTLKDGKPFPELVLEQQLDREAQARHQLVLTAVDGGTPARSGTTLISVIVLDINDNAPTFQSSVLRVGIPENAPIGTLLLRLNATDPDEGTNGQLDYSFGDHTSEAVRNLFGLDPSSGAIHVLGPIDFEESRFYEIHARARDQGQPAMEGHCVIQVDVGDVNDNAPEVLLASLANPVLESTPVGTVVGLFNVRDRDSGRNGEVSLDISPDLPFQIKPSENHYSLLTSQPLDREATSHYIIELLASDAGSPSLHKHLTIRLNISDVNDNAPRFNQQLYTAYILENRPPGSLLCTVAASDPDTGDNARLTYSIVGNQVQGAPASSFVYVNPEDGRIFAQRTFDYELLQMLQIVVGVRDSGSPPLHANTSLHVFVLDENDNAPAVLHPRPDWEHSAPQRLPRSAPPGSLVTKVTAVDADAGHNAWLSYSLLPQSTAPGLFLVSTHTGEVRTARALLEDDSDTQQVVVLVRDNGDPSLSSTATVLLVLEDEDPEEMPKSSDFLIHPPERSDLTLYLIVALATVSLLSLVTFTFLSAKCLQGNADGDGGGGQCCRRQDSPSPDFYKQSSPNLQVSSDGTLKYMEVTLRPTDSQSHCYRTCFSPASDGSDFTFLRPLSVQQPTALALEPDAIRSRSNTLRERSQQAPPNTDWRFSQAQRPGTSGSQNGDDTGTWPNNQFDTEMLQAMILASASEAADGSSTLGGGAGTMGLSARYGPQFTLQHVPDYRQNVYIPGSNATLTNAAGKRDGKAPAGGNGNKKKSGKKEKK

SEQ ID NO: 118 - DNA, 1416 bp, Rattus norvegicus; identical to SEQ ID NO: 114
  ref <308>: DATABASE ACCESSION NUMBER: EMBL / AB004277
  ref <309>: DATABASE ENTRY DATE: 2001-10-03

SEQ ID NO: 119 - protein, 313 aa, Rattus norvegicus; identical to SEQ ID NO: 115
  ref <308>: DATABASE ACCESSION NUMBER: SWISS-Prot / BAA20360
  ref <309>: DATABASE ENTRY DATE: 2001-12-01

SEQ ID NO: 120 - DNA, 4641 bp, Homo sapiens; identical to SEQ ID NO: 116
  ref <308>: DATABASE ACCESSION NUMBER: Refseq / NM_018929
  ref <309>: DATABASE ENTRY DATE: 2001-09-29

SEQ ID NO: 121 - protein, 944 aa, Homo sapiens; identical to SEQ ID NO: 117
  ref <308>: DATABASE ACCESSION NUMBER: Refseq / NP_061752
  ref <309>: DATABASE ENTRY DATE: 2001-09-29

SEQ ID NO: 122 - DNA, 924 bp, Rattus norvegicus
  ref <308>: DATABASE ACCESSION NUMBER: EMBL / AB006802
  ref <309>: DATABASE ENTRY DATE: 1997-09-04
cttgatttcgagcagttccagaccctacaactgggagtgaccgctagtgacagtggaaacccaccattaagaagcaatatttcactgacccttttcgtgctggaccagaatgacaacactccagagatcctatacccctctctccctactgatggctccactggtgtggaattggcgcctcgctccgcagagccaggttatttagtgaccaaggtggtggctgtagacagagactccgggcagaacgcttggctgtcctaccgcctgctcaaagccagcgagccaggcctcttctccgtggggctgcacacgggggaggtgcgcacggcccgagccatgatggacaaagatgctctcaagcagagcctcgttgtaactgtgcaggatcacggccagcctcctctctccgccactgtcaggctcaccgtggcggtggctgacagcatcccagaggttctggaggacttggttagtctagagtctcctgccaacccggatgagtcgagtctcaccctctacctagtggtggccatcactgcagtctcctgcatcttcctcatctttgtcatcgtactgctggctctcaggcttcggcgctggagctcatcacgtctgctccaggctgccagcggattggctggcgtgcctccttcgcactttgtgggtgtggacgggatgcatgctttcctccagacctattcccacgaagtttcgctcactgcagactcaaggaagagtcacctgatcttcccgcagcccaactatgcagacacgctcatcctagctcaggagacctgtgggaaaagcgagcctctactaatacctgaagactcagctacagttttaggcaaatgtgagccaaccgatattcagcaagccccgcccaacactgactggcgtttctctcaagcccagagacccaaa

SEQ ID NO: 123 - protein, 308 aa, Rattus norvegicus
  ref <308>: DATABASE ACCESSION NUMBER: SWISS-Prot / BAA22078
  ref <309>: DATABASE ENTRY DATE: 2003-02-01
LDFEQFQTLQLGVTASDSGNPPLRSNISLTLFVLDQNDNTPEILYPSLPTDGSTGVELAPRSAEPGYLVTKVVAVDRDSGQNAWLSYRLLKASEPGLFSVGLHTGEVRTARAMMDKDALKQSLVVTVQDHGQPPLSATVRLTVAVADSIPEVLEDLVSLESPANPDESSLTLYLVVAITAVSCIFLIFVIVLLALRLRRWSSSRLLQAASGLAGVPPSHFVGVDGMHAFLQTYSHEVSLTADSRKSHLIFPQPNYADTLILAQETCGKSEPLLIPEDSATVLGKCEPTDIQQAPPNTDWRFSQAQRPK

SEQ ID NO: 124 - DNA, 4872 bp, Homo sapiens
  ref <308>: DATABASE ACCESSION NUMBER: Refseq / NM_018914
  ref <309>: DATABASE ENTRY DATE: 2001-09-29
agaatgggctctaggcgccgctgctcaccaatcagggaatgggaagctgcgcgccattgagtccctccctcccccgcctctaccacacaaagcggaatgagatggatactcacagatcctgacactggagacttagaagtattttccttcgctttctgatatattttggatgtagtcggcctaggacttcatagatacataagccgattcacaaccaaccagctcgagaaaccgcggaatatcggcttagagcctgccatggcgaatcggctacagcgcggggaccgcagtcggctgctgctgctgctgtgcattttcctggggacgctgcgggggttccgggccaggcagatccgatattcggtgccagaagagaccgaaaagggctccttcgtgggcaatatctccaaggacctggggctggagccccgggagctggcgaagcgcggagtccgcatcgtctccagagggaagacacagcttttcgctgtgaatccgcgaagcggcagcttgatcacggcaggcaggatagaccgggaggagctctgtgagacggtgtcctcctgttttttaaatatggaacttctcgtggaagacaccttgaagatttacggagtggaggtggaaataatagatattaatgataacgcccccagcttccaggaggacgaagtggagataaaagtcagtgagcacgcaattcctggggcgcgatttgctcttcctaatgctagggatccagatgtgggcgtgaactccctccagagctaccagctcagccctaataattacttttccttgcaactgcggggcagaacggatggggccaagaatccagagctagtactggagggaagcctggaccgagagaaagaggctgctcacctgctcctcctcacagctttagatggaggcgatcccatccgaaagggcgcagttcccattcgtgtggtggtcctcgatgtaaatgatcacatcccaatgtttacacagtccgtatatcgcgtgagtgttccagaaaacatcagctccggaactcgggtgctgatggttaatgcaacggatccagacgagggaatcaacggggaagtaatgtattcatttcggaacatggaaagcaaggcttctgaaatattccaattggattcacaaactggagaagttcaagtacgggggtctctggattttgaaaaatatagattctatgagatggaaattcaaggccaagatggtggaggtctctttaccaccacgacgatgttgatcactgttgtggatgtgaatgataacgctccagaaataactatcacctcttctattaattcaattctggaaaactctcctccaggtacagtgattgctcttctaaatgtgcaagatcaagattctggagaaaatggtcaagtctcctgttttattcctaaccacctgccttttaaattagaaaagacttatggaaattattacaaattgataacaagcagagtgctggacagggagttggtccagagctacaatataacgttgacagccacagaccagggaagcccgcctttgtctgcagaaactcatgtctggctgaatgtggcagatgacaacgataaccctcccgtttttcctcactcctcttactctgcctacattcccgaaaacaaccccaggggtgcctccatcttctcagtgaccgccctcgacccggacagcaaacagaatgccctggtcacttactctctgacggatgacactgtccagggggtgcctctgtcctcctatgtctctattaactccaacactggtgttctctatgccctacaatccttcgactatgagcagtttcgagacttagaactgagagtgatagcacgtgacagcggggacccgcccctcagcagcaacgtgtcgctgagcctgttcgtgctggaccagaacgacaatgcgcccgagatcctgtaccctgccctccccacagacggctccactggcgtggagctggcgccccgctctgcggaacctggctacctggtgaccaaggtggttgcggtggacaaagattcaggccagaacgcctggctgtcctatcgcctgcttaaggccagcgagccgggactcttcgcggtgggggagcacacgggcgaggtgcgtacagcgcgggcactgctggacagagacgcgctcaagcagagcctcgtggtggccgtccaggaccacggccagccccctctctcggccaccgtcacgctcaccgtggctgtggccgacagcatccccgaagtcctggcggacctcggcagcctcgagtctctggctaactctgaaacctcagacctctcgctgtacttggtggtggcggtggccgcagtctcctgcatcttcctggtctttgtcatcgtgctgctggcactcaggctgtggcgctggcataagtcacgcctgctgcaggcttctgaaggcgggttggcaggtatgcccacgtcacattttgtaggcgtggacggggtacaggctttcctgcaaacctattcccacgaggtctctctcattgcggactcgcagaagagtcacctgattttcccccagcccaactatggggacacgctcatcagccaggagagctgtgagaaaagcgagccactcttgatagctgaagactcagctatcattttaggcaaatgtgacccgacaagtaatcagcaagccccgcccaacacggactggcgtttctctcaggcccagagacccggcaccagcggctcccaaaatggcgatgacaccggcacctggcccaacaaccagtttgacacagagatgctgcaagccatgatcttggcgtccgccagtgaagctgctgatgggagctccaccctgggagggggtgccggcaccatgggattgagcgcccgctacggaccccagttcaccctgcagcacgtgcccgactaccgccagaatgtctacatcccaggcagcaatgccacactgaccaacgcagctggcaagcgggatggcaaggccccagcaggtggcaatggcaacaagaagaagtcgggcaagaaggagaagaagtaacatggaggccaggccaagagccacagggcggcctctccccaaccagcccagcttctccttacctgcacccaggcctcagagtttcagggctaacccccagaatactggtaggggccaaggccatgctccccttgggaaacagaaacaagtgcccagtcagcacctaccccttcccccccagggggttgaatatgcaaaagcagttccgctgggaacccccatccaatcaactgctgtacccatgggggtagtggggttactgtagacaccaagaaccatttgccacaccccgtttagttacagctgaactcctccatcttccaaatcaatcaggcccatccatcccatgcctccctcctccccaccccactccaacagttcctctttcccgagtaaggtggttggggtgttgaagtaccaagtaacctacaagcctcctagttctgaaaagttggaagggcatcatgacctcttggcctctcctttgattctcaatcttcccccaaagcatggtttggtgccagccccttcacctccttccagagcccaagatcaatgctcaagttttggaggacatgatcaccatccccatggtactgatgcttgctggatttagggagggcattttgctaccaagcctcttcccaacgccctggggaccagtcttctgttttgtttttcattgtttgacgtttccactgcatgccttgacttcccccacctcctcctcaaacaagagactccactgcatgttccaagacagtatggggtggtaagataaggaagggaagtgtgtggatgtggatggtgggggcatggacaaagcttgacacatcaagttatcaaggccttggaggaggctctgtatgtcctcaggggactgacaacatcctccagattccagccataaaccaataactaggctggacccttcccactacataatagggctcagcccaggcagccagctttgggctgagctaacaggaccaatggattaaactggcatttcagtccaaggaagctcgaagcaggtttaggaccaggtccccttgagaggtcagaggggcctctgtgggtgctgggtactccagaggtgccactggtggaagggtcagcggagccccagcaggaagggtgggccagccaggccattcttagtccctgggttggggaggcagggagctagggcagggaccaaatgaacagaaagtctcagcccaggatggggcttcttcaacagggcccctgccctcctgaagcctcagtccttcaccttgccaggtgccgtttctcttccgtgaaggccactgcccaggtccccagtgcgccccctagtggccatagcctggttaaagttccccagtgcctccttgtgcatagaccttcttctcccacccccttctgcccctgggtccccggccatccagcggggctgccagagaaccccagacctgcccttacagtagtgtagcgccccctccctctttcggctggtgtagaatagccagtagtgtagtgcggtgtgcttttacgtgatggcgggtgggcagcgggcggcgggctccgcgcagccgtctgtccttgatctgcccgcggcggcccgtgttgtgttttgtgctgtgtccacgcgctaaggcgaccccctcccccgtactgacttctcctataagcgcttctcttcgcatagtcacgtagctcccaccccaccctcttcctgtgtctcacgcaagttttatactctaatatttatatggctttttttcttcgacaaaaaaataataaaacgtttcttctgaaaagctg

SEQ ID NO: 125 - protein, 935 aa, Homo sapiens
  ref <308>: DATABASE ACCESSION NUMBER: Refseq / NP_061737
  ref <309>: DATABASE ENTRY DATE: 2001-09-29
MANRLQRGDRSRLLLLLCIFLGTLRGFRARQIRYSVPEETEKGSFVGNISKDLGLEPRELAKRGVRIVSRGKTQLFAVNPRSGSLITAGRIDREELCETVSSCFLNMELLVEDTLKIYGVEVEIIDINDNAPSFQEDEVEIKVSEHAIPGARFALPNARDPDVGVNSLQSYQLSPNNYFSLQLRGRTDGAKNPELVLEGSLDREKEAAHLLLLTALDGGDPIRKGAVPIRVVVLDVNDHIPMFTQSVYRVSVPENISSGTRVLMVNATDPDEGINGEVMYSFRNMESKASEIFQLDSQTGEVQVRGSLDFEKYRFYEMEIQGQDGGGLFTTTTMLITVVDVNDNAPEITITSSINSILENSPPGTVIALLNVQDQDSGENGQVSCFIPNHLPFKLEKTYGNYYKLITSRVLDRELVQSYNITLTATDQGSPPLSAETHVWLNVADDNDNPPVFPHSSYSAYIPENNPRGASIFSVTALDPDSKQNALVTYSLTDDTVQGVPLSSYVSINSNTGVLYALQSFDYEQFRDLELRVIARDSGDPPLSSNVSLSLFVLDQNDNAPEILYPALPTDGSTGVELAPRSAEPGYLVTKVVAVDKDSGQNAWLSYRLLKASEPGLFAVGEHTGEVRTARALLDRDALKQSLVVAVQDHGQPPLSATVTLTVAVADSIPEVLADLGSLESLANSETSDLSLYLVVAVAAVSCIFLVFVIVLLALRLWRWHKSRLLQASEGGLAGMPTSHFVGVDGVQAFLQTYSHEVSLIADSQKSHLIFPQPNYGDTLISQESCEKSEPLLIAEDSAIILGKCDPTSNQQAPPNTDWRFSQAQRPGTSGSQNGDDTGTWPNNQFDTEMLQAMILASASEAADGSSTLGGGAGTMGLSARYGPQFTLQHVPDYRQNVYIPGSNATLTNAAGKRDGKAPAGGNGNKKKSGKKEKK

SEQ ID NO: 126 - DNA, 775 bp, Rattus norvegicus
  ref <308>: DATABASE ACCESSION NUMBER: EMBL / AB006881
  ref <309>: DATABASE ENTRY DATE: 1997-11-23
tttttttttttttttgccaggctggattttcgcttttaaagatcagtatcaataataccctgcttgtttcggttacactctccctctaaaagacagcccctctaattgatgcgtctgggctagtctagactggtagtgattgaaccaaccaccaattatgttattcatttcactgaacttcgctgatgggctccacgaggaagaagggagtgttgagaaacctgcccttgtgatgaagaagttgcctgctaatatataaaaacctgggtgtcacaggcactctgaatgcctgggcgcccggttttacatccgagaaacaggaggaatccactcgaaagcatagggactcagagtacaaacagaagcatttgtatggcgttgcccgatcattcgaaatcacagagaaattacagctatcctagctttattgatcctgcccacgtttcttctattaggctgtgtacatatcttgccttcaaaagcaccgaatgtctgccattctatcaaatgcatgatgtaaatatatattacccataagttaagctgatgtaccgccatcatttccacatagccatacatacacattggctgggctggggtggggaatcattaattactttatataaactcgcgggcaacctcttacagaactgtacgctttgaagcgtcttctaccaagtggtgccaagtaacagttaaattacagccgcacgggaggcttcaacaaaagacatggtacagttgttgtacacttcccagctcagcgtgctggtgc

SEQ ID NO: 127 - DNA, 1514 bp, Rattus norvegicus
  ref <308>: DATABASE ACCESSION NUMBER: EMBL / AB007690
  ref <309>: DATABASE ENTRY DATE: 2001-07-31
atgtgccgcgcggggagcagctgccgagcgggcggagagcgaacgccaggggccccgtcggagcggccacaggagcagcgccggagatgggagagcagcccatcttcaccacgcgagcgcacgtcttccagattgaccccagcaccaagaagaactgggtgccggcaagcaagcaggccgtcactgtttcctacttctacgatgtcaccaggaacagctatcggatcatcagtgtggatggagccaaggtaatcataaacagcaccatcaccccgaacatgacgttcaccaaaacttcacagaagttcgggcagtgggctgacagcagggccaacaccgtgttcggtctgggattctcctcagagcagcagctcacaaagtttgcagagaaattccaggaggtaagagaagctgccaggttagccagagacaagtcccaggagaaaatcgagacgtcaagtaatcattcccaagcatccagcgtcaatgggacagatgacgagaaagcctcccatgcgagtccggccgacacacacctcaagtctgagaatgacaagctgaagatcgctttgacacagagtgctgccaatgtgaagaagtgggagatcgagctgcagaccctgcgggagagcaatgcccggctgaccaccgcgctgcaggagtcggcggccagtgtagaacagtggaagcggcaattctccatctgcagagatgagaatgacaggctccgcagcaagattgaggagctggaagaacagtgcggtgagatcaacagggagaaggaaaagaacacccagctgaagaggaggattgaggagctggagtcagaggtccgagaaaaggaaatggagttgaaggatctccgcaaacaaagtgaaatcatacctcagctcatgtccgagtgtgaatatgtctctgagaagttagaggctgcagaaagagacaatcaaaacttggaagacaaagtgcggtctctaaagacagacatcgaggagagtaaataccggcagcgccacctgaagggggagctcaagagcttccttgaggtgctggacggaaagatcgatgacctccacgacttccgccgagggctctccaagctaggcacggataactagggtggggcggagcctagatggagagtggaaagcgtgtgtgagagatgaagtgggcatagggcattctccgtttgcttctgtaatgcgggtgcgttctgtctgtctccaggccagtcgtgccgtccactcgctcctccagaatagaaaatctcttgcttctctggctttgtgaggtcgtggacacctggaagcttctgactcaggaatccagaacggtctaccttagccgtttacgcagtcagggcagggacattcagatcttcccttaagggctgttgcaaccctatgaactggggatgggggaagtattttctaatccaagtatcattaacctttacaacaggcctttgggcgccttccgctgcgtggcactcagtgtgtgagactctagattcc

SEQ ID NO: 128 - protein, 343 aa, Rattus norvegicus
  ref <308>: DATABASE ACCESSION NUMBER: SWISS-Prot / BAA32479
  ref <309>: DATABASE ENTRY DATE: 2002-10-01
MGEQPIFTTRAHVFQIDPSTKKNWVPASKQAVTVSYFYDVTRNSYRIISVDGAKVIINSTITPNMTFTKTSQKFGQWADSRANTVFGLGFSSEQQLTKFAEKFQEVREAARLARDKSQEKIETSSNHSQASSVNGTDDEKASHASPADTHLKSENDKLKIALTQSAANVKKWEIELQTLRESNARLTTALQESAASVEQWKRQFSICRDENDRLRSKIEELEEQCGEINREKEKNTQLKRRIEELESEVREKEMELKDLRKQSEIIPQLMSECEYVSEKLEAAERDNQNLEDKVRSLKTDIEESKYRQRHLKGELKSFLEVLDGKIDDLHDFRRGLSKLGTDN

SEQ ID NO: 129 - DNA, 1972 bp, Homo sapiens
  ref <308>: DATABASE ACCESSION NUMBER: EMBL / BC012109
  ref <309>: DATABASE ENTRY DATE: 2001-08-07
cgcgcctggcggcggtggcggcagtggcagcagtggcagccgcgcagccccgcggaatggagcggcgccggggctgagccgggcgcgcacgggccgccgcatgtgccgcgcggggagcggctgccgagcgggcggagagcgagcgcgagaggccccgtcggagcggccgccggagcagcgccggagatgggagaacagcccatcttcaccacccgagcgcatgtcttccagattgaccccaacaccaagaagaactggatgcctgcgagcaagcaggcggtcaccgtttcctacttctatgatgtcacaaggaacagctatcggatcatcagtgtggacggagccaaggtgatcataaacagcacaatcacaccgaatatgaccttcaccaaaacgtcacagaagtttgggcagtgggccgacagcagagccaacacagtgtttggtttggggttttcctctgagcagcagctgacaaagtttgcagagaaattccaggaggtgaaagaagctgccaagatagccaaagacaagacgcaggagaaaatcgagacctcaagtaatcattcccaagcatccagtgtcaacgggacggacgatgaaaaggcctctcacgccggtccagccaacacacacctgaagtctgagaatgacaagctgaagattgccttgacgcagagcgcagccaacgtgaagaagtgggagatcgagctgcagacccttcgggagagcaatgcacggctgaccacagcactgcaggagtcggcagccagtgtggagcagtggaagaggcagttctccatctgccgtgatgagaatgaccggctccgcaacaagattgatgagctggaagaacaatgcagtgagatcaacagagagaaggagaagaacacgcagctgaagaggaggatcgaggagctggaggcagagctccgagaaaaggagacagagctgaaagatctccgaaaacaaagtgaaatcatacctcagctcatgtcagagtgcgaatatgtctctgagaagctagaggcggcagagagagacaatcaaaacctggaagacaaagtgcgttccttaaagacagacattgaggagagcaaataccgacagcgccacctgaaggtggagttgaagagcttcctggaggtgctggacgggaagattgacgacctgcatgacttccgccgagggctctccaagctgggcaccgataactagggctggccgaggcccaggccccgcccgtgagtcccaagcgtgtgtgcgagaccagatagctctaggacgttcttctgtgtgcattgcttctgtaaatgcaggcgcagtttgtcgtgtttccaaaccagttgtgccgtccactcactccttttcagaatagaaatctcctctcgcttctctggccttgtgaggttgtggacaactggaagattctgactcaggaatccagaactaggtctaccttcaacatttatgcagtcagggcagggatgtttatatctttcataagggctgttgcaaccatatgaactgaaaaaacacgcattttgtaatccaaatattgatattctttacaccaagccatcaggctccttttatcaaatagcattcagagtatttgaatgtccaccagacaccagccccggggggcacagagagaacaacattcctctctgtcaacatcgagaggctttaaaacaactgtttagtggaaactttctgagagatggaaaacaagcttctggtgggtgcattttctggcccggagttgcctgcatccacgctactgccccctgccccccgcccccccagtttgtacggttgcaacagtgttccttttcttggttttaatttctgagcagatgattgtgctgtgggaacagcacacagtgagggtgcctagcacaatgtctggcacaaagtaggtgcttaataaatatttgttcaattaaaaaaaaaaaaaaaaaaaaaaaaa

SEQ ID NO: 130 - protein, 354 aa, Homo sapiens
MGEQPIFTTRAHVFQIDPNTKKNWMPASKQAVTVSYFYDVTRNSYRIISVDGAKVIINSTITPNMTFTKTSQKFGQWADSRANTVFGLGFSSEQQLTKFAEKFQEVKEAAKIAKDKTQEKIETSSNHSQESGRETPSSTQASSVNGTDDEKASHAGPANTHLKSENDKLKIALTQSAANVKKWEIELQTLRESNARLTTALQESAASVEQWKRQFSICRDENDRLRNKIDELEEQCSEINREKEKNTQLKRRIEELEAELREKETELKDLRKQSEIIPQLMSECEYVSEKLEAAERDNQNLEDKVRSLKTDIEESKYRQRHLKVELKSFLEVLDGKIDDLHDFRRGLSKLGTDN

SEQ ID NO: 131 - DNA, 747 bp, Rattus norvegicus
  ref <308>: DATABASE ACCESSION NUMBER: EMBL / AB008521
  ref <309>: DATABASE ENTRY DATE: 1997-11-14
cacgattaccgagacgagcacctggacttcatccaggcgcatctgcggggattctgcctccagtatggagctgccttgatttacacctcagtgaaggaagagaaaaaccttgacttgctgtataagtacattgttcataaaacatacggcttccacttcaccatacccgccttagttgtggaaaaggacgcagtttttatacctgcaggatgggacaatgaaaagaaaatagctattttacatgaaaattttacaaccgtgaagccagaagatgcatatgaagattttattgtaaagcctcctgtgagaaagctggtccatgacaaagagttggcagctgaggatgagcaggtgttcctgatgaaacaacagtcactccttgccaagcagcctgccacgcccacaagaacctccgaatcccctgccagaggaccctctggctctccaaggacgcagggtcggggtggaccagctagtgtaccaagcgcctccccaggaacatcagtaaagaagccagatccaaacatcaaaaataatgcagcaagtgaaggggtattggccagcttcttcaatagtctgttgagtaaaaagacaggctctcctggaagtcccagtgctggtggagtgcagagcacagccaagaagtcaggacaaaagactgtgttgtcaaacgttcaggaagaactggatagaatgactcgaaaaccagactccatggtaacgaactcttcaacagaaaacgaagcc

SEQ ID NO: 132 - protein, 249 aa, Rattus norvegicus
  ref <308>: DATABASE ACCESSION NUMBER: SWISS-Prot / BAA23368
  ref <309>: DATABASE ENTRY DATE: 2001-12-01
HDYRDEHLDFIQAHLRGFCLQYGAALIYTSVKEEKNLDLLYKYIVHKTYGFHFTIPALVVEKDAVFIPAGWDNEKKIAILHENFTTVKPEDAYEDFIVKPPVRKLVHDKELAAEDEQVFLMKQQSLLAKQPATPTRTSESPARGPSGSPRTQGRGGPASVPSASPGTSVKKPDPNIKNNAASEGVLASFFNSLLSKKTGSPGSPSAGGVQSTAKKSGQKTVLSNVQEELDRMTRKPDSMVTNSSTENEA

SEQ ID NO: 133 - DNA, 2474 bp, Homo sapiens
  ref <308>: DATABASE ACCESSION NUMBER: Refseq / XM_003119
  ref <309>: DATABASE ENTRY DATE: 2002-08-01
gttcccgccgcctccaccgccaccgcctcagccgcctcgcacatttagtcttgccgggagtggtgtgattcccgaccaagatggcggccgtggggcgagtcggctccttcggttcttctccgccgggattatcctcgacttacactggcggccccttgggcaacgagatagcgtcgggcaacggtggcgccgcggcaggcgacgacgaggacgggcagaacctttggtcctgcatcctcagcgaggtctccacccgctcgcgctccaagctccctgcggggaagaacgtgctactgctgggtgaagatggagctggaaaaacaagcttaataagaaaaattcagggaatagaggagtataagaaaggaagaggattggaatatttgtacttaaatgtgcatgatgaagacagggatgatcaaacaagatgtaatgtttggatcttagatggagacctatatcacaaaggcctccttaaattttcactggatgccgtatctctgaaggatactctagttatgctggttgttgacatgtcaaagccttggactgctttggattctttacagaaatgggcaagtgttgttagagaacatgttgacaaactgaaaatccctcctgaagaaatgaaacaaatggaacaaaagttgattagagacttccaagaatatgtagagccaggagaagacttcccggcttctccccagagaagaaatactgcgtcacaagaagacaaagatgacagtgtagttttacctctgggtgcggatacacttacacataacttgggcattccagtactagtagtttgcacaaagtgtgatgccattagtgtattggagaaagaacatgactacagagatgaacattttgattttattcagtcacatatccggaagttttgtttacagtatggtgcagcacttatttacacttcagtaaaagaaaacaaaaatatagacttagtatataaatacatcgttcagaaactatatggatttccctataagattcctgctgttgttgtggaaaaggatgcagtatttattccagcagggtgggataatgataagaaaataggaatattacatgaaaattttcaaacattaaaagcagaagataattttgaagacatcataactaaaccacctgttcgaaagtttgtacatgagaaggaaattatggcagaagatgatcaggtgtttcttatgaagctacagtcccttttagcaaagcaaccaccaactgcagctggaaggcctgtggatgcctcaccaagagtcccaggaggctccccacgaacaccaaatagatctgtatcatctaatgttgccagcgtgtcacccattcctgctgggtcaaaaaaaattgatccaaacatgaaagctggagctacaagtgaaggcgttctggcaaatttcttcaacagtttgttgagtaaaaagactggctctccaggaggccctggtgtgagtggtggtagccctgcaggtggggctggaggtggaagcagtggtttaccaccatccaccaaaaagtcaggccagaagcctgtcttagatgttcatgcagaactagacagaattacacgaaaaccagttacagtttctcccacaacacctacatctcctacggaaggagaagcttcttgaagataccaaataaagccatttattctgttttctgggataatgtaaacatgcctctgccttttccttcaaaagtggaattagaaagctggagtgcttcttcagatggactaaatttatgtcgtgtgtgtgtgtgtgtgtgtgtgtggttacccattttttagaaggagccgtacagaagaaaaattattctacattatgtaggattgctgtttgcattgccattttgcataagaaagtaatttttgattttgaaaatctcaaaacttttagatctgaaatacagccatgtgatcgatcatattctaaaggctatttaaaacatgtaaaaggatttggggaacggcagaaaacatgcagtttgggcatttgactgacttggaagtctaagcttattttagttataactattaaaatcatttttaaaaatttgttagttttgctgacagagaaaaatcgtcagttgtcagattttgcacaccacaataaatgtaccaccacacacggaatatgctaagaaaactatcagatagcgtttgatacactagtcattgtctcaatcactgatcctgtaagttgtcatcaaaatatgatttagaaatattggccaaggtgttgctttaactgaggagaaaagaaagcacactgcctaaatgtgtaaaagaaaaatgcagaggttattaaaatgtaaagaagtaacaatctttggatttgtctatacatatatatatatatatatggctttgccttaatatacccccttttttgtttgtgactttcaactgtaatcagttaataaagtatttattctctgcattcaggttc

SEQ ID NO: 134 - protein, 523 aa, Homo sapiens
  ref <308>: DATABASE ACCESSION NUMBER: Refseq / XP_003119
  ref <309>: DATABASE ENTRY DATE: 2002-08-01
MAAVGRVGSFGSSPPGLSSTYTGGPLGNEIASGNGGAAAGDDEDGQNLWSCILSEVSTRSRSKLPAGKNVLLLGEDGAGKTSLIRKIQGIEEYKKGRGLEYLYLNVHDEDRDDQTRCNVWILDGDLYHKGLLKFSLDAVSLKDTLVMLVVDMSKPWTALDSLQKWASVVREHVDKLKIPPEEMKQMEQKLIRDFQEYVEPGEDFPASPQRRNTASQEDKDDSVVLPLGADTLTHNLGIPVLVVCTKCDAISVLEKEHDYRDEHFDFIQSHIRKFCLQYGAALIYTSVKENKNIDLVYKYIVQKLYGFPYKIPAVVVEKDAVFIPAGWDNDKKIGILHENFQTLKAEDNFEDIITKPPVRKFVHEKEIMAEDDQVFLMKLQSLLAKQPPTAAGRPVDASPRVPGGSPRTPNRSVSSNVASVSPIPAGSKKIDPNMKAGATSEGVLANFFNSLLSKKTGSPGGPGVSGGSPAGGAGGGSSGLPPSTKKSGQKPVLDVHAELDRITRKPVTVSPTTPTSPTEGEAS

SEQ ID NO: 135 - DNA, 2866 bp, Rattus norvegicus
  ref <308>: DATABASE ACCESSION NUMBER: EMBL / AB008538
  ref <309>: DATABASE ENTRY DATE: 1997-11-18
gtggaggaaagttgcgtgtggcacagacccgacggcgcagcgccacagcgaccgggggatcgtgtgtcttggaaaaaaaagtcgctgtccccctaagcgagacccacaagcgagcgggccccgtgggcccggggacgacgccccctctgcggcgtggactttgtcggtggccttctaggaggaggaatatggcatctaaagggtccccttcttgccgtctggttttctgcctcttgatctccgccgcggtcctcagaccaggcctcggatggtacactgtcaactcagcatacggagataccattgtcatgccttgcagactggatgtacctcagaacctcatgtttggcaaatggaaatatgaaaagcctgatgggtccccagtatttattgcattcagatcttctacaaagaaaagtgtgcagtatgatgatgtaccagagtacaaggacagactgagcctctcagaaaactacactctgtctatcaacaatgcaaagatcagtgacgaaaagagatttgtgtgcatgctagtgaccgaggacaacgtgtttgaggcacctaccctggtcaaggtgttcaagcaaccatctaaacctgaaattgtaaacagagcagcgtttcttgaaacagagcagctaaaaaagttaggtgactgcatttcaagagacagttacccagacggcaacatcacgtggtataggaatgggaaagtgctacagcctgttgatggagaggtgtccatactttttaaaaaggaaattgatccaggtactcagttgtataccatgacttcctccttggagtacaagacaaccaagtctgacatacaaatgccattcacctgttctgtgacatattatggaccttcgggccagaaaacaatttattctgaacaagcaatctttgatatttactatcctacagagcaggtgacaatacaagtactgccaccaaaaaatgccatcaaagaaggggacaacatcacccttcagtgcttggggaatggcaacccacctcctgaggagttcatgttttacttaccagggcaggctgaaggcataagaagctcaaacacttacacactgacagacgtgagacgcaatgccaccggggactacaaatgttctctcatcgaccaaagaaacatggcagcttcaacaaccatcactgttcactacttggatttatccttaaacccaagtggggaagtgaccaagcagatcggtgataccctgcctgtgtcttgcacaatatctgcaagtaggaatgcaactgtggtgtggatgaaggataacatcaggctccgatctagtccatccttttctagtcttcattatcaggatgctgggaactatgtctgtgaaactgctcttcaggaggttgagggactgaagaaaagggagtcgctgaccctcatcgtagaaggaaaacctcaaatcaaaatgacaaagaaaactgatcccagtggactgtctaagactataatctgccatgtggaagggtttccaaagccagctatacagtggaccattaccggcagtggaagcgtcataaaccaaacagaggagtctccttatattaatggcaggtattatagtaaaattatcatttcccctgaggagaatgttacattaacttgcacagcagaaaaccaactggagagaacagtaaactccctgaatgtctctgcgataagtattccagaacacgatgaggcagacgatataagtgatgaaaacagagaaaaggtgaatgaccaggccaaactaattgtgggcattgtggttggtctcctcctcgccgccctcgtcgccggtgtcgtctactggctgtacatgaagaaatcgaaaactgcatcaaaacatgtaaacaaggaccttggtaatatggaggagaataaaaagctagaagaaaacaatcacaaaacagaagcctaagagaggagttgtttagatgtcctgagaaaaaaacatataaagaaattgaagcatgaacgtgattgtatttaagacatatacaaagacaatgacagcaattcatggttcaagtattaagatgttcatcctactaagctgtcctgggatcttagagaattatctcaagtaaaacaatgaaataaagttataaaattacaacaagatttggcagccatgataataggtcatatgttgtatttcgtttgattttccttttctgtaaatgtctgcactgaggatttctttcagtttgccttttatgtaaattttttacgtagctatttttatacactgtaagctttgttctgggagtggctgttaattggatgtacaatgtaatgtttatttcaattgtttatatggatagtctgagcaggtgcggttctgattctgattgctatcagtaatgccccaaactttcttgtgaggatctgaaacccaaaggtggcagttatgagattgggacatggatcttgcccaatcagaagctggttttttttttaaaaaaaaaaacctggagagtcaggagcaccataagatatgatggtctctatgtgccaacgggttccccgaagcgggtcacaaacacatacggcaacaccacatgtgaatgatacttttaaactgacaatttcgtcttctctgaaaaaagacatacacagagtttgtataacactttacttaacgacacttgctagaaaattacattctgtttttaaaaaaaataaggaaaatgtaaagaagaatatctaatatgtcagagaaagttggaaacaaatcacagctcgcatccccatagtcgcagatcacgatgtaaatcactgtaattaaaattggtgttaaatcctttgggttatccactgccttaaaatgacacttatttcctt

SEQ ID NO: 136 - protein, 583 aa, Rattus norvegicus
  ref <308>: DATABASE ACCESSION NUMBER: SWISS-Prot / BAA23279
  ref <309>: DATABASE ENTRY DATE: 2003-02-01
MASKGSPSCRLVFCLLISAAVLRPGLGWYTVNSAYGDTIVMPCRLDVPQNLMFGKWKYEKPDGSPVFIAFRSSTKKSVQYDDVPEYKDRLSLSENYTLSINNAKISDEKRFVCMLVTEDNVFEAPTLVKVFKQPSKPEIVNRAAFLETEQLKKLGDCISRDSYPDGNITWYRNGKVLQPVDGEVSILFKKEIDPGTQLYTMTSSLEYKTTKSDIQMPFTCSVTYYGPSGQKTIYSEQAIFDIYYPTEQVTIQVLPPKNAIKEGDNITLQCLGNGNPPPEEFMFYLPGQAEGIRSSNTYTLTDVRRNATGDYKCSLIDQRNMAASTTITVHYLDLSLNPSGEVTKQIGDTLPVSCTISASRNATVVWMKDNIRLRSSPSFSSLHYQDAGNYVCETALQEVEGLKKRESLTLIVEGKPQIKMTKKTDPSGLSKTIICHVEGFPKPAIQWTITGSGSVINQTEESPYINGRYYSKIIISPEENVTLTCTAENQLERTVNSLNVSAISIPEHDEADDISDENREKVNDQAKLIVGIVVGLLLAALVAGVVYWLYMKKSKTASKHVNKDLGNMEENKKLEENNHKTEA

SEQ ID NO: 137 - DNA, 2539 bp, Homo sapiens
  ref <308>: DATABASE ACCESSION NUMBER: Refseq / NM_001627
  ref <309>: DATABASE ENTRY DATE: 2002-11-05
cgggacgacgccccctcctgcggcgtggactccgtcagtggcccaccaagaaggaggaggaatatggaatccaagggggccagttcctgccgtctgctcttctgcctcttgatctccgccaccgtcttcaggccaggccttggatggtatactgtaaattcagcatatggagataccattatcataccttgccgacttgacgtacctcagaatctcatgtttggcaaatggaaatatgaaaagcccgatggctccccagtatttattgccttcagatcctctacaaagaaaagtgtgcagtacgacgatgtaccagaatacaaagacagattgaacctctcagaaaactacactttgtctatcagtaatgcaaggatcagtgatgaaaagagatttgtgtgcatgctagtaactgaggacaacgtgtttgaggcacctacaatagtcaaggtgttcaagcaaccatctaaacctgaaattgtaagcaaagcactgtttctcgaaacagagcagctaaaaaagttgggtgactgcatttcagaagacagttatccagatggcaatatcacatggtacaggaatggaaaagtgctacatccccttgaaggagcggtggtcataatttttaaaaaggaaatggacccagtgactcagctctataccatgacttccaccctggagtacaagacaaccaaggctgacatacaaatgccattcacctgctcggtgacatattatggaccatctggccagaaaacaattcattctgaacaggcagtatttgatatttactatcctacagagcaggtgacaatacaagtgctgccaccaaaaaatgccatcaaagaaggggataacatcactcttaaatgcttagggaatggcaaccctcccccagaggaatttttgttttacttaccaggacagcccgaaggaataagaagctcaaatacttacacactgatggatgtgaggcgcaatgcaacaggagactacaagtgttccctgatagacaaaaaaagcatgattgcttcaacagccatcacagttcactatttggatttgtccttaaacccaagtggagaagtgactagacagattggtgatgccctacccgtgtcatgcacaatatctgctagcaggaatgcaactgtggtatggatgaaagataacatcaggcttcgatctagcccgtcattttctagtcttcattatcaggatgctggaaactatgtctgcgaaactgctctgcaggaggttgaaggactaaagaaaagagagtcattgactctcattgtagaaggcaaacctcaaataaaaatgacaaagaaaactgatcccagtggactatctaaaacaataatctgccatgtggaaggttttccaaagccagccattcagtggacaattactggcagtggaagcgtcataaaccaaacagaggaatctccttatattaatggcaggtattatagtaaaattatcatttcccctgaagagaatgttacattaacttgcacagcagaaaaccaactggagagaacagtaaactccttgaatgtctctgctataagtattccagaacacgatgaggcagacgagataagtgatgaaaacagagaaaaggtgaatgaccaggcaaaactaattgtgggaatcgttgttggtctcctccttgctgcccttgttgctggtgtcgtctactggctgtacatgaagaagtcaaagactgcatcaaaacatgtaaacaaggacctcggtaatatggaagaaaacaaaaagttagaagaaaacaatcacaaaactgaagcctaagagagaaactgtcctagttgtccagagataaaaatcatatagaccaattgaagcatgaacgtggattgtatttaagacataaacaaagacattgacagcaattcatggttcaagtattaagcagttcattctaccaagctgtcacaggttttcagagaattatctcaagtaaaacaaatgaaatttaattacaaacaataagaacaagttttggcagccatgataataggtcatatgttgtgtttggttcaattttttttccgtaaatgtctgcactgaggatttctttttggtttgccttttatgtaaattttttacgtagctatttttatacactgtaagctttgttctgggagttgctgttaatctgatgtataatgtaatgtttttatttcaattgtttatatggataatctgagcaggtacatttctgattctgattgctatcagcaatgccccaaactttctcataagcacctaaaacccaaaggtggcagcttgtgaagattggggacactcatattgccctaattaaaaactgtgatttttatcacaagggaggggaggccgagagtcagactgatagacaccataggagccgactctttgatatgccaccagcgaactctcagaaataaatcacagatgcatatagacacacatacataatggtactcccaaactgacaattttacctattctgaaaaagacataaaacagaatt

SEQ ID NO: 138 - protein, 583 aa, Homo sapiens
  ref <308>: DATABASE ACCESSION NUMBER: SWISS-Prot / Q13740
  ref <309>: DATABASE ENTRY DATE: 2002-06-15
MESKGASSCRLLFCLLISATVFRPGLGWYTVNSAYGDTIIIPCRLDVPQNLMFGKWKYEKPDGSPVFIAFRSSTKKSVQYDDVPEYKDRLNLSENYTLSISNARISDEKRFVCMLVTEDNVFEAPTIVKVFKQPSKPEIVSKALFLETEQLKKLGDCISEDSYPDGNITWYRNGKVLHPLEGAVVIIFKKEMDPVTQLYTMTSTLEYKTTKADIQMPFTCSVTYYGPSGQKTIHSEQAVFDIYYPTEQVTIQVLPPKNAIKEGDNITLKCLGNGNPPPEEFLFYLPGQPEGIRSSNTYTLMDVRRNATGDYKCSLIDKKSMIASTAITVHYLDLSLNPSGEVTRQIGDALPVSCTISASRNATVVWMKDNIRLRSSPSFSSLHYQDAGNYVCETALQEVEGLKKRESLTLIVEGKPQIKMTKKTDPSGLSKTIICHVEGFPKPAIQWTITGSGSVINQTEESPYINGRYYSKIIISPEENVTLTCTAENQLERTVNSLNVSAISIPEHDEADEISDENREKVNDQAKLIVGIVVGLLLAALVAGVVYWLYMKKSKTASKHVNKDLGNMEENKKLEENNHKTEA

SEQ ID NO: 139 - DNA, 859 bp, Rattus norvegicus
  ref <308>: DATABASE ACCESSION NUMBER: EMBL / AB008807
  ref <309>: DATABASE ENTRY DATE: 1999-04-09
tgcttcctgagtcacccgcaaacgagagcaggaccctcttggctctccgtctgctcggcgcagcgatgtccggggcgtccgccaggagcctggggaagggaagcgcgccccctggcccggtcccggaggccagatccgagtctacagcatgaggttctgtccctttgctcagaggacgctgatggtcctgaaggccaagggaatccggcatgaaatcatcaacatcaacctgaagaataagcccgagtggttctttgagaagaatccctttgggctggtgccggttctggagaacactcagggtcacttgatcactgaatctgtcatcacttgcgagtacctggatgaagcatacccggagaagaagttattcccagatgacccgtacgagaaagcttgccagaagatgacctttgagttattctcaaaggtgccgtctctggttacgagttttattagggcgaagagaaaggaagaccatccgggcataaaggaagaactgaagaaagagttcagcaagctagaagaggctatggctaataagaggacagccttcttcggtgggaattcgctctcaatgatcgattatcttatttggccgtggtttcagcgactggaagcactggagctcaatgagtgtatagaccacaccccaaaactcaagctctggatggcaaccatgcaggaagaccctgtggcatcatcccacttcattgatgccaagacctaccgtgattacttaagtctctacctacaggacagccccgaggcctgtgattatgggctctgaggggcaagagccctcagcgaatgatgttttccttcatcgattgaatagcatgcttttattttacccatt

SEQ ID NO: 140 - protein, 241 aa, Rattus norvegicus
  ref <308>: DATABASE ACCESSION NUMBER: SWISS-Prot / BAA34217
  ref <309>: DATABASE ENTRY DATE: 2001-10-16
MSGASARSLGKGSAPPGPVPEGQIRVYSMRFCPFAQRTLMVLKAKGIRHEIININLKNKPEWFFEKNPFGLVPVLENTQGHLITESVITCEYLDEAYPEKKLFPDDPYEKACQKMTFELFSKVPSLVTSFIRAKRKEDHPGIKEELKKEFSKLEEAMANKRTAFFGGNSLSMIDYLIWPWFQRLEALELNECIDHTPKLKLWMATMQEDPVASSHFIDAKTYRDYLSLYLQDSPEACDYGL

SEQ ID NO: 141 - DNA, 793 bp, Homo sapiens
  ref <308>: DATABASE ACCESSION NUMBER: Refseq / NM_004832
  ref <309>: DATABASE ENTRY DATE: 2002-05-16
tgcgccacgatgtccggggagtcagccaggagcttggggaagggaagcgcgcccccggggccggtcccggagggctcgatccgcatctacagcatgaggttctgcccgtttgctgagaggacgcgtctagtcctgaaggccaagggaatcaggcatgaagtcatcaatatcaacctgaaaaataagcctgagtggttctttaagaaaaatccctttggtctggtgccagttctggaaaacagtcagggtcagctgatctacgagtctgccatcacctgtgagtacctggatgaagcatacccagggaagaagctgttgccggatgacccctatgagaaagcttgccagaagatgatcttagagttgttttctaaggtgccatccttggtaggaagctttattagaagccaaaataaagaagactatgctggcctaaaagaagaatttcgtaaagaatttaccaagctagaggaggttctgactaataagaagacgaccttctttggtggcaattctatctctatgattgattacctcatctggccctggtttgaacggctggaagcaatgaagttaaatgagtgtgtagaccacactccaaaactgaaactgtggatggcagccatgaaggaagatcccacagtctcagccctgcttactagtgagaaagactggcaaggtttcctagagctctacttacagaacagccctgaggcctgtgactatgggctctgaagggggcaggagtcagcaataaagctatgtctgatattttccttcagtaaaaaaaaaa

SEQ ID NO: 142 - protein, 241 aa, Homo sapiens
  ref <308>: DATABASE ACCESSION NUMBER: SWISS-Prot / P78417
  ref <309>: DATABASE ENTRY DATE: 2002-06-15
MSGESARSLGKGSAPPGPVPEGSIRIYSMRFCPFAERTRLVLKAKGIRHEVININLKNKPEWFFKKNPFGLVPVLENSQGQLIYESAITCEYLDEAYPGKKLLPDDPYEKACQKMILELFSKVPSLVGSFIRSQNKEDYAGLKEEFRKEFTKLEEVLTNKKTTFFGGNSISMIDYLIWPWFERLEAMKLNECVDHTPKLKLWMAAMKEDPTVSALLTSEKDWQGFLELYLQNSPEACDYGL

SEQ ID NO: 143 - DNA, 859 bp, Rattus norvegicus; identical to SEQ ID NO: 139
  ref <308>: DATABASE ACCESSION NUMBER: EMBL / AB008807
  ref <309>: DATABASE ENTRY DATE: 1999-04-09

SEQ ID NO: 144 - protein, 241 aa, Rattus norvegicus; identical to SEQ ID NO: 140
  ref <308>: DATABASE ACCESSION NUMBER: SWISS-Prot / BAA34217
  ref <309>: DATABASE ENTRY DATE: 2001-10-16

SEQ ID NO: 145 - DNA, 793 bp, Homo sapiens; identical to SEQ ID NO: 141
  ref <308>: DATABASE ACCESSION NUMBER: Refseq / NM_004832
  ref <309>: DATABASE ENTRY DATE: 2002-05-16

SEQ ID NO: 146 - protein, 241 aa, Homo sapiens; identical to SEQ ID NO: 142
  ref <308>: DATABASE ACCESSION NUMBER: SWISS-Prot / P78417
  ref <309>: DATABASE ENTRY DATE: 2002-06-15

SEQ ID NO: 147 - DNA, 859 bp, Rattus norvegicus; identical to SEQ ID NO: 139
  ref <308>: DATABASE ACCESSION NUMBER: EMBL / AB008807
  ref <309>: DATABASE ENTRY DATE: 1999-04-09

SEQ ID NO: 148 - protein, 241 aa, Rattus norvegicus; identical to SEQ ID NO: 140
  ref <308>: DATABASE ACCESSION NUMBER: SWISS-Prot / BAA34217
  ref <309>: DATABASE ENTRY DATE: 2001-10-16

SEQ ID NO: 149 - DNA, 793 bp, Homo sapiens; identical to SEQ ID NO: 141
  ref <308>: DATABASE ACCESSION NUMBER: Refseq / NM_004832
  ref <309>: DATABASE ENTRY DATE: 2002-05-16

SEQ ID NO: 150 - protein, 241 aa, Homo sapiens; identical to SEQ ID NO: 142
  ref <308>: DATABASE ACCESSION NUMBER: SWISS-Prot / P78417
  ref <309>: DATABASE ENTRY DATE: 2002-06-15

SEQ ID NO: 151 - DNA, 859 bp, Rattus norvegicus; identical to SEQ ID NO: 139
  ref <308>: DATABASE ACCESSION NUMBER: EMBL / AB008807
  ref <309>: DATABASE ENTRY DATE: 1999-04-09

SEQ ID NO: 152 - protein, 241 aa, Rattus norvegicus; identical to SEQ ID NO: 140
  ref <308>: DATABASE ACCESSION NUMBER: SWISS-Prot / BAA34217
  ref <309>: DATABASE ENTRY DATE: 2001-10-16

SEQ ID NO: 153 - DNA, 793 bp, Homo sapiens; identical to SEQ ID NO: 141
  ref <308>: DATABASE ACCESSION NUMBER: Refseq / NM_004832
  ref <309>: DATABASE ENTRY DATE: 2002-05-16

SEQ ID NO: 154 - protein, 241 aa, Homo sapiens; identical to SEQ ID NO: 142
  ref <308>: DATABASE ACCESSION NUMBER: SWISS-Prot / P78417
  ref <309>: DATABASE ENTRY DATE: 2002-06-15

SEQ ID NO: 155 - DNA, 3891 bp, Rattus norvegicus
  ref <308>: DATABASE ACCESSION NUMBER: EMBL / AB009463
  ref <309>: DATABASE ENTRY DATE: 1998-08-13
ccgatcgacgcaccctcgttgacatcgtgcggcgcggcgcggcgcgggcggcccggggaccgacgggcaggcgcaccggggcatgggcgcgccggaggtctcggtgtgcaggcagggctgggtgcgccggccggggctcggggacagcggcgggctcaggtcttccctggcgaccgctgctgagcccccgcggggcccgtgacgccgcggccgatgtggcccagcgcgttgcgggcctgcaccgccgctgcacaaagacgccgccgcagccgccgcccgcaccccggccgcagccgccgcgccagccctagccccaggcggagtcccggccgcagggcagcaggcgtccgcgcgcggccggccacggcatggagaagcgcgcggccgcggggccggagggggcgccgggcgccagggcgccgctcgcagtcgtctgcctggtgaacctctttctcactgggagactcagcagtgcagttcctgccttagctgcctgcagtgggaagttggaacagcacactgaacggcgaggggttatctacagcccagcctggcccctcaactaccctccaggcaccaactgcagctggtacattcaaggtgaccgtggtgacatgatcaccatcagtttccgaaactttgatgtagaggagtctcaccagtgttccctggactggctcctgctgggcccagcagctccccctcgccaggaggccttccgcctctgtggttcagccatcccaccagccttcatctctgcccgtgaccacgtctggatcttcttccactcagacgcctccagttccggccaggcccagggttttcgcctctcctatatccgagggaagctgggtcaggcatcctgccagacagatgagttccgctgtgacaacggtaaatgcttgcctggtccttggcagtgcaacatggtggatgagtgtggagatggctcggatgagggtaactgttcggcacctgcctcagagccaccaggcagcctgtgccccgggggcaccttcccgtgcagcggagctcgctccacacgctgcctgccggtagagcggcgctgcgacggcacccaggactgcggtgatggctctgatgaggctggctgccccgacctagcatgtggccggcggctaggcagtttctacggttccttcgcctccccagacctgtttggtgccgcccgtgggccttcggaccttcactgcacatggctggtggacacgcaggacccgaggcgtgtgctgctgcagctggagctacgactgggttatgatgactatgtccaggtgtatgaaggcctgggcgagcgtggggaccgtctgctgcaaacgctttcctaccgcagcaaccaccggcctgtgagcctggaagcagcgcagggccgcctcactgtggcctaccatgctcgcgcccgcagtgctggtcacggcttcaacgccacataccaggtgaagggctactgcctcccatgggagcagccgtgtgggagcagcagcgagggagatgacggcagcacaggggaacagggctgcttctcagagccacagcgctgtgatggctggtggcattgtgcgagcggccgggatgagcagggctgtccagcatgccctccggaccagtatccctgtgagggtggtagcggcctgtgctatgcacctgccgatcgttgcaacaaccagaaaagctgccccgatggcgccgatgaaaagaactgcttttcctgccagccgggcaccttccactgtggtacgaacctgtgcatctttgagacatggcgctgtgacggtcaggaggactgccaagatggcagcgatgagcacggctgcctggctgccgtgccccgcaaggtcatcaccgccgccctcattggtagcctagtatgcggactgctgcttgttattgccctaggctgtgccttcaaactctactccctgcgcacgcaggagtacagggcctttgagacccaaatgacacgtttagaggctgagtttgtgcggcgcgaggcgcccccatcctacggtcagctcatcgcacagggcctcataccacccgttgaggattttcctgtctacagtgcatcccaggcttcagtgctacagaaccttcgcacagccatgcgacgacagatgcgtcggcatgcctcccgcagggggccatctcgtcgcagactgggccgcctctggaacaggctcttccaccggccacgggcacctcgaggccagatcccactgctgactgccgcccgtacctcacagaccgtgctgggtgatgggctcctccaggcagcaccagggcctgtaccagaccccccagtgcccaatacagacacaggcagccccagggaggctggagatgggcctcctagtggctctggccatgcaccagaagtggggccttcagtgccgcccccgcccttgaaccttcgagacccagagtacaggccagaggacaaggagagaaaggcctgtgtggaccctctggaagacagtccagcccctgtggacacacctccagagccctgcttggcccaagacccccacccccagactcccactgccagtggcatccaagatccccactcagcagagccactgggggtctgcaggagccctccaccaacctgctccccaatattggaggctagtgatgatgaggccctgctggtctgctgacccattggacacactggtgactgccacagccccgctttggaaccagggaatacacagtcatttctaccctgcctctgcattctttcttacagagacccacctagcagctccggtgaagggcctgggcactcagtcagtgggctacctgtgcagtcctattgctctgaagggcattactgtcaggggcttcgggggtggacctgggaaagagggaccgaccacctttgagatcagcatgagcatagccccttggagtctcacagcaaattgctccctgctacactaatctcgggactcatttccagaaaagcaggagagccagaaccaggctttccggaatgttttctgtggcttctcagtttatccaccctgcagtggcaccagctgctcatcctcagacctgtgccaggagctgtagttgaggcctaaaaaggccatgagaggggtagggtggacctcattcatggtgagtactatattcatccttccccacagggtccctaggaaagatgggctagtggcttctgccccagtctcatgcctatggtggcagcataggcctggctaggctgggtcagtccccaagtatcatgggtaaggctaaaagtatgagataggatgaccacaagagaggccattctatgccttcaaaggagacagaagccaaggtactggctgacaatggaaataaccattctgtcttgcctcagagtctcagtttccccacctgaagagagggctgtgctatcataagtaatagcattcactctggtgatttatgggaaggacagtagttcagctggggaatttctgggttcttctggatggccaagttcaaggtggcgtggagggttatggatggagcctcattgtcttctatgggccccatggagccagcctcaggttcaaccagcaaaacccactagggctgaaaacctcctccatagcaccttcccagctagcaacccatataccgcgctgaggcatgtctccatgaactccccttacacacagaacaaccagccctgtttatttacagacttttctggagaagctagcagggcattgctaaggcaggaagcccgaccccagtggccagtcccttacaataggcctctaagggtcgggtctctttttttgtgcagaaaaaaaaatttttgaaaacaaaacagaacacaaaccccttctcaataaacaacatgtaaacaga

SEQ ID NO: 156 - protein, 770 aa, Rattus norvegicus
  ref <308>: DATABASE ACCESSION NUMBER: SWISS-Prot / BAA32331
  ref <309>: DATABASE ENTRY DATE: 2003-02-01
MEKRAAAGPEGAPGARAPLAVVCLVNLFLTGRLSSAVPALAACSGKLEQHTERRGVIYSPAWPLNYPPGTNCSWYIQGDRGDMITISFRNFDVEESHQCSLDWLLLGPAAPPRQEAFRLCGSAIPPAFISARDHVWIFFHSDASSSGQAQGFRLSYIRGKLGQASCQTDEFRCDNGKCLPGPWQCNMVDECGDGSDEGNCSAPASEPPGSLCPGGTFPCSGARSTRCLPVERRCDGTQDCGDGSDEAGCPDLACGRRLGSFYGSFASPDLFGAARGPSDLHCTWLVDTQDPRRVLLQLELRLGYDDYVQVYEGLGERGDRLLQTLSYRSNHRPVSLEAAQGRLTVAYHARARSAGHGFNATYQVKGYCLPWEQPCGSSSEGDDGSTGEQGCFSEPQRCDGWWHCASGRDEQGCPACPPDQYPCEGGSGLCYAPADRCNNQKSCPDGADEKNCFSCQPGTFHCGTNLCIFETWRCDGQEDCQDGSDEHGCLAAVPRKVITAALIGSLVCGLLLVIALGCAFKLYSLRTQEYRAFETQMTRLEAEFVRREAPPSYGQLIAQGLIPPVEDFPVYSASQASVLQNLRTAMRRQMRRHASRRGPSRRRLGRLWNRLFHRPRAPRGQIPLLTAARTSQTVLGDGLLQAAPGPVPDPPVPNTDTGSPREAGDGPPSGSGHAPEVGPSVPPPPLNLRDPEYRPEDKERKACVDPLEDSPAPVDTPPEPCLAQDPHPQTPTASGIQDPHSAEPLGVCRSPPPTCSPILEASDDEALLVC

SEQ ID NO: 157 - DNA, 1918 bp, Homo sapiens
  ref <308>: DATABASE ACCESSION NUMBER: Refseq / NM_019849
  ref <309>: DATABASE ENTRY DATE: 2002-11-04
cggctgcgagggccgtgagctcacggaccgacggaccgacgggcggccggccggacagacggggcagcgcagggagcggggacgcggcgggacagcgacatggccggccacacgcagcagccgagcgggcgcgggaaccccaggcctgcgccctcgccctccccagtcccagggaccgtccccggcgcctcggagcgggtggcgctcaagaaggagatcgggctgctgagcgcctgcaccatcatcatcgggaacatcatcggctcgggcatcttcatctcgcccaagggggtcctggagcactcaggctccgtgggtctggccctgttcgtctgggtcctgggtgggggcgtgacggctctgggctccctctgctatgcagagctgggagtcgccatccccaagtctggcggggactacgcctacgtcacagagatcttcgggggcctggctggctttctgctgctctggagcgccgtcctcatcatgtaccccaccagccttgctgtcatctccatgaccttctccaactacgtgctgcagcccgtgttccccaactgcatcccccccaccacagcctcccgggtgctgtccatggcctgcctgatgctcctgacatgggtgaacagctccagtgtgcgctgggccacgcgcatccaggacatgttcacaggcgggaagctgctggccttgtccctcatcatcggcgtgggccttctccagatcttccaaggacacttcgaggagctgaggcccagcaatgcctttgctttctggatgacgccctccgtgggacacctggccctggccttcctccagggctccttcgccttcagtggctggaacttcctcaactatgtcaccgaggagatggttgacgcccgaaagaacctacctcgcgccatcttcatctccatcccactggtgaccttcgtgtacacgttcaccaacattgcctacttcacggccatgtccccccaggagctgctctcctccaatgcggtggctgtgaccttcggggagaagctgctgggctacttttcttgggtcatgcctgtctccgtggctctgtcaaccttcggagggatcaatggttacctgttcacctactccaggctgtgcttctctggagcccgcgaggggcacctgcccagcctgctggccatgatccacgtcagacactgcacccccatccccgccctcctcgtctgttgcggggccacagccgtcatcatgctcgtgggcgacacgtacacgctcatcaactatgtgtccttcatcaactacctctgctacggcgtcaccatcctgggcctgctgctgctgcgctggaggcggcctgcactccacaggcccatcaaggtgaaccttctcatccccgtggcgtacttggtcttctgggccttcctgctggtcttcagcttcatctcagagcctatggtctgtggggtcggcgtcatcatcatccttacgggggtgcccattttctttctgggagtgttctggagaagcaaaccaaagtgtgtgcacagactcacagagtccatgacacactggggccaggagctgtgtttcgtggtctacccccaggacgcccccgaagaggaggagaatggcccctgcccaccctccctgctgcctgccacagacaagccctcgaagccacaatgagatttttgtagagactgaagcagttgtttctgtttacatgttgtttattgaggaggtgttttggcaaaaaagttttgttttgtttttttctggaaaaaaaagaaaaaagatacgactctcagaagcctgttttaaggaagccctaaaatgtggactgggtttcctgtcttagcactgccctgctagctcttcctgaaaaggcctataaataaacagggctggctgttaaaaaaaaaaaaaaaaaaaa

SEQ ID NO: 158 - protein, 770 aa, Homo sapiens
  ref <308>: DATABASE ACCESSION NUMBER: SWISS-Prot / BAA32330
  ref <309>: DATABASE ENTRY DATE: 2003-02-01
MEKRAAAGLEGAPGARAQLAVVCLVNIFLTGRLSSAVPALAACSGKLEQHTERRGVIYSPAWPLNYPPGTNCSWYIQGDRGDMITISFRNFDVEESHQCSLDWLLLGPAAPPRQEAFRLCGSAIPPAFISARDHVWIFFHSDASSSGQAQGFRLSYIRGKLGQASCQADEFRCDNGKCLPGPWQCNTVDECGDGSDEGNCSAPASEPPGSLCPGGTFPCSGARSTRCLPVERRCDGLQDCGDGSDEAGCPDLACGRRLGSFYGSFASPDLFGAARGPSDLHCTWLVDTQDSRRVLLQLELRLGYDDYVQVYEGLGERGDRLLQTLSYRSNHRPVSLEAAQGRLTVAYHARARSAGHGFNATYQVKGYCLPWEQPCGSSSDSDGGSLGDQGCFSEPQRCDGWWHCASGRDEQGCPACPPDQYPCEGGSGLCYTPADRCNNQKSCPDGADEKNCFSCQPGTFHCGTNLCIFETWRCDGQEDCQDGSDEHGCLAAVPRKVITAALIGSLVCGLLLVIALGCAFKLYSLRTQEYRAFETQMTRLEAEFVRREAPPSYGQLIAQGLIPPVEDFPVYSASQASVLQNLRTAMRRQMRRHASRRGPSRRRLGRLWNRLFHRPRAPRGQIPLLTAARPSQTVLGDGFLQPAPGAAPDPPAPLMDTGSTRAAGDRPPSAPGRAPEVGPSGPPLPSGLRDPECRPVDKDRKVCREPLADGPAPADAPREPCSAQDPHPQVSTASSTLGPHSPEPLGVCRNPPPPCSPMLEASDDEALLVC

SEQ ID NO: 159 - DNA, 3891 bp, Rattus norvegicus; identical to SEQ ID NO: 155
  ref <308>: DATABASE ACCESSION NUMBER: EMBL / AB009463
  ref <309>: DATABASE ENTRY DATE: 1998-08-13

SEQ ID NO: 160 - protein, 770 aa, Rattus norvegicus; identical to SEQ ID NO: 156
  ref <308>: DATABASE ACCESSION NUMBER: SWISS-Prot / BAA32331
  ref <309>: DATABASE ENTRY DATE: 2003-02-01

SEQ ID NO: 161 - DNA, 1918 bp, Homo sapiens; identical to SEQ ID NO: 157
  ref <308>: DATABASE ACCESSION NUMBER: Refseq / NM_019849
  ref <309>: DATABASE ENTRY DATE: 2002-11-04

SEQ ID NO: 162 - protein, 770 aa, Homo sapiens; identical to SEQ ID NO: 158
  ref <308>: DATABASE ACCESSION NUMBER: SWISS-Prot / BAA32330
  ref <309>: DATABASE ENTRY DATE: 2003-02-01

SEQ ID NO: 163 - DNA, 5990 bp, Rattus norvegicus
  ref <308>: DATABASE ACCESSION NUMBER: EMBL / AB009636
  ref <309>: DATABASE ENTRY DATE: 1998-04-18
gaggaagcaaagaccgggcaaaacacatgaaggaaaatttggaacttcttttataatatcaacaagacatttggggccaaataaatcctctccgttacacaaaaccaaaaatggcatacaattggcaaacagagccaaaccgtgctgaaccacaggaaggtggacatgatcaccagcagtgtcaccatgcagaccagcacctttcttccaggcaagtcaggttgggttttgatcagcttgtggaagagctcagtaacaaaactccactgcctgaggatgaaaaagaaggcacgtgttttgtaccagatacaccaaacttggattcaaaatggcaatccatatatggaccccacccaaggcacttcaatgaattcacttctcagagtccccacttctcccagcttccttttggaaaagcatcagccattggttttaatcctgctgtattacctgcacatcagttcattcatgagggagcctcctggagaaatcccacaagaaaatatcatggtggtgaggatcccaggttcagtgctctaactccgtcatccactggcttggataaatgtcatcaacaaggacaatcagggaccgaacattgtaactattatgtggaacctgaaaacaatgttccccatcattattcaccctactcaatggactccatacccgatagtgaggaaaaaggaagtggagatgcggatcttgtagaaccttctctggtgttctctaaagactcctttctacccagggcatcggagaacatgtcagtggaaagcacagagcccattggttgcccccttgaaatagttgaagcaccccaagggagtaacaagagcctcgcctccttttgcaacaatgtaacaaaaataagaggactatatcatgcaagtgacactaattccaattccggaaagatctgggccatcaccacagcctatccatctcggctcttcgctgacacccagttcagagttaaaatttccactgataactcggcacaacttcttcttcttaagccacccgctaattatcttgtcaaagacctaattgccgaaattctacttttatgtgcaaatgagcagctttcccccaaagagtatcttctaagtatatgcggttctgaggaatttttacagacggatcactgtctagggagccacaaaatatttcagaaaagtaaatctgtcattcaactccatctccagagaagcagggacactccaggaaaattatcccggaagagggatgatgaccgcagtcgggtccatctgaaccaacttctagaatttacacatatttggaaaatatccagacaatgcctctccacagtaatgaaaagctacaacctccatgtcgagcacctgttgaaaacccaggaagatgtggaggagaaacctctgtcatccatgttttcctgtggccgacaccctcctcagccacatgggaatgacattattgaagatgttagaaacatatgcagtgttctggggtgtattgaaaccaaacaagtttcagatgcagtaaaagaactaactctaattctgcagagaccatcacagaattttcatcagaattcagagacttcaaaaaaaggcttcatagagaacgtgacatcggaactgtcgaggtccctccatcagctggttgacgtgtactgcagtagcttttgtacagatttccggcctgcgcgcgcacctggaggcgtctcccgcgaccacgctgggctccactcccacctgagcttcacggtgtgttccctgcacaatgttccagaaacttgggcacacagctacaaagcattttcattttcctgctggctcacatatgctgggaagaagctgtgccaagtgaaaagctgcagatccctgccagtcacaaagtcattctctttttcggtgaactggaatgaaataatcaattttcctcttgagataaagtcacttccaagagaatccatgctcgttataaagctgtttgggattgacagtgccacccacagcgcaaatctgctggcctggacctgccttccactatttccaaaagaaaagtctccgctggggtctaggcttctcagcatgacactacagagtgagcctcctatagaaatgatggctccaggagtatgggatgggagccagcctaccccactgaccctgcagatagattttccagctgccacgtgggagtacgtgaaacctgagactgaagagaacagaactgaccaccaagagcctccaagagagtgtttaaaacacatcgccagactctcccaaaagcagcctcccttgctactttctgtggaaaagaggagatatttgtggttttatcgtttctactgcaacaatgagaactcctctctccctctggtcttgggcagcgcccctggttgggatgaagggacagtttcggaaatgcatgccgtcttgagaaggtggacattttcccatccgttggaagctcttggccttttgacttccaggtttccagaccaagacattcgtgaagttgccgttcaacagttagacaacttcttgaccgatgagctgctggactgcctcccacagctagttcaggctgtcaagtttgagtggagtctcgaaagtcccttggtggaactcctgcttcatcgatccttgcaaagcatccgagtggctcaccgcctgttctggctgctgcgggatgcacaaggtgaagactactttaaaagctggtaccaggagcttttggccgctctccagttctgtgcaggagaagccctgatcgaagagctttccaaagagcagaaacttgtcaaactcctgggtgatattggagaaaaagtgaagtcggctggcgatgctcagagaaaggatgtgctaaagaaggagattggcagtctagaagaattctttaaagatataaagacttgccatcttcctctgaacccggccctgtgcgtaaaaggaattgatcgggatgcatgttcatatttcacatctaatgccttgccattgaagatcactttcatcaatgctaatccaatgggcaaaaatatcagtgttatttttaaggccggcgacgatcttcggcaggatatgcttgttctgcagattattcaagtgatggacaacgtttggcttcaggagggcctcgatatgcaaatgatcatttatggatgtctagccacaggaaaggctcaaggattcatagagatggtgcctgatgctgtaacgcttgccaagatccatctgcactctgggctgataggacccctgaaagaaaacaccatcaagaagtggttcagtcagcacaaccacttaaaggaagattatgaaaaggccttgaggaactttttttactcttgtgctggctggtgtgtggtgacattcatcttgggagtctgtgaccgacataatgacaatatcatgctgacaaagtcaggccacatgtttcatattgactttggaaaattcttgggtcacgcacaaacatttggcggtataaaaagggaccgagcgcctttcatttttacttcagagatggagtactttattacggagggtgggaaaaacacacagcattttcaagacttcgtggaactctgctgcagagcctacaacattgtgaggaagcacagccaactgctcctgagccttctagaaatgatgctgcatgccgggcttcctgagctgagggggattgaagacctgaaatacgtacacgacaatctccggccacaagacacagacctggaagccacaagtcattttaccacgaagataaagcagagtctggagtgcttcccagttaaactgaataacctgatccacacgcttgcacagatgccagccttcagccttgccagacctgcccctcagactcctccccaggagtgctgcgtcctgaataaaaccaggacaattcagagagtcacaattttagggttcagcaagacacacagcaacctgtacctgatcgaggtgacacgcagcgacaacaggaaaaacctggccaaaaagtccttcgagcagttttacagacttcacagccagattcagaagcagttccccttgttgactctcccagagtttcctcactggtggcatctacctttcacagactcgcaccatgagagaatccgagatctgagtcactacgtggaacaggtgctgcacggatcttacgaagtcgcaaacagtgattgtgtactcagtttttttctctctgaacatatacaacagacccttgaagactctccatttgtggacccaggtgaccattctccagacaagagcccccaggtgcagttgctgatgacctatgaggacacaaagctcaccatcctagtgaaacacttgaaaaacatccatctcccagatggctcagcgcccagcgcacatgttgaaatttatcttctgccacatcccagtgaagttcgcaggaagaaaacaaagtgcgttccaaaatgcactgacccaacttacaatgaaattgtggtatatgatgacgtctcaggacttcagggacatgttttaatgctcattgtgaagagcaaaactgtatttgtgggagcggttaacattcagctctgcagtgttcccctcaatgaagaaaagtggtacccattagggaacagtatcatctgaccaatgccatgaatgtatgcattattgattaagtacttgtgtgttttcagcttccatttcccctatagcatacacaaggcatctttcttgcggaagatggcttggagcagtggttctcactcagcgtccctaacactgcgaccctttaatacaattcctggtgattgtagtgacccaaaccacaaaattattttagttgctatttcacaactgtaattttgacacggttatgaattgcaatgtatatatctgatctacaggatacctactattcgacccctgtgataaaagggtcattggacaatcccaaagggtcatgactcatgggttgagaaccacaggcttagagtggtcacagaagaagcagatcaaaatcagtcttttgtagctctttcttctctaccttctccttattttcttatcatattttctccttggaatattcatcatggaaaatcccatatgcaaagtcatgaaagaatgattcatttaatatgcatttttgaatcaaactaagttcatgtcttgccttaattgcttgttgaggtcaaaattatacttttagggtgttttctaaagctaggagaagctcatgtaagggttaagaatatttgcaatatatttcaaaagttaaatatgtgtacaagccacatatctagtcatgattgaatttattgagagaattggtgatctccaaccatgtgctataatttttctatcaaaaaaaaatccctaagatttttctattgcatagattttttttctttaagaatttcatgcatgtatatagtgctttcgttattgtagcttctctcttttttagttgtccccacacccatcaacaactgttcttctctaaaactcctgtattcctgtggggagttttatttttaagatgggcatcaaactatatatcccagctgacctagagcttgctatgttgaccaggtgggccccaaatcacagtggtcctcctgcctctgtttcccgaccgctaaggttccaggtcattggatcttgtctgtaatttttaagttcagttcttagaatttgatattgatcaatccagtgtcattgtgtcttccagcctcggtcatgttcacaccttaaatcttattaatctccaaacccaaaatatccaacttttaagttcaccatttaaaacgcctctttgcgtgttaaatactctcactgcacttgaaccaacaccttgtgttcgcacggaccagatagatgatctcacagtttgtcacctgtgtaacaggcaaacccagaggacgcctccaagataatcaaactggaggtttcaaaaataaaacatctgccataaaaaaaaaaaaaaaaaaaaaaaaaaaaaaaaaa

SEQ ID NO: 164 - protein, 1505 aa, Rattus norvegicus
  ref <308>: DATABASE ACCESSION NUMBER: SWISS-Prot / O70173
  ref <309>: DATABASE ENTRY DATE: 2002-06-15
MAYNWQTEPNRAEPQEGGHDHQQCHHADQHLSSRQVRLGFDQLVEELSNKTPLPEDEKEGTCFVPDTPNLDSKWQSIYGPHPRHFNEFTSQSPHFSQLPFGKASAIGFNPAVLPAHQFIHEGASWRNPTRKYHGGEDPRFSALTPSSTGLDKCHQQGQSGTEHCNYYVEPENNVPHHYSPYSMDSIPDSEEKGSGDADLVEPSLVFSKDSFLPRASENMSVESTEPIGCPLEIVEAPQGSNKSLASFCNNVTKIRGLYHASDTNSNSGKIWAITTAYPSRLFADTQFRVKISTDNSAQLLLLKPPANYLVKDLIAEILLLCANEQLSPKEYLLSICGSEEFLQTDHCLGSHKIFQKSKSVIQLHLQRSRDTPGKLSRKRDDDRSRVHLNQLLEFTHIWKISRQCLSTVMKSYNLHVEHLLKTQEDVEEKPLSSMFSCGRHPPQPHGNDIIEDVRNICSVLGCIETKQVSDAVKELTLILQRPSQNFHQNSETSKKGFIENVTSELSRSLHQLVDVYCSSFCTDFRPARAPGGVSRDHAGLHSHLSFTVCSLHNVPETWAHSYKAFSFSCWLTYAGKKLCQVKSCRSLPVTKSFSFSVNWNEIINFPLEIKSLPRESMLVIKLFGIDSATHSANLLAWTCLPLFPKEKSPLGSRLLSMTLQSEPPIEMMAPGVWDGSQPTPLTLQIDFPAATWEYVKPETEENRTDHQEPPRECLKHIARLSQKQPPLLLSVEKRRYLWFYRFYCNNENSSLPLVLGSAPGWDEGTVSEMHAVLRRWTFSHPLEALGLLTSRFPDQDIREVAVQQLDNFLTDELLDCLPQLVQAVKFEWSLESPLVELLLHRSLQSIRVAHRLFWLLRDAQGEDYFKSWYQELLAALQFCAGEALIEELSKEQKLVKLLGDIGEKVKSAGDAQRKDVLKKEIGSLEEFFKDIKTCHLPLNPALCVKGIDRDACSYFTSNALPLKITFINANPMGKNISVIFKAGDDLRQDMLVLQIIQVMDNVWLQEGLDMQMIIYGCLATGKAQGFIEMVPDAVTLAKIHLHSGLIGPLKENTIKKWFSQHNHLKEDYEKALRNFFYSCAGWCVVTFILGVCDRHNDNIMLTKSGHMFHIDFGKFLGHAQTFGGIKRDRAPFIFTSEMEYFITEGGKNTQHFQDFVELCCRAYNIVRKHSQLLLSLLEMMLHAGLPELRGIEDLKYVHDNLRPQDTDLEATSHFTTKIKQSLECFPVKLNNLIHTLAQMPAFSLARPAPQTPPQECCVLNKTRTIQRVTILGFSKTHSNLYLIEVTRSDNRKNLAKKSFEQFYRLHSQIQKQFPLLTLPEFPHWWHLPFTDSHHERIRDLSHYVEQVLHGSYEVANSDCVLSFFLSEHIQQTLEDSPFVDPGDHSPDKSPQVQLLMTYEDTKLTILVKHLKNIHLPDGSAPSAHVEIYLLPHPSEVRRKKTKCVPKCTDPTYNEIVVYDDVSGLQGHVLMLIVKSKTVFVGAVNIQLCSVPLNEEKWYPLGNSII

SEQ ID NO: 165 - DNA, 4880 bp, Homo sapiens
  ref <308>: DATABASE ACCESSION NUMBER: EMBL / AJ000008
  ref <309>: DATABASE ENTRY DATE: 1999-01-20
ggctcgagcggccgcccgggcaggttgagatcgtgtttcatttcaggaagatatatgcgtcaggaaaatttctatcttcttttgtattatcaaggagatatttggagcagagtcaaccctctcagttacataaaataaaaaatggcatattcttggcaaacggatccaaatcctaatgaatcacacgaaaagcagtatgaacaccaagaatttctctttgtaaatcaaccccattcttctagccaagtcagtctgggttttgatcagatagtagatgagatcagtggcaaaattccacactacgagagtgaaattgatgaaaacaccttttttgtgcccactgcaccaaaatgggactcaacagggcattcattaaatgaagcacaccaaatatccttgaatgaattcacttctaaaagccgtgaactctcctggcatcaagttagcaaagcaccagcaattggttttagtccttctgtgttaccaaaacctcaaaatacgaataaagaatgctcctggggaagccccataggaaaacatcatggtgctgatgattccagattcagtattttagctccatcattcacaagtttggataaaattaatctagagaaagaattagaaaatgaaaatcataactaccatataggatttgaaagtagcattcctccaacaaattcatccttctcaagtgacttcatgccgaaagaagagaataaaaggagtggacatgtgaacattgtggaaccatctttgatgcttttgaaaggctctcttcaacccggaatgtgggaaagtacatggcagaagaatatagagtcaataggttgttccattcagctagtggaagtacctcaaagcagcaatacgagtctggcctctttttgcaacaaagtaaaaaaaatcagagaaagatatcatgcagctgatgttaatttcaattctgggaagatctggagcactactacagcatttccgtatcagctcttttctaagaccaagtttaatatacatatttttattgataactcaacacaacctcttcattttatgccatgtgctaattatcttgtcaaagatctaattgcagaaattctgcatttttgcacaaatgaccagctactccccaaagatcatattctaagtgtatgtggctctgaagaatttttacaaaacgaccactgtttggggagccacaaaatgtttcaaaaagataaatctgttattcagctccacctgcagaaaagtagggaagctccaggaaagctatctcgaaagcatgaagaggaccacagtcagttttatctgaatcaacttctagaatttatgcatatttggaaagtatccagacaatgtctcttaacactcatcagaaaatatgacttccacctgaaatacctattgaaaacccaggaaaacgtgtataatattattgaagaagttaaaaaaatatgcagtgttctagggtgtgtggaaaccaaacaaattacagatgcagtaaatgaactaagtctaattcttcagagaaaaggagagaatttttatcaaagttcagagacttcagcaaaaggcttgatagagaaggtaacaactgaactatccacatccatctaccagctaatcaatgtctactgtaacagcttttatgcagattttcagcctgtaaatgtacctagatgcacttcctatctaaatcccgggcttccttcccacctcagcttcacagtgtatgcagcacacaacattccagaaacctgggtgcacaggatcaattttccccttgaaataaagtcacttccaagggaatccatgctcactgtaaaactgtttgggattgcctgtgcaaccaacaatgcaaatttactggcgtggacttgtcttccactgtttccaaaagaaaaatccattctcgggtctatgctgttcagcatgacattacagagtgagcctcccgtagaaatgataactccaggagtgtgggatgtaagtcagccatccccggtgaccctgcagattgattttccagctactgggtgggagtatatgaaacctgattctgaagagaatagaagtaatcttgaagagccactaaaggagtgtataaaacatattgccagactttcacagaaacagactcccctactactctctgaagaaaagaaaagatatttatggttttatcgcttctactgcaataatgaaaactgctcccttcctttagtcctgggtagtgcccctggatgggatgaaaggactgtttcagaaatgcataccattttgagaagatggacattttctcaacctttagaggctcttgggcttttgacttccagttttccagatcaagaaattcgtaaagtggcagttcaacaattagacaacctcttgaatgatgaactactggaatatctcccacagctagttcaggctgtcaagtttgaatggaaccttgagagtcctttagtgcaacttctactccaccgctccttgcagagcatccaggttgcccatcgtctttactggctgctaaaaaatgcagaaaatgaagcttattttaaaagctggtatcagaagctactagctgctctccaattctgtgcaggtaaagccttgaatgatgagttttccaaggagcagaaacttatcaaaattctgggagatattggggaaagagtcaagtctgccagtgaccatcaaagacaggaggtactgaagaaagaaattggcagactagaagagttctttcaagatgtaaatacttgtcatcttcctctgaaccctgccctatgtataaaagggattgatcacgatgcatgttcatattttacatctaatgctttgccattgaagattactttcatcaatgctaatctgatgggcaaaaacatcagcattatttttaaggctggagatgatcttcgtcaggatatgcttgttctgcagcttattcaagtgatggacaatatttggctgcaggaaggcttggatatgcaaatgatcatttatagatgtctatccacaggaaaagaccaacgattggtgcagatggtacctgatgctgtgaccctagcaaagattcatcgccattctggactgataggaccattgaaagaaaataccattaaaaagtggttcagtcagcacaaccacttaaaggcagattatgaaaaggccttgaggaactttttctactcctgtgctggctggtgtgtggtaacattcatcctgggagtatgtgaccgtcacaatgataatatcatgctgacaaagtcgggccacatgtttcatattgactttggaaaattcttaggtcatgcacaaacatttggagggataaaaagggaccgagctcctttcatttttacttcagagatggaatactttattacagagggtgggaaaaacccacagcattttcaagattttgtggaactttgctgtcgtgcttataatattatcagaaagcacagccaactgctcttgaacctgctggaaatgatgctgtatgcaggactgcctgagctaagtggaattcaagacctgaaatatgtgtataataatcttcgtccacaagacacagacctggaagcaacaagtcattttaccaagaaaataaaggaaagtctggagtgtttccctgttaaattgaataacttgatccacacacttgcacaaatgtcagccataagccctgccaaatctacttcacagacttttcctcaggaatcctgtttgctgagtacaactaggtcgattgaaagagcaattttagggttcagcaagaaatccagtaatctgtatctgatccaggtgacacacagcaacaacgaaacaagcctgacagaaaaatcatttgagcagttttcaaaacttcacagccaacttcagaagcagtttgcatcactgactctcccagagtttcctcattggtggcacctaccttttacaaattcagatcacagaagattcagagatctaaatcattacatggaacagatattaaatgtatcacatgaagttacaaacagtgattgtgtacttagctttttcctctctgaggctgtgcaacaaacagttgaatcatcacctgtgtacctaggtgagaagaagtttccagacaagaagcctaaggtgcagttagtcatatcctacgaggatgtgaagctgaccatactagtgaaacacatgaaaaacattcatctcccagatggctctgcgcccagtgcacatgttgaattttatcttttaccatatcccagtgaagttctgaggaggaaaacaaaatctgttccaaaatgtacggaccccacttacaatgaaattgtagtatatgatgaagtcacagagctccaaggacatgtcttaatgcttattgtgaagagtaaaactgtatttgtgggagcaattaacatccgactctgtagtgtcccactcgataaagaaaaatggtatccattaggaaacagtataatttcaccattgctatgaacatatgcattattcattaactacttgtattttttcacttccgggcctctgaatcacataagtaaggcatctttgttgtcaaagacagcacagggtattaaggacacagaaaaaaaatcagaattagtcttttgtgttgtttattttctacctgtgctttcattgttttttcataatcttttctccttcagtggagtactgattgcatgaaatttgatgtgtaaaataataaaagacctttaattaatcattttaatatattttaaattaaacataggtttacatttgttttaattgtgtgcctacagttaaaagcagtatttttaatgtattttataagaaagacaatcaaataaacctcatcaattaattcaaaaaaaaaaaaaaaaaaa

SEQ ID NO: 166 - protein, 1448 aa, Homo sapiens
  ref <308>: DATABASE ACCESSION NUMBER: SWISS-Prot / O75747
  ref <309>: DATABASE ENTRY DATE: 2002-06-15
MAYSWQTDPNPNESHEKQYEHQEFLFVNQPHSSSQVSLGFDQIVDEISGKIPHYESEIDENTFFVPTAPKWDSTGHSLNEAHQISLNEFTSKSRELSWHQVSKAPAIGFSPSVLPKPQNTNKECSWGSPIGKHHGADDSRFSILAPSFTSLDKINLEKELENENHNYHIGFESSIPPTNSSFSSDFMPKEENKRSGHVNIVEPSLMLLKGSLQPGMWESTWQKNIESIGCSIQLVEVPQSSNTSLASFCNKVKKIRERYHAADVNFNSGKIWSTTTAFPYQLFSKTKFNIHIFIDNSTQPLHFMPCANYLVKDLIAEILHFCTNDQLLPKDHILSVCGSEEFLQNDHCLGSHKMFQKDKSVIQLHLQKSREAPGKLSRKHEEDHSQFYLNQLLEFMHIWKVSRQCLLTLIRKYDFHLKYLLKTQENVYNIIEEVKKICSVLGCVETKQITDAVNELSLILQRKGENFYQSSETSAKGLIEKVTTELSTSIYQLINVYCNSFYADFQPVNVPRCTSYLNPGLPSHLSFTVYAAHNIPETWVHRINFPLEIKSLPRESMLTVKLFGIACATNNANLLAWTCLPLFPKEKSILGSMLFSMTLQSEPPVEMITPGVWDVSQPSPVTLQIDFPATGWEYMKPDSEENRSNLEEPLKECIKHIARLSQKQTPLLLSEEKKRYLWFYRFYCNNENCSLPLVLGSAPGWDERTVSEMHTILRRWTFSQPLEALGLLTSSFPDQEIRKVAVQQLDNLLNDELLEYLPQLVQAVKFEWNLESPLVQLLLHRSLQSIQVAHRLYWLLKNAENEAYFKSWYQKLLAALQFCAGKALNDEFSKEQKLIKILGDIGERVKSASDHQRQEVLKKEIGRLEEFFQDVNTCHLPLNPALCIKGIDHDACSYFTSNALPLKITFINANLMGKNISIIFKAGDDLRQDMLVLQLIQVMDNIWLQEGLDMQMIIYRCLSTGKDQRLVQMVPDAVTLAKIHRHSGLIGPLKENTIKKWFSQHNHLKADYEKALRNFFYSCAGWCVVTFILGVCDRHNDNIMLTKSGHMFHIDFGKFLGHAQTFGGIKRDRAPFIFTSEMEYFITEGGKNPQHFQDFVELCCRAYNIIRKHSQLLLNLLEMMLYAGLPELSGIQDLKYVYNNLRPQDTDLEATSHFTKKIKESLECFPVKLNNLIHTLAQMSAISPAKSTSQTFPQESCLLSTTRSIERAILGFSKKSSNLYLIQVTHSNNETSLTEKSFEQFSKLHSQLQKQFASLTLPEFPHWWHLPFTNSDHRRFRDLNHYMEQILNVSHEVTNSDCVLSFFLSEAVQQTVESSPVYLGEKKFPDKKPKVQLVISYEDVKLTILVKHMKNIHLPDGSAPSAHVEFYLLPYPSEVLRRKTKSVPKCTDPTYNEIVVYDEVTELQGHVLMLIVKSKTVFVGAINIRLCSVPLDKEKWYPLGNSIISPLL

SEQ ID NO: 167 - DNA, 3732 bp, Rattus norvegicus
  ref <308>: DATABASE ACCESSION NUMBER: EMBL / AB009999
  ref <309>: DATABASE ENTRY DATE: 1998-06-12
tgacatgctggagctgcggcaccgcgggggctgccccggccccgggggagcggggacgccgccaccccgcgagggagaggcggccggcggcgaccacgaaaccgagagcaccagcgacaaagaaacagatattgatgacaggtatggagatctcgatgccagaggagattccgatgttcctgaggtcccaccatcctcagacaggacccccgagattctcaagaaagccctgtctggactgtcatcaagatggaagaactggtggattcgtgggatcctcaccctgaccatgatctccctcttcttcctgatcatctatatggggtccttcatgctgatgcttctggttctgggcatccaggtgaagtgcttccaggagatcataaccatcgggtacagggtctaccactcctacgacctcccgtggtttagaacactaagttggtacttcctcctatgtgtgaactacttcttctatggagagacagtggcagattacttcgccacgttcgttcagaaggaggagcagctgcagttcctcattcgctaccacaggttcatatccttcgccctctacctggcaggtttctgcatgttcgtcctgagcttggtgaagaaacactaccgactacagttctatatgttcgcatggactcacgtcactttactgataaccgtcactcagtcacatcttgtcatccaaaatctgtttgaaggcatgatatggttccttgtccccatatcaagcgtcatctgcaatgatatcacggcttacctttttggatttttttttggaagaactcctttaattaagctgtctcctaagaagacctgggaaggattcattggtggtttcttctccacagtcatatttggattcattgctgcctatgtgttgtccaagtatcagtactttgtgtgcccggtggagtaccgaagcgacgtcaactccttcgtgacagaatgtgagccctcagaagtgttccagcttcagaattactccctccctccgttcctacaggcagtgctgagccgggagaccgtgagcttgtaccccttccagatacacagcattgccctttcaacatttgcatcactgatcggcccattcggaggcttcttcgccagtggattcaaaagagctttcaaaatcaaggactttgcaaacactattcctgggcatggagggataatggacaggttcgattgtcagtatttgatggcgacgttcgtgcacgtgtacatcaccagcttcatcaggggtccgaatcccagcaaagtgctccagcagctcctagtgcttcagccagagcagcagttaaacatctacagaaccctgaagatacatctcacggagaaaggcatcctgcagcccacctggaaggtgtagctgtcctgaggggacagactgctgaggaggaaggagctcacagagcagctccgactgaagtcttgcactgagccagcctggggctagaaactcagtagatgcaggttttgcagatacgaatgtttctctttctctgaaattactgtgaatatttaacaaacacgagatctgagacgagtgcgcatcagtcgccgccgtgaaagatccgtgcttttctaagatgtattttccaatgttaagttctccgcccttactggccgggctccatgatgtaggaggtttaaagagtcaagcactgtcacctgaggctgaggcccccttaggctcgtgcctggcagtgtgatccttctcacaaacactgacctttgcactgactgggagctgcctctctgtggctggggatgctcagcaggcaccctgggaagcgaggcctagggcttcctcctctactgacctcaggcatttctgcaggctgagttagattaaaaaagaaagaaaaagagcgcttgtccacttctctctcttctttttgtttgtttgtacacaccaggcaggcgccccactcctaggctctgttccggctggaccgactgcctactttcagagaaacagccatctgcccagtggaaacaccctggttttaagtagtttcaaaccaaaaggtagaggctgaaacttaccccactattgatttgtttaaaaagaaggcatcagaatccatctctgatgaaacttttggagaagcacgtaaccaacttcccaagagactcaggagtgggtcctgctcctccaccaaaacacctcacccaggacggtggtgctgtgagcaggggtggaggctgagtcggcaggctgcctggggtgagctgagcactgcatggcggtgccaggcctgcctccatctctgtgtacagcacacctggagacgagggttttccctgaagacccagctcagagccagccccctgatggcaattaacctctgtcaccttgcacttcctgtcatgccatgaaaaccaagagtaaagatcaagcagaaataatagccatgaagcagaaaagcacaggaaagccacgccctcttctgtaggtgggcagggcactgtaaacactctagcccatcacagcaccgttgttaactaagctgcctccaagtgtgctctgcagccatattgaaccaaatgtcagggtcacccgcagagatgacctagttccccaagctcagcaccgagaggtggagaaatggagacaccataaaggataatttggtcatgaaagagtaaatatttttgtttaaattagaaatggattccagtcaccacatttccttcccagtgtggatgaacccacagccatcctgggctctgtaagcacatggcgtatgtgtgagcatggcagacgctgtggtcctcagtcccaaaatgccactgttggcccctaggtgacttgtgaccctgggctccattcaggctgtgtcctctgcacgcaggcagccgagggagcattggccacattacagtgactccctctcagtcaggacaccggggagctgatgtcagcttccctgcttttgtttgtccctcgccctgccccagaagttgaccatgacccagttgcaggcaccgaggaagctgagagaagccttgtgataggatcattccccgagaacagggcagtttgcaaaggtgtaaaggatgcctggggacagggtggattctccttacccaccgtgctgtccaggcgtcgtgaggggttgcgaggcagaattatgagagcattacttaatacacgtattaaaagtcaatattcttctaaacaaaggatgaaagcaggttacggcaaaagcttttcttaaatagattttcttagagctgggtgtccattacgccatattaaaacaagggcgttccctgacaacgccctagagatgaacattttagcgtactttcacagcgtgtatattaaagtggactatacttcagcaagcaatcatcctaagagccatgtgatgagcgctacatttgcactggaagaagcttcatccagcggagtgacgcagtggacaaatgtcaggccctccaggcggggacccttcagtggaaaactgccgcttgaactgctgctgacttgttagcccgtgggatgatgatgtccgagaatggggcgttctccccagccttccttgtgggtttgcacagacagttgctgtcatggcgacacctggtttgatgaaaggtcgaggcgctgtgtatatactgtacagggtgagagtttatgatacgtgtcaatcagttctctaaatctttatactgaaactgggatagaaaaataaaaatccaaca

SEQ ID NO: 168 - protein, 461 aa, Rattus norvegicus
  ref <308>: DATABASE ACCESSION NUMBER: SWISS-Prot / O35052
  ref <309>: DATABASE ENTRY DATE: 2002-06-15
MLELRHRGGCPGPGGAGTPPPREGEAAGGDHETESTSDKETDIDDRYGDLDARGDSDVPEVPPSSDRTPEILKKALSGLSSRWKNWWIRGILTLTMISLFFLIIYMGSFMLMLLVLGIQVKCFQEIITIGYRVYHSYDLPWFRTLSWYFLLCVNYFFYGETVADYFATFVQREEQLQFLIRYHRFISFALYLAGFCMFVLSLVKKHYRLQFYMFAWTHVTLLITVTQSHLVIQNLFEGMIWFLVPISSVICNDITAYLFGFFFGRTPLIKLSPKKTWEGFIGGFFSTVIFGFIAAYVLSKYQYFVCPVEYRSDVNSFVTECEPSELFQLQNYSLPPFLQAVLSRETVSLYPFQIHSIALSTFASLIGPFGGFFASGFKRAFKIKDFANTIPGHGGIMDRFDCQYLMATFVHVYITSFIRGPNPSKVLQQLLVLQPEQQLNIYRTLKIHLTEKGILQPTWKV

SEQ ID NO: 169 - DNA, 2356 bp, Homo sapiens
  ref <308>: DATABASE ACCESSION NUMBER: EMBL / U65887
  ref <309>: DATABASE ENTRY DATE: 2000-03-04
gaattcggcacgagcggggcgggaggggcctgcgcggcggcgggagcccagagccgcgctaaagcgggtcaagcgtcctccttttctccccgccccttctcctcctcctacctgggcctctgcgtggagacgcgcacctggcaaccggaggccgcgtctccgccttctctgctcgcgcctggcgcccggagcctgcccgggacctccgccggagccgcgctcgctgcaggcggcctcgagcgctctctcgttgatgccgttttggaggtgaccggcgcggcggccgctctatggtggggccgcgttagtggctgcggctccgcgggactccagggcgcggctgcgaggtggcggggcgccccgcctgcagaaccctgcttgcagctcaggtttcggggtgcttgaggaggccgccacggcagcgcgggagcggaagatgttggagctgaggcaccggggaagctgccccggccccagggaagcggtgtcgccgccacaccgcgagggagaggcggccggcggcgaccacgaaaccgagagcaccagcgacaaagaaacagatattgatgacagatatggagatttggattccagaacagattctgatattccggaaattccaccatcctcagatagaacccctgagattctcaaaaaagctctatctggtttatcttcaaggtggaaaaactggtggatacgtggaattctcactctaactatgatctcgttgtttttcctgatcatctatatgggatccttcatgctgatgcttcttgttctgggcatccaagtgaaatgcttccatgaaattatcactataggttatagagtctatcattcttatgatctaccatggtttagaacactaagttggtactttctattgtgtgtaaactactttttctatggagagactgtagctgattattttgctacatttgttcaaagagaagaacaacttcagttcctcattcgctaccatagatttatatcatttgccctctatctggcaggtttctgcatgtttgtactgagtttggtgaagaaacattatcgtctgcagttttatatgttcgcatggactcatgtcactttactgataactgtcactcagtcacaccttgtcatccaaaatctgtttgaaggcatgatatggttccttgttccaatatcaagtgttatctgcaatgacataactgcttacctttttggatttttttttgggagaactccattaattaagttgtctcctaaaaagacttgggaaggattcattggtggtttcttttccacagttgtgtttggattcattgctgcctatgtgttatccaaataccagtactttgtctgcccagtggaataccgaagtgatgtaaactccttcgtgacagaatgtgagccctcagaacttttccagcttcagacttactcacttccaccctttctaaaggcagtcttgagacaggaaagagtgagcttgtaccctttccagatccacagcattgcactgtcaacctttgcatctttaattggcccatttggaggcttctttgctagtggattcaaaagagccttcaaaatcaaggattttgcaaataccattcctggacatggtgggataatggacagatttgattgtcagtatttgatggcaacttttgtacatgtgtacatcacaagttttatccggggcccaaatcccagcaaagtgctacagcagttgttggtgcttcaacctgaacagcagttaaatatatataaaccctgaagactcatctcattgagaaaggatcctacaacccaccttgaaggtataactggatccagagagggaaggactgacaagaaggaattattcagaaaaacactgacagatgttttataaattgtacagaaaaatagttaaaaatgcaataggttgaagttttccagatatgtttctctctgaaattactgtgaatatttaacaaacacttacttgatctatgttatgaaataagtagcaaattgccagcaaaatgtcttgtaccttttctaaagtgtattttctgatgtgaacttccttccccttacttgctaggtttcaataatttaaaagagtcaaacactataaatgagtaagttgacgatgttttaagattgcacctggcagtgtgcctttttgcaacaaatatttacctggcagtgtgcctttttgcaacaaatatttactttgcacttggagctgcttttaattttagcaaaatgttttatgcaaggcacaataggaagtcagttctcctgcacttcctcctcatgtagtctggagtactttctaaagggcttagttggatttaaaaaaaaaaaaaaaaaa

SEQ ID NO: 170 - protein, 461 aa, Homo sapiens
  ref <308>: DATABASE ACCESSION NUMBER: SWISS-Prot / Q92903
  ref <309>: DATABASE ENTRY DATE: 2002-06-15
MLELRHRGSCPGPREAVSPPHREGEAAGGDHETESTSDKETDIDDRYGDLDSRTDSDIPEIPPSSDRTPEILKKALSGLSSRWKNWWIRGILTLTMISLFFLIIYMGSFMLMLLVLGIQVKCFHEIITIGYRVYHSYDLPWFRTLSWYFLLCVNYFFYGETVADYFATFVQREEQLQFLIRYHRFISFALYLAGFCMFVLSLVKKHYRLQFYMFAWTHVTLLITVTQSHLVIQNLFEGMIWFLVPISSVICNDITAYLFGFFFGRTPLIKLSPKKTWEGFIGGFFSTVVFGFIAAYVLSKYQYFVCPVEYRSDVNSFVTECEPSELFQLQTYSLPPFLKAVLRQERVSLYPFQIHSIALSTFASLIGPFGGFFASGFKRAFKIKDFANTIPGHGGIMDRFDCQYLMATFVHVYITSFIRGPNPSKVLQQLLVLQPEQQLNIYKTLKTHLIEKGILQPTLKV

SEQ ID NO: 171 - DNA, 3732 bp, Rattus norvegicus; identical to SEQ ID NO: 167
  ref <308>: DATABASE ACCESSION NUMBER: EMBL / AB009999
  ref <309>: DATABASE ENTRY DATE: 1998-06-12

SEQ ID NO: 172 - protein, 461 aa, Rattus norvegicus; identical to SEQ ID NO: 168
  ref <308>: DATABASE ACCESSION NUMBER: SWISS-Prot / O35052
  ref <309>: DATABASE ENTRY DATE: 2002-06-15

SEQ ID NO: 173 - DNA, 2356 bp, Homo sapiens; identical to SEQ ID NO: 169
  ref <308>: DATABASE ACCESSION NUMBER: EMBL / U65887
  ref <309>: DATABASE ENTRY DATE: 2000-03-04

SEQ ID NO: 174 - protein, 461 aa, Homo sapiens; identical to SEQ ID NO: 170
  ref <308>: DATABASE ACCESSION NUMBER: SWISS-Prot / Q92903
  ref <309>: DATABASE ENTRY DATE: 2002-06-15

SEQ ID NO: 175 - DNA, 3732 bp, Rattus norvegicus; identical to SEQ ID NO: 167
  ref <308>: DATABASE ACCESSION NUMBER: EMBL / AB009999
  ref <309>: DATABASE ENTRY DATE: 1998-06-12

SEQ ID NO: 176 - protein, 461 aa, Rattus norvegicus; identical to SEQ ID NO: 168
  ref <308>: DATABASE ACCESSION NUMBER: SWISS-Prot / O35052
  ref <309>: DATABASE ENTRY DATE: 2002-06-15

SEQ ID NO: 177 - DNA, 2356 bp, Homo sapiens; identical to SEQ ID NO: 169
  ref <308>: DATABASE ACCESSION NUMBER: EMBL / U65887
  ref <309>: DATABASE ENTRY DATE: 2000-03-04

SEQ ID NO: 178 - protein, 461 aa, Homo sapiens; identical to SEQ ID NO: 170
  ref <308>: DATABASE ACCESSION NUMBER: SWISS-Prot / Q92903
  ref <309>: DATABASE ENTRY DATE: 2002-06-15

SEQ ID NO: 179 - DNA, 3732 bp, Rattus norvegicus; identical to SEQ ID NO: 167
  ref <308>: DATABASE ACCESSION NUMBER: EMBL / AB009999
  ref <309>: DATABASE ENTRY DATE: 1998-06-12

SEQ ID NO: 180 - protein, 461 aa, Rattus norvegicus; identical to SEQ ID NO: 168
  ref <308>: DATABASE ACCESSION NUMBER: SWISS-Prot / O35052
  ref <309>: DATABASE ENTRY DATE: 2002-06-15

SEQ ID NO: 181 - DNA, 2356 bp, Homo sapiens; identical to SEQ ID NO: 169
  ref <308>: DATABASE ACCESSION NUMBER: EMBL / U65887
  ref <309>: DATABASE ENTRY DATE: 2000-03-04

SEQ ID NO: 182 - protein, 461 aa, Homo sapiens; identical to SEQ ID NO: 170
  ref <308>: DATABASE ACCESSION NUMBER: SWISS-Prot / Q92903
  ref <309>: DATABASE ENTRY DATE: 2002-06-15

SEQ ID NO: 183 - DNA, 1529 bp, Rattus norvegicus
  ref <308>: DATABASE ACCESSION NUMBER: EMBL / AB010154
  ref <309>: DATABASE ENTRY DATE: 2001-03-29
ggacagcgagatcctcttgctaacgagaagccgcgggcgccccaaagcctcgggacccgggcgaccaaaccccttgcgacgcctttcgcgtccctgctcatggtggtggtggtgccctgagcccctctcgggccgggcagacgaagaccgacacggcgcccaggccccctgccgcggcgtccccgcggccccagcccagggagaagatgagcgtgggctgccctgagcctgaaccgctccactccctgccttgctgtgggccgggggccgcccctgtacctggtgcaggtgtgcccctcctcacagaagacatgcaagccctgaccctgcgcacactggctgccagcgacgtcaccaagcactacgagctcgtgcgggagctgggtaaagggacctacgggaaggtcgacctggtggcttacaagggcacaggcactaaaatggccctgaaatttgtgaataagagtaagaccaagctgaagaacttcctgcgtgaggtgagcatcaccaacagcctgtcgtctagccccttcatcatcaaggtcttcgacgtggtcttcgagacggaggagtgctatgtctttgctcaggagtatgcacctgctggggacctgtttgacatcatccctcctcaggtggggctcccggaggacacggtgaagcgctgtgtgcagcagctggggctggcactggacttcatgcatagcaggcagctggtgcaccgcgacatcaagcccgagaatgtgctgctgtttgaccgtgagtgccgccgcgtgaagctggctgacttcggcatgacgcggcgcgtaggctgccgtgtgaagcgagtaagcggcactataccctacacggcgcccgaggtgtgccaggctggccgcgccgatggcttcgcggtggacacgggcgtggatgtgtgggcattcggcgtgctcatcttctgcgtgctcactggcaacttcccgtgggaggctgcgtcaggtgccgatgccttcttcgaggaatttgtgcgctggcagcggggtcgcctgcccgggctgccatcccagtggcgacgctttacggagcctgctctacgcatgttccagcggcttctggcgctggagcctgagcggcgtgggcccgccaaggaggtctttcgcttcctcaagcatgagctcacatctgagctgcggcggcggccatcgcaccgcgcacgaaagccacctggggaccgcctgcctgggcccctgcgccttgaggctccagggccactcaagcgcactgtgctcaccgagagtggcagcggctcgcggccttccccacccagcgtagggcccgtggtacccgtgccagtgccagtgccagtacccgtacctgaggctggtctggctccacccgcacccccgggcaggaccgacggccgtgcggacaagagcaaagggcaggtggtattggccacagccatcgagatctgcgtctgagccgctgcagcacagctgttgcggggaagccgcgcgctctaacccgtactagggacaaggagcagccgc

SEQ ID NO: 184 - protein, 417 aa, Rattus norvegicus
  ref <308>: DATABASE ACCESSION NUMBER: SWISS-Prot / BAA36362
  ref <309>: DATABASE ENTRY DATE: 2003-02-01
MSVGCPEPEPLHSLPCCGPGAAPVPGAGVPLLTEDMQALTLRTLAASDVTKHYELVRELGKGTYGKVDLVAYKGTGTKMALKFVNKSKTKLKNFLREVSITNSLSSSPFIIKVFDVVFETEECYVFAQEYAPAGDLFDIIPPQVGLPEDTVKRCVQQLGLALDFMHSRQLVHRDIKPENVLLFDRECRRVKLADFGMTRRVGCRVKRVSGTIPYTAPEVCQAGRADGFAVDTGVDVWAFGVLIFCVLTGNFPWEAASGADAFFEEFVRWQRGRLPGLPSQWRRFTEPALRMFQRLLALEPERRGPAKEVFRFLKHELTSELRRRPSHRARKPPGDRLPGPLRLEAPGPLKRTVLTESGSGSRPSPPSVGPVVPVPVPVPVPVPEAGLAPPAPPGRTDGRADKSKGQVVLATAIEICV

SEQ ID NO: 185 - DNA, 2271 bp, Homo sapiens
  ref <308>: DATABASE ACCESSION NUMBER: EMBL / AF387637
  ref <309>: DATABASE ENTRY DATE: 2001-12-28
gaattaaagtgcagtaaaatgtccactaggaccccattgccaacggtgaatgaacgagacactgaaaaccacacgtcacatggagatgggcgtcaagaagttacctctcgtaccagccgctcaggagctcggtgtagaaactctatagcctcctgtgcagatgaacaacctcacatcggaaactacagactgttgaaaacaatcggcaaggggaattttgcaaaagtaaaattggcaagacatatccttacaggcagagaggttgcaataaaaataattgacaaaactcagttgaatccaacaagtctacaaaagctcttcagagaagtaagaataatgaagattttaaatcatcccaatatagtgaagttattcgaagtcattgaaaccgaaaaaacactctacctaatcatggaatatgcaagtggaggtgaagtatttgactatttggttgcacatggcaggatgaaggaaaaagaagcaagatctaaatttagacagattgtgtctgcagttcaatactgccatcagaaacggatcgtacatcgagacctcaaggctgaaaatctattgttagatgccgatatgaacattaaaatagcagatttcggttttagcaatgaatttactgttggcggtaaactcgacacgttttgtggcagtcctccatacgcagcacctgagctcttccagggcaagaaatatgacgggccagaagtggatgtgtggagtctgggggtcattttatacacactagtcagtggctcacttccctttgatgggcaaaacctaaaggaactgagagagagagtattaagagggaaatacagaattcccttctacatgtctacagactgtgaaaaccttctcaaacgtttcctggtgctaaatccaattaaacgcggcactctagagcaaatcatgaaggacaggtggatcaatgcagggcatgaagaagatgaactcaaaccatttgttgaaccagagctagacatctcagaccaaaaaagaatagatattatggtgggaatgggatattcacaagaagaaattcaagaatctcttagtaagatgaaatacgatgaaatcacagctacatatttgttattggggagaaaatcttcagagctggatgctagtgattccagttctagcagcaatctttcacttgctaaggttaggccgagcagtgatctcaacaacagtactggccagtctcctcaccacaaagtgcagagaagtgtttcttcaagccaaaagcaaagacgctacagtgaccatgctggaccagctattccttctgttgtggcgtatccgaaaaggagtcagaccagcactgcagatagtgacctcaaagaagatggaatttcctcccggaaatcaagtggcagtgctgttggaggaaagggaattgctccagccagtcccatgcttgggaatgcaagtaatcctaataaggcggatattcctgaacgcaagaaaagctccactgtccctagtagtaacacagcatctggtggaatgacacgacgaaatacttatgtttgcagtgagagaactacagctgatagacactcagtgattcagaatggcaaagaaaacagcactattcctgatcagagaactccagttgcttcaacacacagtatcagtagtgcagccaccccagatcgaatccgcttcccaagaggcactgccagtcgtagcactttccacggccagccccgggaacggcgaaccgcaacatataatggccctcctgcctctcccagcctgtcccatgaagccacaccattgtcccagactcgaagccgaggctccactaatctctttagtaaattaacttcaaaactcacaaggaggcttccaactgaatatgagaggaacgggagatatgagggctcaagtcgcaatgtatctgctgagcaaaaagatgaaaacaaagaagcaaagcctcgatccctacgcttcacctggagcatgaaaaccactagttcaatggatcccggggacatgatgcgggaaatccgcaaagtgttggacgccaataactgcgactatgagcagagggagcgcttcttgctcttctgcgtccacggagatgggcacgcggagaacctcgtgcagtgggaaatggaagtgtgcaagctgccaagactgtctctgaacggggtccggtttaagcggatatcggggacatccatagccttcaaaaatattgcttccaaaattgccaatgagctaaagctgtaacccagtgattatgatgta

SEQ ID NO: 186 - protein, 713 aa, Homo sapiens
  ref <308>: DATABASE ACCESSION NUMBER: SWISS-Prot / P27448
  ref <309>: DATABASE ENTRY DATE: 2001-10-16
MSTRTPLPTVNERDTENHTSHGDGRQEVTSRTSRSGARCRNSIASCADEQPHIGNYRLLKTIGKGNFAKVKLARHILTGREVAIKIIDKTQLNPTSLQKLFREVRIMKILNHPNIVKLFEVIETQKTLYLIMEYASGGKVFDYLVAHGRMKEKEARSKFRQIVSAVQYCHQKRIVHRDLKAENLLLDADMNIKIADFGFSNEFTVGGKLDTFCGSPPYAAPELFQGKKYDGPEVDVWSLGVILYTLVSGSLPFDGQNLKELRERVLRGKYRIPFYMSTDCENLLKRFLVLNPIKRGTLEQIMKDRWINAGHEEDELKPFVEPELDISDQKRIDIMVGMGYSQEEIQESLSKMKYDEITATYLLLGRKSSEVRPSSDLNNSTGQSPHHKVQRSVSSSQKQRRYSDHAGPGIPSVVAYPKRSQTSTADSDLKEDGISSRKSTGSAVGGKGIAPASPMLGNASNPNKADIPERKKSSTVPSSNTASGGMTRRNTYVCSERTTDDRHSVIQNGKENSTIPDQRTPVASTHSISSAATPDRIRFPRGTASRSTFHGQPRERRTATYNGPPASPSLSHEATPLSQTRSRGSTTLFSKLTSKLTRSRNVSAKQKDENKEAKPRSLRFTWSMKTTSSMDPGDMMREIRKVLDANNCDYEQRERFLLFCVHGDGHAENLVQWEMEVCKLPRLSLNGVRFKRISGTSIAFKNIASKIANELKL

SEQ ID NO: 187 - DNA, 5174 bp, Rattus norvegicus
  ref <308>: DATABASE ACCESSION NUMBER: EMBL / AB010467
  ref <309>: DATABASE ENTRY DATE: 1998-06-22
gggttgagctgaactgagatcccaagaccagcggtgcaccagagccacatggaccgcttgtgcggctccggggagctgggctccaagttctgggactccaacctgactgtatataccaacactccagacctcacaccctgtttccagaactccttgctggcctgggttccctgcatctatctgtgggctgccttgccctgctacctgttctacctgaggcaccatcggcttggctacatagtcctctcatgcttatccaggctcaagacggccctcggtgttctgctgtggtgtatctcatgggtggacctgttctactccttccatggcctggttcacggctcatcccctgctcctgtcttctttatcacacccttgttggtggggatcaccatgctgctggccacattgctaatccagtatgagcggcttcggggcgtgcggtcttcaggtgtgctcatcatcttctggctcctgtgtgtgatctgtgccatcatccccttccgttccaagatcctcttggctttggcagagggtaaaatcttggatccgttccgattcaccactttctacatctacttcgccctcgtgctgtgtgccttcatcctgtcctgcttccaggagaagccgcctttgttttccccagagaatcttgacacaaatccttgcccagaggccagcgctggcttcttctcccgtctgtctttctggtggttcacaaagcttgccatccttggctaccgacgtcccctggaggacagtgacctctggtctctgtctgaggaggactgctctcacaaggtggtacaacggctactggaagcatggcaaaagcagcagacccaagcatcagggccccagactgcagcccttgagccaaagatcgcaggtgaggatgaggtcctgctgaaggcccgccccaagaccaagaagccttcctttctgagggctttggtgagaaccttcacctccagcttgctcatgggtgcctgcttcaagctgatccaggacctgctctccttcatcaacccacagctgctcagcatcctcatcaggtttatttctgaccccacggcccctacctggtggggcttcttgctggccggactgatgttcgtgagctccaccatgcagacattgatcttacaccaacattaccactgcatctttgtgatggccttgaggatacggactgctatcataggcgtcatctacaggaaggctctgaccatcaccaactcagtcaaacgtgagtacactgtgggagaaatggtcaacctcatgtcggtggacgcccagcgcttcatggatgtctccccattcatcaacctgctgtggtctgcacctttgcaggtcatcctggcgatatacttcctctggcagatcttaggcccatcagccctggctggggtggctgtgatagtcttgctgataccactcaatggagctgtgtccatgaaaatgaagacctaccaggtacagcaaatgaagttcaaagactcccgcatcaaactgatgagtgagatcctgaatggcatcaaagttctgaagctgtacgcttgggagcccaccttcttggagcaggtagaaggaatcaggcagggtgagctccagctactgcggaagggcgcctacctgcaggctatctctaccttcatctgggtctgcaccccgtttatggtgaccctgatcaccctcggggtgtacgtgtgtgtggacaagaacaatgtgctggatgctgagaaggccttcgtgtccctgtccttgttcaatatcttaaagatccccctcaacctgctgcctcagttaatcagtggcatgacccagaccagcgtgtctctgaaacggatccaggatttcctgaaccaagatgaacttgacccccagtgtgtggaaagaaagaccatctccccaggccgtgccatcaccatacacaacggcaccttctcctggtccaaggacctgcctcccacccttcacagcctaaacattcaaatcccgaagggggcattggtggctgtggtgggacctgtgggctgtgggaagtcttccctggtgtctgccttgctcggagagatggagaagctggaaggtgcagtgtctgtaaagggctctgtggcctacgtgccccagcaggcgtggatccagaactgcacacttcaggaaaatgtgctatttggccaacccatgaaccccaagcgctaccaacaggctctggagacgtgtgccctgctagctgacctagatgtgcttcctggtggggaccagacagagattggagagaagggcattaacctatctggaggccagcgacaacgggtgagtttggcccgagctgtttatagtgacgccaacatttttttgctggatgacccactgtcggctgtggactctcacgtggctaagcatatcttcgaccaagtgattggaccagaaggtgtgctggcaggcaagactcgggtgctggtaacccatggcatcagcttcctgccccagacggactttatcattgtgcttgctgacggacagattactgagatgggtcactactccgaactcctgcagcacgatggctcctttgccaacttcctccgaaactatgcaccagatgaaaaccaggaggccaatgaaggagtcttgcaacatgcaaatgaggaggtgctcctgcttgaagacacactcagcacccacacagacctgacagacaccgagccagccatatacgaggtccgcaagcagttcatgagagagatgagctccttgtcttctgaaggagagggccagaaccggcctgtgctcaagagatatacgagttcactggagaaggaggtgccggcgacacagactaaagagactggtgcattaatcaaagaggagatcgcagagacaggcaatgtgaagctgagcgtgtactgggattatgccaagtctgtggggctctgcaccacgctgtttatctgcctcctgtatgctggccaaaatgcggttgctatcggagccaatgtgtggctcagtgcctggaccaatgatgtggaggaacatggccagcagaacaacacctccgtaaggctgggagtctacgccaccctaggaatactgcaagggctcctggtcatgctgtcggccttcaccatggtggttggcgctatccaggctgcccgcctgctgcacacagctctgttgcacaaccagatccgtgcgcctcagtccttctttgacacgacgccctcaggccgcatcctcaatcgtttctccaaggacatatacgtcatcgatgaggttctggcccccaccatcctcatgctgttcaattcattctacacatccatctccaccattgtggtcatcgtggccagcacgccactcttctgcgtggttgttcttcctctggctgtgttctatggcttcgtgcagcgcttctatgtggccacatcgaggcagctgaagagactggaatccgttagccgctcgcccatcttctcccacttctcggagacagtaactggcaccagtgtcattcgggcctacggccgagtccaagacttcaaggtcctcagtgatgctaaggtggatagcaaccagaagaccacttatccttacatcgcctccaaccggtggctgggtgtccacgtggagtttgtggggaactgcgtggtgctcttctccgcgctgtttgcagtgatcgggagaaacagcttgaatccagggcttgtgggtctttccgtgtcctatgccttacaggtgaccttgagtttgaattggatgatacggacgctatccgacctggagtctaatatcatagccgtggagagagtcaaggagtactctaagacggagactgaggctccctgggtgttggagagcaaccgtgctccagaaggctggcccaggagtggggtggtagagttccggaactattcggtgcggtaccgcccgggcctcgagttggtgctgaagaatttgactctgcatgtgcagggtggggagaaggtaggcatcgtgggccgcactggggctggcaaatcttccatgactctttgcctattccgaatcctggaggccgcagagggtgagatcttcattgacgggctcaatgtggcacacattggcctccatgacctgcgttcacaactcaccatcatccctcaggaccccatcctgttctcgggcacgctgcgcatgaacctcgatccctttggccgttactcggacgaggacatctggaggaccctggagctatcccacctgagtgcatttgtgagcagccagccgacaggcctggattttcagtgctctgagggtggggataatctcagtgttggccagaggcagctcgtgtgcctagcccgagccctgctccgaaagagccgtgtcctggttttagacgaggccaccgctgccattgacctggagactgatgacctcatccagggtaccatccgtacccagtttgaagactgcactgtactgaccatcgcccaccggctcaacacaatcatggactacaaccgggtcctggtcttggacaaaggagtagtagctgaatttgattctccagtaaacctcattgcagctggaggcatcttctatgggatggccaaagatgcaggactcgcctagaatctgcattccaaaggtttcttccttgtctgaatcggacagcaagtagctgcagcatggatttgatggcaacgagtggggacatttgagttggttttggtttttttttgttttttgttttttttttttttttaaattctgcaaattgccttacagactagccatacttaacagtggaatgaggaagtgggtccttggaggtcacagccagttcacagccaagttcagaccagtccctgggtctcctagacctagtctaccattattcccgtactgcatttttttttggttctttttttcagagctggggaccgaacccagggccttgcccttcctaggtaagcgctctaccactgagctaaatccccagcccccgtactgcagtttttaagagaccctgctcctgcctctacatattcatagtttccaattttttttttaaatgagcctttctccttctggaccagggactgctaggtcagtctgtccggggaacagaatccctggttggtgctgtctgaatccactgacgaaataaagccatgagcagcagc

SEQ ID NO: 188 - protein, 1522 aa, Rattus norvegicus
  ref <308>: DATABASE ACCESSION NUMBER: SWISS-Prot / O88563
  ref <309>: DATABASE ENTRY DATE: 2001-10-16
MDRLCGSGELGSKFWDSNLTVYTNTPDLTPCFQNSLLAWVPCIYLWAALPCYLFYLRHHRLGYIVLSCLSRLKTALGVLLWCISWVDLFYSFHGLVHGSSPAPVFFITPLLVGITMLLATLLIQYERLRGVRSSGVLIIFWLLCVICAIIPFRSKILLALAEGKILDPFRFTTFYIYFALVLCAFILSCFQEKPPLFSPENLDTNPCPEASAGFFSRLSFWWFTKLAILGYRRPLEDSDLWSLSEEDCSHKVVQRLLEAWQKQQTQASGPQTAALEPKIAGEDEVLLKARPKTKKPSFLRALVRTFTSSLLMGACFKLIQDLSPSSTHSCSASSSGLFRPHGPYWWGFLLAGLMFVSSTMQTLILHQHYHCIFVMALRIRTAIIGVIYRKALTITNSVKREYTVGEMVNLMSVDAQRFMDVSPFINLLWSAPLQVILAIYFLWQILGPSALAGVAVIVLLIPLNGAVSMKMKTYQVQQMKFKDSRIKLMSEILNGIKVLKLYAWEPTFLEQVEGIRQGELQLLRKGAYLQAISTFIWVCTPFMVTLITLGVYVCVDKNNVLDAEKAFVSLSLFNILKIPLNLLPQLISGMTQTSVSLKRIQDFLNQDELDPQCVERKTISPGRAITIHNGTFSWSKDLPPTLHSINIQIPKGALVAVVGPVGCGKSSLVSALLGEMEKLEGAVSVKGSVAYVPQQAWIQNCTLQENVLFGQPMNPKRYQQALETCALLADLDVLPGGDQTEIGEKGINLSGGQRQRVSLARAVYSDANIFLLDDPLSAVDSHVAKHIFDQVIGPEGVLAGKTRVLVTHGISFLPQTDFIIVLADGQITEMGHYSELLQHDGSFANFLRNYAPDENQEANEGVLQHANEEVLLLEDTLSTHTDLTDTEPAIYEVRKQFMREMSSLSSEGEGQNRPVLKRYTSSLEKEVPATQTKETGALIKEEIAETGNVKLSVYWDYAKSVGLCTTLFICLLYAGQNAVAIGANVWLSAWTNDVEEHGQQNNTSVRLGVYATLGILQGLLVMLSAFTMVVGAIQAARLLHTALLHNQIRAPQSFFDTTPSGRILNRFSKDIYVIHEVLAPTILMLFNSFYTSISTIVVIVASTPLFCVVVLPLAVFYGFVQRFYVATSRQLKRLESVSRSPIFSHFSETVTGTSVIRAYGRVQDFKVLSDAKVDSNQKTTYPYIASNRWLGVHVEFVGNCVVLFSALFAVIGRNSLNPGLVGLSVSYALQVTLSLNWMIRTLSDLESNIIAVERVKEYSKTETEAPWVLESNRAPEGWPRSGVVEFRNYSVRYRPGLELVLKNLTLHVQGGEKVGIVGRTGAGKSSMTLCLFRILEAAEGEIFIDGLNVAHIGLHDLRSQLTIIPQDPILFSGTLRMNLDPFGRYSDEDIWRTLELSHLSAFVSSQPTGLDFQCSEGGDNLSVGQRQLVCLARALLRKSRVLVLDEATAAIDLETDDLIQGTIRTQFEDCTVLTIAHRLNTIMDYNRVLVLDKGVVAEFDSPVNLIAAGGIFYGMAKDAGLA

SEQ ID NO: 189 - DNA, 3333 bp, Homo sapiens
  ref <308>: DATABASE ACCESSION NUMBER: EMBL / AK000791
  ref <309>: DATABASE ENTRY DATE: 2000-02-22
tagtgggaataccccaacaggccttcactcactcaagaaacacttgcaggacgatggagtgggaagggtgccatggacagggcaatgggtcagaccttgctctcttggaagtgcccccatgcagccagcagtgtcttgggagccaagctgagaatgcctgatgctaccctctgtctgttccatccctctcctaccctcaccccccactcccatttaggaccccactgggagaagggagggtgggcaggaagtgctgagccctgggtttggaggagggacagggctgggctgagaggacctgttcccaggcctaaccaaaactgtttcattcaccagcagccctagggtgaggggcttggatggaccttggaggttgggagttcattcattctagtggaacaggcagaaattaatcaaataatcatgtgtaaatagggcccataggaaggacgcaaaggcctgtgtgtgcaggccagaaaaaggctatccacacagggtggccaggacactttctcctgtaaggaagggatgcaccagccaggcctgaaagaatgagtaagagttggaggatggaggtggggcaataaggtagggagcgagctgaaaattgcaggcaaaggatataacacatgccccaaggcaggagggtacaggaggctggagtgcgtgggagggaggcagtagaaccaagatgggggtggagaacaggccgcactctgctgcactttgaggaccatgggagagcattcagtccttacccaagagcaatcaaaagccgctgaagaccttgattttggagtcagggttgggatcggcgggaggggagggggggcggtggccaggcagtgatgtcacagacacagtccttcccaggacacatctgggagcccagtaggctgagaaccagaatgcagtcagccccctcccatggaggagcacttctccaggctggggagagccccttcccctcctgccgtaccctggtggagccagcccactggccttgtaccaggtgcactcggtgagtggttggtgggagattctaaccctgggctcaggcctagctgtttgtgtgtgagctggagacccaccgagcagcagcagcagcagcagcagccgcagcagccgccaccagatttgcagcccaagccccagattccagtgtcagcctcgctgcagctggtttcctgccgtgtgcttttgtgagccgacacaaagcagatggatgtgcacagagcccagcgcacaggcccatggctccctgcgcacagcctgctgaagtcctgtgaccccggcaaggggaagggctcattagggaaggttttcagagccctgactagcagagatgaataggaccttgtgtttgatcccagaaactgcttcacttgccagaactaacagaatggctaaaataaccagccttgcaagtgtgcacatgtggtgcggtggctgtgttgggtgggttggcatgtcactgtgggcctgagcaagtacccagaagagcaggattagacgatgtgaccaggtcagggctgatggaaacctgaccacttctctcttttttgactagggtcctggtcctggacaaaggagtagtagctgaatttgattctccagccaacctcattgcagctagaggcatcttctacgggatggccagagatgctggacttgcctaaaatatattcctgagatttcctcctggcctttcctggttttcatcaggaaggaaatgacaccaaatatgtccgcagaatggacttgatagcaaacactgggggcaccttaagattttgcacctgtaaagtgccttacagggtaactgtgctgaatgctttagatgaggaaatgatccccaagtggtgaatgacacgcctaaggtcacagctagtttgagccagttagactagtccccggtctcccgattcccaactgagtgttatttgcacactgcactgttttcaaataacgattttatgaaatgacctctgtcctccctctgatttttcatattttctaaagtttcgtttctgttttttaataaaaagctttttcctcctggaacagaagacagctgctgggtcaggccacccctaggaactcagtcctgtactctggggtgctgcctgaatccattaaaaatgggagtactgatgaaataaaactacatggtcaacagtatatacacagtagtctttttgcacttgttcacaaggtttggggattaggatctttggaggaggccaagaggaagactttctacacatgtacatggttgtagttacctgaacttcagacccaagagctcttggctgcaaatattgccttcacagccaaaattccctgggtaattgccagtagctcctgctctgctgtgcagatattgtaaaacggtgagaaaggccctgaaatctgacctggggcctcttgggaaagctgctgtgaacacctccacgttaatgtcatccctcagccctctatgcctgtttctctagggactgagaagtgcatgatgcttttacttccttgctcatttcgaagtctgttccagacagttcctataaccagtgaggcctcccaaagtgctgggattacaggcgtgagccactgtgcccagcttcaacaatgacattttctaacacatggggaagggcacactgggctccacaggcactgtctttgtgcacaggccacttgcatcctgcctcctccatgaggcaatgtaaggggaactggaggcttcatgctgagtcccatcacttcctaagaaacctgctggcagagtgcctgcatgtccctcaccttattggtgtctcacagccactctggtcacagatgaagaagcaactcaagtggcagctggaccgtgacagcaccatgaggagctgagccttgtggggagagcactgtgtctggagtcccaggctgctgtgtgaccctgggcaatttgcaaaacctttctgagcctgtttcaaatgaaaatgatgcttcgtgggattgtcgtagtcaatgagggctgggcacagtggctcacacctgtaatctcagcactttgggaggccaaggagggcggatgacttgaggtgaggagttcaagaccagcctggccaacatggagaaaccctgtctctactaaaaacaaaacaaaacaaaacaaaaacaaaaatttgccggatgtggtggtgcatgcctgtaatctcagctactcgggaggctgacagagaattgcttgaactcaggaagcaaagattgcagtgagccaagattacgccaggacactccagtctgagtgacagagggagacgttgtctcaaaaaaaaaaaaaaaaaaaaa

SEQ ID NO: 190 - protein, 1527 aa, Homo sapiens
  ref <308>: DATABASE ACCESSION NUMBER: SWISS-Prot / O15438
  ref <309>: DATABASE ENTRY DATE: 2002-06-15
MDALCGSGELGSKFWDSNLSVHTENPDLTPCFQNSLLAWVPCIYLWVALPCYLLYLRHHCRGYIILSHLSKLKMVLGVLLWCVSWADLFYSFHGLVHGRAPAPVFFVTPLVVGVTMLLATLLIQYERLQGVQSSGVLIIFWFLCVVCAIVPFRSKILLAKAEGEISDPFRFTTFYIHFALVLSALILACFREKPPFFSAKNVDPNPYPETSAGFLSRLFFWWFTKMAIYGYRHPLEEKDLWSLKEEDRSQMVVQQLLEAWRKQEKQTARHKASAAPGKNASGEDEVLLGARPRPRKPSFLKALLATFGSSFLISACFKLIQDLLSFINPQLLSILIRFISNPMAPSWWGFLVAGLMFLCSMMQSLILQHYYHYIFVTGVKFRTGIMGVIYRKALVITNSVKRASTVGEIVNLMSVDAQRFMDLAPFLNLLWSAPLQIILAIYFLWQNLGPSVLAGVAFMVLLIPLNGAVAVKMRAFQVKQMKLKDSRIKLMSEILNGIKVLKLYAWEPSFLKQVEGIRQGELQLLRTAAYLHTTTTFTWMCSPFLVTLITLWVYVYVDPNNVLDAEKAFVSVSLFNILRLPLNMLPQLISNLTQASVSLKRIQQFLSQEELDPQSVERKTISPGYAITIHSGTFTWAQDLPPTLHSLDIQVPKGALVAVVGPVGCGKSSLVSALLGEMEKLEGKVHMKGSVAYVPQQAWIQNCTLQENVLFGKALNPKRYQQTLEACALLADLEMLPGGDQTEIGEKGINLSGGQRQRVSLARAVYSDADIFLLDDPLSAVDSHVAKHIFDHVIGPEGVLAGKTRVLVTHGISFLPQTDFIIVLADGQVSEMGPYPALLQRNGSFANFLCNYAPDEDQGHLEDSWTALEGAEDKEALLIEDTLSNHTDLTDNDPVTYVVQKQFMRQLSALSSDGEGQGRPVPRRHLGPSEKVQVTEAKADGALTQEEKAAIGTVELSVFWDYAKAVGLCTTLAICLLYVGQSAAAIGANVWLSAWTNDAMADSRQNNTSLRLGVYAALGILQGFLVMLAAMAMAAGGIQAARVLHQALLHNKIRSPQSFFDTTPSGRILNCFSKDIYVVDEVLAPVILMLLNSFFNAISTLVVIMASTPLFTVVILPLAVLYTLVQRFYAATSRQLKRLESVSRSPIYSHFSETVTGASVIRAYNRSRDFEIISDTKVDANQRSCYPYIISNRWLSIGVEFVGNCVVLFAALFAVIGRSSLNPGLVGLSVSYSLQVTFALNWMIRMMSDLESNIVAVERVKEYSKTETEAPWVVEGSRPPEGWPPRGEVEFRNYSVRYRPGLDLVLRDLSLHVHGGEKVGIVGRTGAGKSSMTLCLFRILEAAKGEIRIDGLNVADIGLHDLRSQLTIIPQDPILFSGTLRMNLDPFGSYSEEDIWWALELSHLHTFVSSQPAGLDFQCSEGGENLSVGQRQLVCLARALLRKSRILVLDEATAAIDLETDNLIQATIRTQFDTCTVLTIAHRLNTIMDYTRVLVLDKGVVAEFDSPANLIAARGIFYGMARDAGLA

SEQ ID NO: 191 - DNA, 1575 bp, Rattus norvegicus
  ref <308>: DATABASE ACCESSION NUMBER: EMBL / AB010743
  ref <309>: DATABASE ENTRY DATE: 1998-08-21
atcgcttgcttcttgggcagccaccgccgccgtcggacctagccgtctgcactcctgtgttctcctgtgtattctcctgcggtccggacacaatagtatgatctttaagtgtttcgtctcccagacattttctatgggaaatcaaggggatcaggccatgatagccactggcagctttgaagaacgggacacctttagagaagcttgatcttggaggcctcagcgtgagacctcaaagcaccctcccgactccggcagagttcctctgtctcgtcttgacgattgaaggtccccactgcttcagtttttctccatcttctgggaggtagcaggaagtcagaatcatggttggtttcaaggccaccgatgtgccccccacagccaccgtgaagttcctgggggctgggacagcagcctgtattgcagatctcatcactttccctctagacaccgccaaagtccggctgcagatccaaggagagagtcaagggctagcgcgcaccgccgccagcgcccagtaccgcggcgtgctgggcaccatcctaaccatggtgcgcactgagggtccgcgcagcctctacaatgggctggtcgccggcctacagcgccagatgagctttgcctccgtccgcattggcctctacgactctgtaaagcagttctacaccaagggctcagagcatgcaggcattgggagccgcctcctggcaggtagcaccacaggtgccctggctgtggctgtggcccaacctacagatgtggtaaaggtccgcttccaggcccaggcccgggctggcggtggtcggagataccagagcactgtcgaagcctacaagaccattgcacgagaggaagggatccggggcctctggaaagggacctctcccaatgttgcccgaaatgccattgtcaactgtactgagctggtgacctatgacctcatcaaagatactctcctgaaagccaacctcatgacagacgacctcccttgccacttcacttctgccttcggggcgggcttctgcaccaccgtcattgcctcccccgttgatgtggtcaagacgagatatatgaactctgccttgggccagtaccacagcgccggccactgtgccctgaccatgctccggaaggaggggccccgaaccttctacaaggggttcatgccttccttcctccgcttgggatcctggaacgtagtaatgtttgtcacctatgagcagctcaaaagggccctgatggctgcctatgaatcccgggaggcacccttttgagcctctccagctgatgacctggaccctgctccccattcctgccctgtcttttccttcatcctctgcccagccccaacctcttcccatttcccacactccaactcccttcccagctcatctccctatacctcctcagcaaggaggccttaccctagcacatctcactatgcctcctcagcgaggaggcctgaccccggaccctgcaccctcagtcctgctaacagttaagcccaaatcttttgtcctcattcccagcccagcttagccagccttcgcccataaagcaagctccaatgtaaaa

SEQ ID NO: 192 - protein, 309 aa, Rattus norvegicus
  ref <308>: DATABASE ACCESSION NUMBER: SWISS-Prot / P56500
  ref <309>: DATABASE ENTRY DATE: 1999-07-15
MVGFKATDVPPTATVKFLGAGTAACIADLITFPLDTAKVRLQIQGESQGLARTAASAQYRGVLGTILTMVRTEGPRSLYNGLVAGLQRQMSFASVRIGLYDSVKQFYTKGSEHAGIGSRLLAGSTTGALAVAVAQPTDVVKVRFQAQARAGGGRRYQSTVEAYKTIAREEGIRGLWKGTSPNVARNAIVNCTELVTYDLIKDTLLKANLMTDDLPCHFTSAFGAGFCTTVIASPVDVVKTRYMNSALGQYHSAGHCALTMLRKEGPRAFYKGFMPSFLRLGSWNVVMFVTYEQLKRALMAAYESREAPF

SEQ ID NO: 193 - DNA, 1104 bp, Homo sapiens
  ref <308>: DATABASE ACCESSION NUMBER: EMBL / AF011449
  ref <309>: DATABASE ENTRY DATE: 1999-06-30
cagccccaccgctgcactgaagcccagggctgtggagcagcctctctccttggacctcctctcggccctaaagggactgggcagagccttccaggactatggttggactgaagccttcagacgtgcctcccaccatggctgtgaagttcctgggggcaggcacagcagcctgttttgctgacctcgttacctttccactggacacagccaaggtccgcctgcagatccagggggagaaccaggcggtccagacggcccggctcgtgcagtaccgtggcgtgctgggcaccatcctgaccatggtgcggactgagggtccctgcagcccctacaatgggctggtggccggcctgcagcgccagatgagcttcgcctccatccgcatcggcctctacgactccgtcaagcaggtgtacacccccaaaggcgcggacaactccagcctcactacccggattttggccggctgcaccacaggagccatggcggtgacctgtgcccagcccacagatgtggtgaaggtccgatttcaggccagcatacacctcgggccatccaggagcgacagaaaatacagcgggactatggacgcctacagaaccatcgccagggaggaaggagtcaggggcctgtggaaaggaactttgcccaacatcatgaggaatgctatcgtcaactgtgctgaggtggtgacctacgacatcctcaaggagaagctgctggactatcacctgctcactgacaacttcccctgccactttgtctctgcctttggagccggcttctgtgccacagtggtggcctccccggtggacgtggtgaagacccggtatatgaactcacctccaggccagtacttcagccccctcgactgtatgataaagatggtggcccaggagggccccacagccttctacaagggatttacaccctcctttttgcgtttgggatcctggaacgtggtgatgttcgtaacctatgagcagctgaaacgggccctgatgaaagtccagatgttacgggaatcaccgttttgaacaagacaagaaggccactggtagctaacgtgtccgaaaccagttaagaatggaagaaaacggtgca

SEQ ID NO: 194 - protein, 312 aa, Homo sapiens
  ref <308>: DATABASE ACCESSION NUMBER: SWISS-Prot / P55916
  ref <309>: DATABASE ENTRY DATE: 2002-06-15
MVGLKPSDVPPTMAVKFLGAGTAACFADLVTFPLDTAKVRLQIQGENQAVQTARLVQYRGVLGTILTMVRTEGPCSPYNGLVAGLQRQMSFASIRIGLYDSVKQVYTPKGADNSSLTTRILAGCTTGAMAVTCAQPTDVVKVRFQASIHLGPSRSDRKYSGTMDAYRTIAREEGVRGLWKGTLPNIMRNAIVNCAEVVTYDILKEKLLDYHLLTDNFPCHFVSAFGAGFCATVVASPVDVVKTRYMNSPPGQYFSPLDCMIKMVAQEGPTAFYKGFTPSFLRLGSWNVVMFVTYEQLKRALMKVQMLRESPF

SEQ ID NO: 195 - DNA, 1444 bp, Rattus norvegicus
  ref <308>: DATABASE ACCESSION NUMBER: EMBL / AB010960
  ref <309>: DATABASE ENTRY DATE: 2001-05-02
ccagacaggctagccggttcactacttgagccagtgcctccgagtcctcaccccaccataaggctgtaactcgagccgtccgccgcccacccccttcccactccgccccagctctgcgatccaggtccctacgtcgcgcggccccttgtggccctaactcgactgcaaatctgccatgggctggcgggcctgtctccgtccggaggcgtccggcgctgtacagggccgctggttgggggctgtcctgagcgggttgtgtcttctctccgcgctggcgttcctggaatggctagggtcgccgacagagaccgcctggaatgcagctcagggaaatgtggatgcgccagatgtgggcggctccactccccaggtacccagcctattgtccatgctggtaacccgaagacgccgctacacgctgacaccggccaggctgcgttgggaccacttcaacctcacgtacaggattctctcctttccccggaaccttttaagcccggaagagactcggcggggcctggcggctgcctttcgaatgtggagtgatgtttccccattcagcttccgtgaggtggcccctgaacgtcccagtgacctcaagataggtttctacccagttaaccacaccgactgcttggtctctgccctgcaccactgcttcgatggtcctacaggtgaactggcccacgctttcttcccaccccacggtggcattcattttgatgacagcgagtactgggtcttgggtcccacgcgctacagctggaagaaaggtgtttggctcacagacctggtgcacgtggcagcccatgagattggccatgcactgggactgatgcactcacagcaagaccaggcactcatgcacctcaatgccacattgcgaggctggaaggcactgtcccaggatgagctgtggggactacaccgactctatggctgcctggaccggatttttgtgtgtacatcctgggcacgaaagggattttgtgatgtccgccagaggctcatgaagaggctctgccccagaagctgtgatttctgttacgaattcccatttcccacggttgccaccaccacatcacccaccagaacgaaaacgaggttcgtgagagagggtaggaacatgaccttccactgtggacagaagatcctacacaagaaaggcaaagtatactggtacaaggaccaggaacccctggagttctcctaccctggctatctggccctgggtgaggcacggctgagcatcattgccaatgcagtcaacgaaggcacctacacatgtgtggtacgccaccgccagcgtgttctcaccacctactcctggagggtccgagtgaggagctgagccagctccagcctctgtgctggaagccagcagataaagcactttctctctgaaaaaaaaaaaaaaaaaaaaaagaaaaaaaaaaaaaaaaaa

SEQ ID NO: 196 - protein, 391 aa, Rattus norvegicus
  ref <308>: DATABASE ACCESSION NUMBER: SWISS-Prot / BAA24832
  ref <309>: DATABASE ENTRY DATE: 2003-02-01
MGWRACLRPEASGAVQGRWLGAVLSGLCLLSALAFLEWLGSPTETAWNAAQGNVDAPDVGGSTPQVPSLLSMLVTRRRRYTLTPARLRWDHFNLTYRILSFPRNLLSPEETRRGLAAAFRMWSDVSPFSFREVAPERPSDLKIGFYPVNHTDCLVSALHHCFDGPTGELAHAFFPPHGGIHFDDSEYWVLGPTRYSWKKGVWLTDLVHVAAHEIGHALGLMHSQQDQALMHLNATLRGWKALSQDELWGLHRLYGCLDRIFVCTSWARKGFCDVRQRLMKRLCPRSCDFCYEFPFPTVATTTSPTRTKTRFVREGRNMTFHCGQKILHKKGKVYWYKDQEPLEFSYPGYLALGEARLSIIANAVNEGTYTCVVRHRQRVLTTYSWRVRVRS

SEQ ID NO: 197 - DNA, 1212 bp, Homo sapiens
  ref <308>: DATABASE ACCESSION NUMBER: EMBL / AB010961
  ref <309>: DATABASE ENTRY DATE: 2001-05-02
agccctgagccccatagcaagtctgccatgggccgcggggcccgtgtcccctcggaggccccgggggcaggcgtcgagcgccgctggcttggagccgcgctggtcgccctgtgcctcctccccgcgctggtgctgctggcccggctgggggccccggcggtgccggcctggagcgcagcgcagggagacgtcgctgcgctgggcctctcggcggtcccccccacccgggtcccgggcccactggccccccgcagacgccgctacacgctgactccagccaggctgcgctgggaccacttcaacctcacctacaggatcctctccttcccgcggaacctgctgagcccgcgggagacgcggcgggccctagctgccgccttccgcatgtggagcgacgtgtcccccttcagcttccgcgaggtggcccccgagcagcccagcgacctccggataggcttctacccgatcaaccacacggactgcctggtctccgcgctgcaccactgcttcgacggccccacgggggagctggcccacgccttcttccccccgcacggcggcatccacttcgacgacagcgagtactgggtcctgggccccacgcgctacagctggaagaaaggcgtgtggctcacggacctggtgcacgtggcggcccacgagatcggccacgcgctgggcctgatgcactcacaacacggccgggcgctcatgcacctgaacgccacgctgcgcggctggaaggcgttgtcccaggacgagctgtgggggctgcaccggctctacggatgcctcgacaggctgttcgtgtgcgcgtcctgggcgcggaggggcttctgcgacgctcgccggcggctcatgaagaggctctgccccagcagctgcgacttctgctacgaattccccttccccacggtggccaccaccccaccgccccccaggaccaaaaccaggctggtgcccgagggcaggaacgtgaccttccgctgcggccagaagatcctccacaagaaagggaaagtgtactggtacaaggaccaggagcccctggagttctcctaccccggctacctggccctgggcgaggcgcacctgagcatcatcgccaacgccgtcaatgagggcacctacacctgcgtggtgcgccgccagcagcgcgtgctgaccacctactcctggcgagtccgtgtgcggggctgagcccggctgata

SEQ ID NO: 198 - protein, 390 aa, Homo sapiens
  ref <308>: DATABASE ACCESSION NUMBER: SWISS-Prot / BAA24833
  ref <309>: DATABASE ENTRY DATE: 2003-02-01
MGRGARVPSEAPGAGVERRWLGAALVALCLLPALVLLARLGAPAVPAWSAAQGDVAALGLSAVPPTRVPGPLAPRRRRYTLTPARLRWDHFNLTYRILSFPRNLLSPRETRRALAAAFRMWSDVSPFSFREVAPEQPSDLRIGFYPINHTDCLVSALHHCFDGPTGELAHAFFPPHGGIHFDDSEYWVLGPTRYSWKKGVWLTDLVHVAAHEIGHALGLMHSQHGRALMHLNATLRGWKALSQDELWGLHRLYGCLDRLFVCASWARRGFCDARRRLMKRLCPSSCDFCYEFPFPTVATTPPPPRTKTRLVPEGRNVTFRCGQKILHKKGKVYWYKDQEPLEFSYPGYLALGEAHLSIIANAVNEGTYTCVVRRQQRVLTTYSWRVRVRG

SEQ ID NO: 199 - DNA, 1444 bp, Rattus norvegicus; identical to SEQ ID NO: 195
  ref <308>: DATABASE ACCESSION NUMBER: EMBL / AB010960
  ref <309>: DATABASE ENTRY DATE: 2001-05-02

SEQ ID NO: 200 - protein, 391 aa, Rattus norvegicus; identical to SEQ ID NO: 196
  ref <308>: DATABASE ACCESSION NUMBER: SWISS-Prot / BAA24832
  ref <309>: DATABASE ENTRY DATE: 2003-02-01

SEQ ID NO: 201 - DNA, 1212 bp, Homo sapiens; identical to SEQ ID NO: 197
  ref <308>: DATABASE ACCESSION NUMBER: EMBL / AB010961
  ref <309>: DATABASE ENTRY DATE: 2001-05-02

SEQ ID NO: 202 - protein, 390 aa, Homo sapiens; identical to SEQ ID NO: 198
  ref <308>: DATABASE ACCESSION NUMBER: SWISS-Prot / BAA24833
  ref <309>: DATABASE ENTRY DATE: 2003-02-01

SEQ ID NO: 203 - DNA, 2169 bp, Rattus norvegicus
  ref <308>: DATABASE ACCESSION NUMBER: EMBL / AB011369
  ref <309>: DATABASE ENTRY DATE: 1998-11-11
cgcccgcccgcctccctccgtctcttgcttttgggtcgtggttacccatcgccctttgcggccttggccctgtgtctccttcgctttctgtgttcctcgcagggccctactgggtcccaatgccagactttggcccttcggcagtgtgatgctgcccgagtgtagaccgggacacacgcacaaggccgactaggactgagttgcttctgccctccctccctctcccaggttaccccaaggtagcgtttcccggaagcagcagccctttctgaggggatgggcgcagccaggccagatggacgagaagaccaagaaagcagaggagatggccctgagccttgcccgggcagtgactggcggagatgaacaggctgcaatcaagtatgccacctggctggcagagcagaaggtacccctcagggtgcaagtaaaacccgaggtttccccaacacaagacatcaggctttgtgtgagtgtggaagatgcttacatgcacactgtcaccatttggctcacagtacgccctgatatgacagtggcctcccttaaggacatggtattcctggactatggctttccacccagcctgcagcagtgggtggttggacagaggctggcacgagaccaggagaccttgcattcacatggcattcgacggaatggagacagtgcttatctctacctgctgtcagcccgcaacacatcactcaaccctcaagagctgcagcggcagcggcagctgcgcatgttggaagatttgggcttcaaggacctcaccctgcagccacggggtcccttggaacctgtccttcccaagcccaggacccaccaggagacggggcagccagatgcagccccagagtcaccaccggtgggctggcagtgccctggctgcacgttcatcaacaaacccacacggcctgggtgtgagatgtgctgccgtgcaaggcctgaggcctaccagatccctgcctcgtaccagcctgatgaggaggagcgagcacgcctggctggtgaggaggaggcgctgcgccagtatgagcagggagtgcctgcagggtaccatccgaaacagccaggaggcggaggtatcctgccccttcattgacaacacctactcatgccctggcaagctgctggagagggagatccgggcgctcctgtcccctgaggactaccagcgtttcctggacctgggtgtgtccatcgcagagaatcgaagcaccttgagctaccactgcaagacccccgactgcaggggctggtgcttctttgaggatgacgtcaacgagttcacctgtcctgtgtgcacccgcgtcaactgtctgctctgcaaggccatccacgagcgcatgaattgcagagagtaccaggatgacctggcccatcgggctcggaatgatgtggctgcccagcagacaactgagatgctgagggtgatgctgcagcaaggcgaggccatgtactgcccacagtgccggattgtggtgcagaagaaggatggctgtgactggatccgctgtactgtctgccacactgagatctgctgggtcaccaagggtccacgctggggccctgggggcccaggggacaccagtggtggctgccgctgccgggtcaatgggattccatgccatccaagctgtcaaaactgccactaagtcaaagatggtggctctcagactgacccagccgcacatgtatagcagtgaacatcagggccaggccaagggctttagctctggtttggccacaataccttcaagcttggtaagggagaaagactgagctgtactgcagtctgattgctgtgttacaagaacccagctgagctgatgtcagccgcactgcctctgttgcttcaagggcttgctgaccagacctcatggccctgagctagcttccctacccttactagccaccagccttaaacacagccttggcctaaggcctggcggctagtgctctgagcctcctggtgactctatttcccctcagcttgctccctgaggacccacagccgcatctgttgccttgctggctttctgggtactttttaaagctgatgtgaatccatccagggcccaggtagactggtaggtcaggaaacagcccatggggtccagctctgcatccccctctctaagtgaattaaagtgtttttccagg

SEQ ID NO: 204 - protein, 498 aa, Rattus norvegicus
  ref <308>: DATABASE ACCESSION NUMBER: SWISS-Prot / Q62921
  ref <309>: DATABASE ENTRY DATE: 2002-06-15
MALSLARAVTGGDEQAAIKYATWLAEQKVPLRVQVKPEVSPTQDIRLCVSVEDAYMHTVTIWLTVRPDMTVASLKDMVFLDYGFPPSLQQWVVGQRLARDQETLHSHGIRRNGDSAYLYLLSARNTSLNPQELQRQRQLRMLEDLGFKDLTLQPRGPLEPVLPKPRTHQETGQPDAAPESPPVGWQCPGCTFINKPTRPGCEMCCRARPEAYQIPASYQPDEEERARLAGEEEALRQYEQRKQQQQEGNYLQHVQLEQRSLVLNTEPAECPVCYSVLAPGEAVVLRECLHTFCRECLQGTIRNSQEAEVSCPFIDNTYSCPGKLLEREIRALLSPEDYQRFLDLGVSIAENRSTLSYHCKTPDCRGWCFFEDDVNEFTCPVCTRVNCLLCKAIHERMNCREYQDDLAHRARNDVAAQQTTEMLRVMLQQGEAMYCPQCRIVVQKKDGCDWIRCTVCHTEICWVTKGPRWGPGGPGDTSGGCRCRVNGIPCHPSCQNCH

SEQ ID NO: 205 - DNA, 2554 bp, Homo sapiens
  ref <308>: DATABASE ACCESSION NUMBER: Refseq / NM_031228
  ref <309>: DATABASE ENTRY DATE: 2002-11-05
gggagtccggggacccgcgatcagccccggaggacggggtggggtcgccccaaacaggagcgccgggaccgctgggaccccgcactcggcgtccgccgccgccgggtagccgggcagtggaggtcccggatgaggcgacaatttttccggccccccctcccagtcccgccccacttccggggccgccactttcactttctcttccgccgaagccgctccccttgcgaagaactggggcctcccgggaggagagagggctttgccttgaaacccgggacgccaggggcgctcccgcaagtgggggtcctccgggacttggaacgccccggctgggtggtgtccgggcgtcctttccccgcttcttcccacctcggctggtcccgtttcctcctgcgcccagtgcggacctgtctcggcgcccgctgccctctcaccgccccacgcaggatcccggcctggtcaccgggcagtgtgatgcttcccgactgccgcggggacagcgaggcacacacagggcttgggccgcgccggaggccacacggcctggctgagttgctcctggtctcccgcctctcccaggcgacccggaggtagcatttcccaggaggcacggtcccccccagggggatgggcacagccacgccagatggacgagaagaccaagaaagcagaggaaatggccctgagcctcacccgagcagtggcgggcggggatgaacaggtggcaatgaagtgtgccatctggctggcagagcaacgggtgcccctgagtgtgcaactgaagcctgaggtctccccaacgcaggacatcaggctgtgggtgagcgtggaggatgctcagatgcacaccgtcaccatctggctcacagtgcgccctgatatgacagtggcgtctctcaaggacatggtttttctggactatggcttcccaccagtcttgcagcagtgggtgattgggcagcggctggcacgagaccaggagaccctgcactcccatggggtgcggcagaatggggacagtgcctacctctatctgctgtcagcccgcaacacctccctcaaccctcaggagctgcagcgggagcggcagctgcggatgctggaagatctgggcttcaaggacctcacgctgcagccgcggggccctctggagccaggccccccaaagcccggggtcccccaggaacccggacgggggcagccagatgcagtgcctgagcccccaccggtgggctggcagtgccccgggtgcaccttcatcaacaagcccacgcggcctggctgtgagatgtgctgccgggcgcgccccgaggcctaccaggtccccgcctcataccagcccgacgaggaggagcgagcgcgcctggcgggcgaggaggaggcgctgcgtcagtaccagcagggagtgcctgcagggcaccatccgcaacagccaggaggcggaggtctcctgccccttcattgacaacacctactcgtgctcgggcaagctgctggagagggagatcaaggcgctcctgacccctgaggattaccagcgatttctagacctgggcatctccattgctgaaaaccgcagtgccttcagctaccattgcaagaccccagattgcaagggatggtgcttctttgaggatgatgtcaatgagttcacctgccctgtgtgtttccacgtcaactgcctgctctgcaaggccatccatgagcagatgaactgcaaggagtatcaggaggacctggccctgcgggctcagaacgatgtggctgcccggcagacgacagagatgctgaaggtgatgctgcagcagggcgaggccatgcgctgcccccagtgccagatcgtggtacagaagaaggacggctgcgactggatccgctgcaccgtctgccacaccgagatctgctgggtcaccaagggcccacgctggggccctgggggcccaggagacaccagcgggggctgccgctgcagggtaaatgggattccttgccacccaagctgtcagaactgccactgagctaaagatggtggggccacatgctgacccagccccacatccacattctgttagaatgtagctcagggagcttcgtggacggccttgcttgctgtagcgttgtaggggccctgcctgcactgcggttgtccacggtcacatctgccccagtgcctttgtccttcccttggggcttgccggccagacttctctcccctgcggctcccacctctgcctgaccccagccttaaacatagcccctggccagaggccttgctgggtggagcctctgtgtgactccatactcctcccaccacaacactcatctgtcaaacaccaagcactctcagcctccccgccttcagctgtcagctttctggggctaacttctctgcctttgtggttggaggcctgaggcctcttggaactcttgctaacctgttcagagccaggaaggagactgcacagttttgaaagcacagcccgtcaggtccggctctgcgtctccctctctgcagcctgtgtaagctattataattaaaatggttttccgggaa

SEQ ID NO: 206 - protein, 500 aa, Homo sapiens
  ref <308>: DATABASE ACCESSION NUMBER: SWISS-Prot / Q9BYM8
  ref <309>: DATABASE ENTRY DATE: 2002-06-15
MALSLTRAVAGGDEQVAMKCAIWLAEQRVPLSVQLKPEVSPTQDIRLWVSVEDAQMHTVTIWLTVRPDMTVASLKDMVFLDYGFPPVLQQWVIGQRLARDQETLHSHGVRQNGDSAYLYLLSARNTSLNPQELQRERQLRMLEDLGFKDLTLQPRGPLEPGPPKPGVPQEPGRGQPDAVPEPPPVGWQCPGCTFINKPTRPGCEMCCRARPEAYQVPASYQPDEEERARLAGEEEALRQYQQRKQQQQEGNYLQHVQLDQRSLVLNTEPAECPVCYSVLAPGEAVVLRECLHTFCRECLQGTIRNSQEAEVSCPFIDNTYSCSGKLLEREIKALLTPEDYQRFLDLGISIAENRSAFSYHCKTPDCKGWCFFEDDVNEFTCPVCFHVNCLLCKAIHEQMNCKEYQEDLALRAQNDVAARQTTEMLKVMLQQGEAMRCPQCQIVVQKKDGCDWIRCTVCHTEICWVTKGPRWGPGGPGDTSGGCRCRVNGIPCHPSCQNCH

SEQ ID NO: 207 - DNA, 11868 bp, Rattus norvegicus
  ref <308>: DATABASE ACCESSION NUMBER: EMBL / AB011528
  ref <309>: DATABASE ENTRY DATE: 1998-08-24
agcaaaccatccgagcggccgggagccatgttggagcgtcgggaggcggcagcggcgccgggaatgctgtggtgggggcagcaaaagccggggccgtatgccaaacgggctctggccgcggagtagatggtgcccagagagcagtggcggcgcggaccgacgggcagaggggccgagggccggggcggtggcaggggcccaggagggggccagagcagcggggcgggcccaaggcccggacccgggcggggggcggcggaggccgtgacgggaggcgggggtgatggcgaggcggcctctatggtggggtctcccgggaccgtcgaccccgttactactgctccttctcttctctttgttcccgtctagccgggaggagatggggggcggtggggatcagggctgggacccaggggtagctactgctactgggccaagagctcaaatcggcagtggagccgtagctctttgtcccgagtctccaggcgtctgggaagatggagatcctggcctgggggtcagggaacctgtcttcatgaagctccgagtaggtaggcaaaacgcccggaatggtcgaggggcccctgagcaaccaaaccgggagccggtggtccaggcattaggtagtcgcgagcaagaggcaggtcagggttcgggatatttgttatgttggcacccagagatctcctcttgtgggcggacagggcatttacgaagaggtagtttgccactagatgctctgtccccaggggattctgatctgaggaacagctctcctcacccttcggaacttctggctcagcctgatagccccaggccagtggccttccaacgtaatggtaggagaagcatccgcaaaagagtggaaacctttcgctgctgcgggaaactatgggagccaggacacaagggtcagggtgagagatccgcgacttccacagtggataggggaccccttcggcgggactgcctccccggctctttgggatctggcctgggggaggattcagcaccacgtgctgtgaggacagctcctgcgccgggttcagcacctcacgagtctcggacagctcccgagcgcatgcgctcccgcggtctcttccgccgcggtttcctctttgagcgccctgggccgcgccctcccggattcccgactggtgctgaagccaagcgaatactctcaacgaaccaggctcgttcccgtcgtgctgcaaaccgccacccgcagtttcctcaatacaactaccaaacacttgtacctgaaaatgaggcagcgggcacagctgtgctgcgcgtggtggcgcaagacccggacccaggcgaagccgggcgcctcgtctactcgctggcggcgctcatgaacagtcgctcgctggagcttttcagcattgatcctcagagtggcctcatacgcacggcggccgctctggaccgtgagagtatggaacgccactaccttcgagtgactgcacaggaccacggctcaccgcgcctctcagctaccaccatggtggcggtgacagtagctgaccgcaacgatcacgcgccagtgtttgagcaagcccagtatcgggaaacacttcgtgagaatgtggaagaaggctaccccatcctgcagttgcgtgccacggacggtgacgcgccacctaatgccaacctgcgctaccgcttcgtggggtcgccagctgctcgtaccgcagcggccgctgctttcgagattgatccacggtccggccttatcagcactagtggccgcgtggaccgggaacacatggaaagctatgagctggtggtagaggctagtgaccagggtcaggagcctgggccacgttcagccaccgtacgagtgcacataactgtgctggatgagaatgataacgctccccagttcagcgagaagcgctatgtggctcaggtgcgtgaggatgtacgccctcacacggtggtgctacgtgtcacggccacggacaaggacaaggatgccaatggtttggtacattataacatcatcagcggcaacagccggggccattttgccatcgatagtctcacgggtgagatacaggtaatggcacctctggactttgaggcagagagagaatacgctttgcgtatccgggcacaagatgcaggccggccaccactgtccaacaacacaggcctggcaagcatccaggtggtagacatcaatgatcatagtcctatctttgtcagcacaccctttcaggtctctgttttggaaaatgcacccctgggtcactcagtcattcacattcaggcagtggacgcagatcatggggagaactccaggttagagtattctttaactggcgtggcatcagacacaccctttgtgataaatagtgccactggctgggtctctgtgagtggtcccctggaccgtgaatctgtggaacattacttctttggggtggaggctcgagaccatggttcacccccactctctgcttcagccagtgtcacagtaactgtgttggatgtcaacgacaatcggcctgagttcaccatgaaagagtaccaccttcggctcaacgaggacgcagcggtgggcaccagcgtggtcagtgtgactgcggtagatcgagatgccaacagtgccatcagctaccaaatcacaggtggcaacactcggaaccgattcgccatcagcacccaaggtggcatgggtctagtgaccctggctctgccactggattacaagcaggaacgctacttcaagctggtgctgactgcatctgaccgtgcccttcacgaccactgctatgtgcatatcaacatcacagatgccaacacacacaggcctgtctttcaaagcgctcactactcagtgagcatgaatgaagaccgcccagtgggtagcaccgtggtggtcatcagtgcttctgatgatgacgtgggtgaaaacgcccgtatcacctaccttctggaagacaacctgccccagttccgaatcgatgcagactcaggggccattacactacaagctccactggactatgaggaccaagtgacctatacactggccattactgctcgggacaacggtataccacagaaggcagataccacatatgtggaggttatggtaaacgacgtgaatgacaatgcgccccagtttgtggcctcccactatacaggtttggtctctgaagatgctccacctttcactagtgttctgcagatctcagccactgaccgggatgctcatgccaatggccgggtccaatacactttccagaatggggaagatggggatggagattttaccattgagcccacctctggcatcgtcaggactgtgaggcgactggaccgggaagcggtgccagtgtatgagctgactgcctatgcagtggaccgtggcgtgcccccactgaggactccagtcagcatccaggtgactgtacaagacgtgaatgacaatgcacctgtcttcccagctgaggagtttgaagtgagggtgaaggagaacagcattgtggggtcggtggtggctcagatcaccgcagtggaccctgatgatggccccaatgctcatattatgtaccagatcgtggaagggaacatccccgagctgttccaaatggatatcttctctggagaactcacagcactcattgacctggattatgaggctcgtcaggaatatgtgattgtggtgcaggccacatctgctcctctagttagccgggccaccgtgcatgtacgcctggtcgaccagaacgataacagtcctgtgctcaacaacttccagatcctctttaacaactatgtatccaaccgatctgacactttcccctccggcatcatcgggcgaatcccagcttatgacccggatgtctctgaccacctcttttactcctttgagaggggcaatgaactgcagctgttagtggtcaaccaaaccagtggggagcttcgactcagcagaaagttagacaacaatcgcccactagtggcgtccatgttggtaacagtaacagatggcctgcatagtgttacagcccagtgtgttctgcgtgtggtcatcatcacagaggagttgctggccaacagcttgactgttcgtctggagaacatgtggcaagagcgtttcctgtcaccgctgctgggtcattttcttgaaggcgtggctgcagtgctcgcaacacctaccgaggacgttttcatcttcaacatccagaacgacacggatgtggggggcaccgtgctcaacgtgagcttctcagcgctggcacctcgtggggctggggcaggcgctgcagggccctggttcagctccgaagagctacaggagcaactgtatgtgcgccgtgccgccttggcggcccgctcgctgctcgacgtgctaccctttgacgacaacgtgtgcctgcgcgagccgtgcgagaactacatgaaatgcgtgtcagtcctccgctttgactcctccgcgccctttctggcctcagcctccacgctcttccgacccatccaacccatcgcgggtctgcgctgccgctgtccgcctggcttcacaggagacttctgcgagacagagctcgacctctgctactcgaacccttgtcgcaatggcggcgcgtgcgcgcggcgcgagggaggctacacctgcgtgtgccgcccgcgcttcaccggggaagactgcgagctggacactgaagctggacgctgtgtgcccggtgtctgccgcaacgggggcacctgcaccaacgcacccaatggcggctttcgttgccagtgccccgcgggcggcgctttcgagggcccgcgctgtgaggtggccgcacgctcctttcctcccagttccttcgtcatgttccgcggtctgcgacagcgcttccacctcacgctgtccctctcgtttgcaactgtgcaacccagcgggctactcttctacaacgggcgcctgaatgagaagcatgactttttggctctagagcttgtagctggtcaagtacggcttacatattccacgggtgaatccagcacagtggtcagtcccacagtgccaggaggcttgagtgacggccagtggcatacagtgcatctgagatactacaacaagccccggacagatgcgctagggggtgctcagggcccttcgaaggacaaggtggctgtgttgagtgtggatgactgcaacgtggctgtggctctgcggtttggtgctgagatcggcaactactcgtgtgcagctgctggtgtgcaaacaagctccaagaagtccctggacctgacgggccctctgcttttggggggtgtccccaaccttcccgagaacttccctgtgtcccgcaaggacttcatcggctgcatgcgagacttgcacattgatggccgccgagtggacatggcagcctttgtcgccaacaatggcactacagcaggctgtcaggccaagtcacacttttgtgcctcaggcccctgcaagaacggtggcctctgctctgagcgctggggcggcttcagctgtgattgtcctgtgggctttggtggcaaagattgtcgactcacaatggcccatccctaccatttccaaggcaacgggaccctgagttgggactttggaaatgacatgcctgtgtctgtgccatggtacctgggactatcgtttcgaacacgggcaacaaaaggggtcctgatgcaagtgcagcttgggccacatagtgtgctcctctgcaagctagatcaagggttgctgtctgtgacactcagtagggcctcgggccacgctgtccacctcttgctagaccagatgactgtcagcgatggccggtggcatgaccttcggctggagctgcaggaggagccaggtggccgaaggggccaccatatctttatggtttcactggacttcaccctcttccaggacaccatggccatggggagtgagctggagggcctgaaagtaaagcatctccacgtgggaggcccgccccccagcagtaaggaggaggggcctcagggtctggttggctgtattcagggggtgtggactggctttactccctttgggtcctcagccctgccacctcccagccacagaatcaatgtggagcctggctgcactgtgaccaacccctgtgcatctgggccctgtcctcctcacgctaactgcaaagacctctggcagaccttttcctgtacctgttggccaggttactacggcccaggctgtgtggatgcctgcctcctgaacccttgtcaaaaccaggggtcgtgccggcacctccaaggaggcccccacggctatacctgcgactgtgcaagtggctattttggtcagcactgtgagcacagaatggatcagcagtgcccgcggggatggtggggaagcccaacctgtggaccctgcaactgtgatgtccacaagggctttgaccccaactgcaacaagacaagtggccagtgccactgcaaggagttccactatcgaccgaggggcagtgactcatgcctcccatgtgactgctaccctgtgggctccacctcccgctcatgtgcaccccacagcgggcagtgcccctgccgcccaggagcccttggccgtcagtgtaacagctgtgatagcccctttgcagaggtgacagccagtggttgccgagtactctacgatgcctgccccaagtccctgagatctggtgtgtggtggccccagactaagtttggtgttttggccacagtaccctgtccccggggggccttgggattgcggggtacaggtgctgcggtgcggctgtgtgatgaagaccacggttggctggagcctgacttcttcaactgtacctctcctgcctttcgagagcttagtctgctgttggatggcctagagctgaacaagacggcactggatactgtggaggccaagaagcttgctcagaggctgcgggaggtgaccggccagactgaccactactttagccaagatgtccgagtcactgcccgcttgttggcctacttgctggctttcgagagccatcagcagggcttcgggctgacagccacacaagatgcccacttcaatgagaaccttctatgggctggttctgcactgctggctccagagacaggagacttgtgggcagccctggggcagcgggcccctgggggctccccgggtagtgcagggctggtgcggcatctggaggaatatgcagccacacttgcaaggaacatggacctgacatatctgaatcctgtcggactagtcacacccaatatcatgctcagcattgaccgtatggagcaacctagttcatcccagggagcccaccgttacccccgctaccacagcaaccttttccggggccaggacgcctgggatcctcatactcatgtgctactgccttcccagtccccacagccatccccttctgaagttctgcccacaagcagcaacgcagaaaacgccacagcctccggtgtggtctccccacctgcccctctggagcctgagtctgagcctgggatctccatagtcattctactcgtgtatcgagccttgggagggcttctccctgcccagttccaagctgagcgccggggcgccaggcttccccagaaccctgttatgaactccccggtggtcagcgtggctgtttttcgtggacgcaacttcctcagaggtgccctagtgtccccaatcaaccttgagttccgcctactacagacagcgaatcggagcaaggcgatctgtgtgcagtgggacccacctggcccggcagaccagcatgggatgtggacggcaagggactgtgagctggtacacaggaatggctcccatgcacggtgtcgctgtagccggacgggcactttcggggtccttatggatgcctctccccgtgagcggctagagggagacctagagctgctggcggtgttcactcatgtggtcgtggcggcgtctgtgactgcgctagttctgaccgcagctgtcctgctgagcctgcgcagcctcaagtccaacgtgcgtgggatccatgccaatgtggcagctgccctgggagtggcagagcttctcttcctgctgggaatccacaggacccacaaccagctgctgtgcacagtggtcgccatcctcctacattacttcttcctcagcaccttcgcgtggctcctcgtgcagggcctgcacctctaccgaatgcaggttgagcctcgaaatgtggatcgtggcgctatgcgcttctaccatgccctgggctggggcgtccctgctgtgttgttgggccttgctgttgggctggacccggagggctatgggaaccccgacttctgctggatctccatccacgaacctcttatctggagttttgccggtcctatagtccttgttattgtgatgaatggaatcatgtttctcctcgcggcccgcacatcctgctccacagggcagagggaggccaagaagacctctgtgctcaggacccttcgcagctcttttctgctccttctgctggtcagtgcctcctggctctttggccttctggcagtcaaccacagcgtactggccttccactacctccatgctggactctgtggcctccagggcctggctgtgctgctgctcttctgtgtcctgaatgcagatgctcgggccgcctggacgccagcctgtctaggcaagaaggcagctcccgaggaaacaaggccagcacctgggccggggtctggggcctataacaacacagccctctttgaggagagtggccttatccgcatcactcttggtgcctccaccgtctcttcagtgagcagtgcccgctcaggcagggcccaggaccaggacagccagcggggccgcagctacctcagggacaatgttctggttcgacacggctcgaccgctgagcacgctgagcacagcctccaggctcatgccggccccactgacctggatgtggctatgttccatcgagacgctggtgcagactctgactctgacagcgacctgtccttggaggaggagaggagcctatccatcccatcttcagagagcgaggacaatggccggactcgagggcgtttccaacgtccactccgcagggcagcccagagtgagaggctccttgcccaccccaaagatgtggacggcaatgacctactgtcctactggccagccctgggggagtgtgaggcagcaccgtgcgctctgcaggcgtggggctctgaaaggcgcctcggactagacagcaacaaagacgcagccaacaacaaccagcctgaactggccttgaccagtggagatgaaacctccctgggccgggcacagcggcagaggaaaggcatcctgaagaacaggttgcagtacccactggtacctcagactcgaggcactcctgagctgtcctggtgccgtgcagctaccttgggccaccgtgctgtgccggctgcctcctatggccgcatctatgcaggtgggggtacaggtagtctttcacagccggccagccgctactcttctcgagaacagctggacttgctcttaaggcgacagctgagtagggagcgactagaagaggtcccagttcctgcacctgttttgcaccccctgagccgaccaggctcccaggaacgcctggatactgcaccagcccgcctggaaccccgagataggggcagcacactaccacggagacagccccctcgggactaccctggaaccatggctggccgctttgggtcacgggatgcgctggacttaggggcaccccgagaatggttgagcacacttcccccaccccgacgcaaccgggaccttgacccacagcacccacctctgcccctgtctccacagaggccactctcaagggaccccctcttgccatccaggcccctggactctctatctaggatctcgaactctcgggagcggctggaccaagtgcctagtcgacacccctcccgggaggcccttgggccagccccacagcttctcagagccagggaggacccagccagcggccctagccatggtccttccacagagcaactggacattctgtcctccatccttgcctctttcaactcctcagccctctcttctgtgcagtcctcgagcacaccctcgggccctcacaccactgccacgccttccgccacagcctctgcacttggaccttccacacctcgctcagccacatctcatagcatctcggagttgtcacctgattcagaagttcccagaagcgagggtcactcctgaggggcgaccagcaaatgagaagccaccaaggggcagcggaggatttgggctgaccgaagagacttcaggactgatcccaaggcagccttcctcaagccctcccctcagttcagttcagtgaaatgtggaggtccctcctgtgcgcatctgtgagcatgcgtgtggcaggtgcaggggtgggggctgagggaggacttttatacattttgtaactttgtaaccagagagatatgcttatgttatttttcagcttttccttctcccaggggtcttgagactgggctaggggcggggaagaggatgggagagagatgcattttggcctcctttgggtccttagcaaagcatcatctcttttctttcatctctcggtagagtggaccagtccggccgatccactctttcccctcctcttcccccacactgatctgaacgtttttggggcccagagtgcaaatttggtctttgcattttctccgatgccccaagggccaaactcctatttgggggttggtcctggaaacaggggccctccctcctcctcctgggggctcatgtgctccactcctccctgtgggtgtggatatgtattacatggagtccctgccgcttactgccttaagacctaggactgctgctgcgggtgctggtggagcagcagaagtcttgtttacagatcaaggcttccctttctccctctgggagggacttgggcctctaatcagacattcctatagcgggtgggtggagggtacactcctttctttgtccctccttcactagtctgtggtgccattgattcattatactgtccccttgagggctggggggggggcagttagcaaagggagcggaaactagggaacccaagacccagaatgtaggtgccacagtctcccactgtttacaggatcctccctggcaacaggctgcagcagtggctgccccaccttcagttagtcccttataaagggaaaaatgacggttaggatcccgttcacaaaactctcctttgttatttgtctgatgtccagttctggggactttaaattttgttactttgtttacaggccaagattattttttaaaatggttgggttttatttattgtttacagcttaaaacattgacttatacactttgtttacagttcagaatgtttccccctctttgtttacaagtgaaaggtagaaaaagtgggggaggggcctaaaagacccacctgtgatgccccccacctggccatcttgaggtaggcttctaatcccaacttttcccaggtcaaaggtcagccaagtcttctaacagcttgccccaaaggtggctcaggactggggttctgtgcaaacaccacccacccctaccctgtgcatactcttgggaggcagtgtctgagattcaaatattcacttcactgtctgtgccaaatcccaccagccaggttccccagctctctttacccagactgacccccgcccttgaagggctgagaggcctgtccgtggggagagtgtccttgctaactaagtcctaggttctgtagatgcccatctctggggtccccttccaacagtggccctcttccctgtctgtgtaaattgttccgtgaagccgcgctctgttttgggaataaacttctatag

SEQ ID NO: 208 - protein, 3313 aa, Rattus norvegicus
  ref <308>: DATABASE ACCESSION NUMBER: SWISS-Prot / BAA32459
  ref <309>: DATABASE ENTRY DATE: 2002-06-15
MARRPLWWGLPGPSTPLLLLLLFSLFPSSREEMGGGGDQGWDPGVATATGPRAQIGSGAVALCPESPGVWEDGDPGLGVREPVFMKLRVGRQNARNGRGAPEQPNREPVVQALGSREQEAGQGSGYLLCWHPEISSCGRTGHLRRGSLPLDALSPGDSDLRNSSPHPSELLAQPDSPRPVAFQRNGRRSIRKRVETFRCCGKLWEPGHKGQGERSATSTVDRGPLRRDCLPGSLGSGLGEDSAPRAVRTAPAPGSAPHESRTAPERMRSRGLFRRGFLFERPGPRPPGFPTGAEAKRILSTNQARSRRAANRHPQFPQYNYQTLVPENEAAGTAVLRVVAQDPDPGEAGRLVYSLAALMNSRSLELFSIDPQSGLIRTAAALDRESMERHYLRVTAQDHGSPRLSATTMVAVTVADRNDHAPVFEQAQYRETLRENVEEGYPILQLRATDGDAPPNANLRYRFVGSPAARTAAAAAFEIDPRSGLISTSGRVDREHMESYELVVEASDQGQEPGPRSATVRVHITVLDENDNAPQFSEKRYVAQVREDVRPHTVVLRVTATDKDKDANGLVHYNIISGNSRGHFAIDSLTGEIQVMAPLDFEAEREYALRIRAQDAGRPPLSNNTGLASIQVVDINDHSPIFVSTPFQVSVLENAPLGHSVIHIQAVDADHGENSRLEYSLTGVASDTPFVINSATGWVSVSGPLDRESVEHYFFGVEARDHGSPPLSASASVTVTVLDVNDNRPEFTMKEYHLRLNEDAAVGTSVVSVTAVDRDANSAISYQITGGNTRNRFAISTQGGMGLVTLALPLDYKQERYFKLVLTASDRALHDHCYVHINITDANTHRPVFQSAHYSVSMNEDRPVGSTVVVISASDDDVGENARITYLLEDNLPQFRIDADSGAITLQAPLDYEDQVTYTLAITARDNGIPQKADTTYVEVMVNDVNDNAPQFVASHYTGLVSEDAPPFTSVLQISATDRDAHANGRVQYTFQNGEDGDGDFTIEPTSGIVRTVRRLDREAVPVYELTAYAVDRGVPPLRTPVSIQVTVQDVNDNAPVFPAEEFEVRVKENSIVGSVVAQITAVDPDDGPNAHIMYQIVEGNIPELFQMDIFSGELTALIDLDYEARQEYVIVVQATSAPLVSRATVHVRLVDQNDNSPVLNNFQILFNNYVSNRSDTFPSGIIGRIPAYDPDVSDHLFYSFERGNELQLLVVNQTSGELRLSRKLDNNRPLVASMLVTVTDGLHSVTAQCVLRVVIITEELLANSLTVRLENMWQERFLSPLLGHFLEGVAAVLATPTEDVFIFNIQNDTDVGGTVLNVSFSALAPRGAGAGAAGPWFSSEELQEQLYVRRAALAARSLLDVLPFDDNVCLREPCENYMKCVSVLRFDSSAPFLASASTLFRPIQPIAGLRCRCPPGFTGDFCETELDLCYSNPCRNGGACARREGGYTCVCRPRFTGEDCELDTEAGRCVPGVCRNGGTCTNAPNGGFRCQCPAGGAFEGPRCEVAARSFPPSSFVMFRGLRQRFHLTLSLSFATVQPSGLLFYNGRLNEKHDFLALELVAGQVRLTYSTGESSTVVSPTVPGGLSDGQWHTVHLRYYNKPRTDALGGAQGPSKDKVAVLSVDDCNVAVALRFGAEIGNYSCAAAGVQTSSKKSLDLTGPLLLGGVPNLPENFPVSRKDFIGCMRDLHIDGRRVDMAAFVANNGTTAGCQAKSHFCASGPCKNGGLCSERWGGFSCDCPVGFGGKDCRLTMAHPYHFQGNGTLSWDFGNDMPVSVPWYLGLSFRTRATKGVLMQVQLGPHSVLLCKLDQGLLSVTLSRASGHAVHLLLDQMTVSDGRWHDLRLELQEEPGGRRGHHIFMVSLDFTLFQDTMAMGSELEGLKVKHLHVGGPPPSSKEEGPQGLVGCIQGVWTGFTPFGSSALPPPSHRINVEPGCTVTNPCASGPCPPHANCKDLWQTFSCTCWPGYYGPGCVDACLLNPCQNQGSCRHLQGGPHGYTCDCASGYFGQHCEHRMDQQCPRGWWGSPTCGPCNCDVHKGFDPNCNKTSGQCHCKEFHYRPRGSDSCLPCDCYPVGSTSRSCAPHSGQCPCRPGALGRQCNSCDSPFAEVTASGCRVLYDACPKSLRSGVWWPQTKFGVLATVPCPRGALGLRGTGAAVRLCDEDHGWLEPDFFNCTSPAFRELSLLLDGLELNKTALDTVEAKKLAQRLREVTGQTDHYFSQDVRVTARLLAYLLAFESHQQGFGLTATQDAHFNENLLWAGSALLAPETGDLWAALGQRAPGGSPGSAGLVRHLEEYAATLARNMDLTYLNPVGLVTPNIMLSIDRMEQPSSSQGAHRYPRYHSNLFRGQDAWDPHTHVLLPSQSPQPSPSEVLPTSSNAENATASGVVSPPAPLEPESEPGISIVILLVYRALGGLLPAQFQAERRGARLPQNPVMNSPVVSVAVFRGRNFLRGALVSPINLEFRLLQTANRSKAICVQWDPPGPADQHGMWTARDCELVHRNGSHARCRCSRTGTFGVLMDASPRERLEGDLELLAVFTHVVVAASVTALVLTAAVLLSLRSLKSNVRGIHANVAAALGVAELLFLLGIHRTHNQLLCTVVAILLHYFFLSTFAWLLVQGLHLYRMQVEPRNVDRGAMRFYHALGWGVPAVLLGLAVGLDPEGYGNPDFCWISIHEPLIWSFAGPIVLVIVMNGIMFLLAARTSCSTGQREAKKTSVLRTLRSSFLLLLLVSASWLFGLLAVNHSVLAFHYLHAGLCGLQGLAVLLLFCVLNADARAAWTPACLGKKAAPEETRPAPGPGSGAYNNTALFEESGLIRITLGASTVSSVSSARSGRAQDQDSQRGRSYLRDNVLVRHGSTAEHAEHSLQAHAGPTDLDVAMFHRDAGADSDSDSDLSLEEERSLSIPSSESEDNGRTRGRFQRPLRRAAQSERLLAHPKDVDGNDLLSYWPALGECEAAPCALQAWGSERRLGLDSNKDAANNNQPELALTSGDETSLGRAQRQRKGILKNRLQYPLVPQTRGTPELSWCRAATLGHRAVPAASYGRIYAGGGTGSLSQPASRYSSREQLDLLLRRQLSRERLEEVPVPAPVLHPLSRPGSQERLDTAPARLEPRDRGSTLPRRQPPRDYPGTMAGRFGSRDALDLGAPREWLSTLPPPRRNRDLDPQHPPLPLSPQRPLSRDPLLPSRPLDSLSRISNSRERLDQVPSRHPSREALGPAPQLLRAREDPASGPSHGPSTEQLDILSSILASFNSSALSSVQSSSTPSGPHTTATPSATASALGPSTPRSATSHSISELSPDSEVPRSEGHS

SEQ ID NO: 209 - DNA, 5832 bp, Homo sapiens
  ref <308>: DATABASE ACCESSION NUMBER: EMBL / AB011536
  ref <309>: DATABASE ENTRY DATE: 1998-08-24
gccctgcccacctcacgcagactgccgggacctctggcagaccttttcttgcacctgccagccaggttactacggcccaggctgtgtggatgcctgcctcctgaacccctgtcagaaccagggatcatgccggcacctgccaggagccccccatggctatacctgtgactgtgtgggtggctatttcgggcaccactgtgagcacaggatggaccagcagtgcccacggggctggtgggggagcccaacctgtggcccctgcaactgtgatgttcacaaaggttttgatcccaactgcaacaagacaaatgggcagtgtcactgcaaggagttccactaccgaccgcggggcagtgactcttgcctcccatgtgactgctaccctgtgggctccacctcgcgctcatgtgcaccccacagcgggcagtgcccctgtcgcccaggagcccttggccgccagtgcaacagctgtgacagtcccttcgcagaggtgacagccagcggctgccgggtgctctatgatgcctgccctaagtccctgagatctggtgtgtggtggccccagacaaagtttggcgtcctggccacagtgccctgtccccggggggccctgggattgcggggtgcaggtgctgctgtgcggctgtgtgatgaggcccagggttggctggagcccgacctcttcaactgtacctcccctgcctttcgagagctcagtctgctgctggatggcctagagctgaacaagacggcactggataccatggaggccaagaagctggctcagcggctacgggaggtgactggccacactgaccactattttagccaagatgttcgagtcactgcccgcctgctggcccacctgctggccttcgagagccatcagcagggcttcgggctgacagccacacaggatgcccacttcaatgagaatctgctgtgggccggctctgcactgcttgccccagagacaggggacttgtgggcggcgctggggcagcgggcccctgggggctccccaggcagcgcgggactggtgaggcacctggaggagtatgcagccacactcgcaaggaatatggaactcacatacctgaatcccatggggctggtgacgcctaatatcatgctcagcattgaccgcatggagcaccccagttctccccggggggcccgtcgctaccctcgctaccatagcaacctctttcgaggccaggatgcctgggatcctcacacccatgtgctgctgccttcccagtccccacggccatccccatctgaagttctgcccacaagcagcagcatagaaaactccaccacctcaagtgtggtccccccaccagccccgccagagccagagcctgggatctccattatcattctcctcgtttaccgcaccttagggggactgctccctgcccagttccaggcagaacgccgaggtgccaggcttcctcagaaccccgtcatgaactccccggtggtcagcgtggctgtgttccacggacgcaacttcctaaggggaatcctggagtcccccatcagcctagagtttcgcctgctacagacagcgaatcggagcaaggcgatctgtgtgcagtgggacccacctggcctggcggagcagcatggtgtgtggacagcacgggactgcgagctggtgcacaggaatgggtcccacgcacggtgtcgctgcagccggacagggacctttggggtcctcatggatgcctctccccgtgagaggctggagggcgacctggagctgctggctgtgttcacccacgtggtcgtggctgtgtctgtggctgcgctggtgctgactgcagccatcctgctgagcctgcgcagcctcaagtccaatgtgcgtgggatccatgccaatgtggcagccgccctgggggtggcagagctcctcttcctgctggggattcacaggacccacaatcagctggtgtgcactgcagtcgccatcctcctgcactacttcttcctcagcaccttcgcgtggctcttcgtgcaggggctgcacctctaccgcatgcaggttgagccacgcaacgtggaccgcggcgccatgcgcttctaccatgccctgggctggggcgtccctgctgtgctgctgggccttgctgtgggcctggaccctgagggctatgggaaccctgacttctgctggatctcagtccacgagcccctcatctggagctttgctggccctgttgtcctggtcatagtgatgaacgggaccatgtttctcctcgctgcccgcacatcctgctccacagggcagagggaggccaagaagacctctgcactgacccttcgcagctccttcctgctgcttctgctggtcagtgcctcctggctctttgggctcctggcagtcaaccacagcatcctagccttccactacctccatgctggactctgcggcctccagggcctggcggtgctgctgctcttctgtgtcctaaatgcagatgctcgggctgcctggatgccagcctgtctgggcaggaaggcagcgcctgaggaggcaaggccagcacctgggctgggacctggggcctacaacaacacggctctctttgaggagagtggcctcatccgcatcactctgggcgcctccaccgtctcctctgtgagcagtgcccgctccggccggacccaggaccaggacagccagcggggccgcagctacctcagggacaatgtcctggttcgacatggctcagccgctgaccacactgaccacagcctccaggctcatgctggccccactgacctggacgtggccatgttccatcgagatgctggcgcagactccgactctgacagtgacctgtccttggaggaggagaggagtctctccattccatcttcagaaagcgaggacaatggccggacgcgggggcgcttccaacggccactctgccgagcagcccagagtgagaggctcctcacccaccccaaagatgtggatggcaatgacctcctgtcctactggccagccctgggggagtgcgaggcagccccctgtgctctgcagacttggggctctgaaaggcgcctggggctggacaccagcaaggatgcagctaacaacaaccagccagacccggccctgaccagtggggatgagacttctctgggccgggcccagcgccagaggaaaggcatcctgaagaaccggttgcaatacccactggtgccacagacccgaggtgcccctgagctgtcctggtgccgtgcagccaccttgggccaccgtgctgtgccagctgcctcttacggtcgcatctatgctggcgggggcacgggcagcctttcacagccagccagccgctactcttctagagaacagctggacctgctcctccggcggcaactgagccgtgagcgactagaggaagcccctgcccctgttctacgtcccctgagccggccagggtcccaggaatgcatggatgctgcaccaggccgactggagcccaaagatcggggcagcaccctgccacggaggcagccacctcgggactaccctggcgccatggctggccgcttcgggtcacgggatgcgctcgacttaggggcacctcgagagtggttgagcacgctgcctccgccccgccgcacccgggaccttgacccacagcccccacctctgcccctgtctccccagcggcaactctcaagggaccccctcttgccatcccggccgctggactctctgtctaggagctcgaactctcgggagcagctggaccaggtgcctagccggcacccctcacgagaagcccttgggccactcccgcagctgctcagagctagggaggactcggtcagtggccccagccatggcccctccacagaacagttggacattctttcctccatccttgcctctttcaactcctcggccctctcctctgtgcaatcttcaagcacacccttgggccctcacaccactgccacaccttctgccacagcctctgtgcttgggccctccacgccacgttctgccacgtctcacagcatctcggagctgtcgccagactcagaagttcccagaagtgagggtcactcctgaggggatgacggcgtggacgaggaacagctgagggcgacagaggatctaggctaacaggagagactccaggagtgggggcagatcccaaggcagcctcctgctccccagtggtgggtgccccagctctacctggtgtggcagggctgaggctccatgtgcatctgtgagcatgcgtgtgacaggtgcagagacgggggactggagggagacttttatacgttttgtacctttgtaaccagagagatgcttatgttatttttcagcttttctgtctcctggggggtttgaggctgggctgggagggggagggagatagagggagagatgcagtttgaccccatttgggtcctgagcaaaccctatgctcatctctctctccttcctggggtggactcagatgggtgggacacatgccttcctccccctattccacccccaagttgatctgagtatcgtcaggggcccaaagtacagaattgttctttgctttttattgaatgctccaaaggccaaacttctggggctgggggttggtcttggaaacaggggtcctctgacttcctcatgggggcttgctcataccgcccctcctggtggatgtgtgtgtttattatgtggagtccctgccacttactgccttatgacctaggactgatgctgtggggtgctggtggagcagctgatgtcgtgtttacagagcaaggcttccctgtctcccacggggaggggctcgggcctctagtcagacattcctgcagagggtcggtggaggggtcattcacctgcccctgcagcaagcaaaagttgtctgtggtgccatttgattccctgacactgccccctgcttgaattgattccgaagggtagggtgggaaggtgagcaaagggagcagaaacaagggaattcaagacccagaatgtaggtgccactgcctcctatgtttacaggatcctccgtggccctaggcacctgggctgcaggaagtgactccgttccactcctcctttattcccttaaaaagggaaaaatgactgttacgaccctgttcacaaaactcttacttttgctattttgtctgctgtccagaactgaagactttaaaattttgttactgtttacaagtccagattcaaaaaatgtttttactttgtttacaactcaaaactttgagttttacactttgtttacagtagataattttttttcctttgtttccaagtgaaaggtagggaaagtgggagagggacttggaggacccacctgtgaggaccctgacctggccatcttgaggggttttctaacccccaggtctcccaggccgaaggtcagccttgagtcccgtttaacagcagatccagaagaccttgagagtaggcgtcctctaaccacgggggagagtggctgtgcagggctggggggtggtctgtgcagacacctcctcacccaccaccccatgcatactcttgggaagcagcttcctgggagattagaaattctacttccctgactggagctaaatcccaccagccaggacccaaactctccttaccgagaaggaccccagctcttgaagggctgagtggcctgctgggggtgggagggtgtctttactatgtcctaggtttcgtagatgcccctctctggggttcccctcctccagcccagcggccctctttcctgtctgtgtaaattgttccgtgaagccgcgctctgttttgggaataaacttctatag

SEQ ID NO: 210 - protein, 2923 aa, Homo sapiens
MRSPATGVPLPTPPPPLLLLLLLLLPPPLLGDQVGPCRSLGSRGRGSSGACAPMGWLCPSSASNLWLYTSRCRDAGTELTGHLVPHHDGLRVWCPESEAHIPLPPAPEGCPWSCRLLGIGGHLSPQGKLTLPEEHPCLKAPRLRCQSCKLAQAPGLRAGERSPEESLGGRRKRNVNTAPQFQPPSYQATVPENQPAGTPVASLRAIDPDEGEAGRLEYTMDALFDSRSNQFFSLDPVTGAVTTAEELDRETKSTHVFRVTAQDHGMPRRSALATLTILVTDTNDHDPVFEQQEYKESLRENLEVGYEVLTVRATDGDAPPNANILYRLLEGSGGSPSEVFEIDPRSGVIRTRGPVDREEVESYQLTVEASDQGRDPGPRSTTAAVFLSVEDDNDNAPQFSEKRYVVQVREDVTPGAPVLRVTASDRDKGSNAVVHYSIMSGNARGQFYLDAQTGALDVVSPLDYETTKEYTLRVRAQDGGRPPLSNVSGLVTVQVLDINDNAPIFVSTPFQATVLESVPLGYLVLHVQAIDADAGDNARLEYRLAGVGHDFPFTINNGTGWISVAAELDREEVDFYSFGVEARDHGTPALTASASVSVTVLDVNDNNPTFTQPEYTVRLNEDAAVGTSVVTVSAVDRDAHSVITYQITSGNTRNRFSITSQSGGGLVSLALPLDYKLERQYVLAVTASDGTRQDTAQIVVNVTDANTHRPVFQSSHYTVNVNEDRPAGTTVVLISATDEDTGENARITYFMEDSIPQFRIDADTGAVTTQAELDYEDQVSYTLAITARDNGIPQKSDTTYLEILVNDVNDNAPQFLRDSYQGSVYEDVPPFTSVLQISATDRDSGLNGRVFYTFQGGDDGDGDFIVESTSGIVRTLRRLDRENVAQYVLRAYAVDKGMPPARTPMEVTVTVLDVNDNPPVFEQDEFDVFVEENSPIGLAVARVTATDPDEGTNAQIMYQIVEGNIPEVFQLDIFSGELTALVDLDYEDRPEYVLVIQATSAPLVSRATVHVRLLDRNDNPPVLGNFEILFNNYVTNRSSSFPGGAIGRVPAHDPDISDSLTYSFERGNELSLVLLNASTGELKLSRALDNNRPLEAIMSVLVSDGVHSVTAQCALRVTIITDEMLTHSITLRLEDMSPERFLSPLLGLFIQAVAATLATPPDHVVVFNVQRDTDAPGGHILNVSLSVGQPPGPGGGPPFLPSEDLQERLYLNRSLLTAISAQRVLPFDDNICLREPCENYMRCVSVLRFDSSAPFIASSSVLFRPIHPVGGLRCRCPPGFTGDYCETEVDLCYSRPCGPHGRCRSREGGYTCLCRDGYTGEHCEVSARSGRCTPGVCKNGGTCVNLLVGGFKCDCPSGDFEKPYCQVTTRSFPAHSFITFRGLRQRFHFTLALSFATKERDGLLLYNGRFNEKHDFVALEVIQEQVQLTFSAGESTTTVSPFVPGGVSDGQWHTVQLKYYNKPLLGQTGLPQGPSEQKVAVVTVDGCDTGVALRFGSVLGNYSCAAQGTQGGSKKSLDLTGPLLLGGVPDLPESFPVRMRQFVGCMRNLQVDSRHIDMADFIANNGTVPGCPAKKNVCDSNTCHNGGTCVNQWDAFSCECPLGFGGKSCAQEMANPQHFLGSSLVAWHGLSLPISQPWYLSLMFRTRQADGVLLQAITRGRSTITLQLREGHVMLSVEGTGLQASSLRLEPGRANDGDWHHAQLALGASGGPGHAILSFDYGQQRAEGNLGPRLHGLHLSNITVGGIPGPAGGVARGFRGCLQGVRVSDTPEGVNSLDPSHGESINVEQGCSLPDPCDSNPCPANSYCSNDWDSYSCSCDPGYYGDNCTNVCDLNPCEHQSVCTRKPSAPHGYTCECPPNYLGPYCETRIDQPCPRGWWGHPTCGPCNCDVSKGFDPDCNKTSGECHCKENHYRPPGSPTCLLCDCYPTGSLSRVCDPEDGQCPCKPGVIGRQCDRCDNPFAEVTTNGCEVNYDSCPRAIEAGIWWPRTRFGLPAAAPCPKGSFGTAVRHCDEHRGWLPPNLFNCTSITFSELKGFAERLQRNESGLDSGRSQQLALLLRNATQHTAGYFGSDVKVAYQLATRLLAHESTQRGFGLSATQDVHFTENLLRVGSALLDTANKRHWELIQQTEGGTAWLLQHYEAYASALAQNMRHTYLSPFTIVTPNIVISVVRLDKGNFAGAKLPRYEALRGEQPPDLETTVILPESVFRETPPVVRPAGPGEAQEPEELARRQRRHPELSQGEAVASVIIYRTLAGLLPHNYDPDKRSLRVPKRPIINTPVVSISVHDDEELLPRALDKPVTVQFRLLETEERTKPICVFWNHSILVSGTGGWSARGCEVVFRNESHVSCQCNHMTSFAVLMDVSRRENGEILPLKTLTYVALGVTLAALLLTFFFLTLLRILRSNQHGIRRNLTAALGLAQLVFLLGINQADLPFACTVIAILLHFLYLCTFSWALLEALHLYRALTEVRDVNTGPMRFYYMLGWGVPAFITGLAVGLDPEGYGNPDFCWLSIYDTLIWSFAGPVAFAVSMSVFLYILAARASCAAQRQGFEKKGPVSGLQPSFAVLLLLSATWLLALLSVNSDTLLFHYLFATCNCIQGPFIFLSYVVLSKEVRKALKLACSRKPSPDPALTTKSTLTSSYNCPSPYADGRLYQPYGDSAGSLHSTSRSGKSQPSYIPFLLREESALNPGQGPPGLGDPGSLFLEGQDQQHDPDTDSDSDLSLEDDQSGSYASTHSSDSEEEEEEEEEEAAFPGEQGWDSLLGPGAERLPLHSTPKDGGPGPGKAPWPGDFGTTAKESSGNGAPEERLRENGDALSREGSLGPLPGSSAQPHKGILKKKCLPTISEKSSLLRLPLEQCTGSSRGSSASEGSRGGPPPRPPPRQSLQEQLNGVMPIAMSIKAGTVDEDSSGSEFLFFNFLH

SEQ ID NO: 211 - DNA, 11868 bp, Rattus norvegicus; identical to SEQ ID NO: 207
  ref <308>: DATABASE ACCESSION NUMBER: EMBL / AB011528
  ref <309>: DATABASE ENTRY DATE: 1998-08-24

SEQ ID NO: 212 - protein, 3313 aa, Rattus norvegicus; identical to SEQ ID NO: 208
  ref <308>: DATABASE ACCESSION NUMBER: SWISS-Prot / BAA32459
  ref <309>: DATABASE ENTRY DATE: 2002-06-15

SEQ ID NO: 213 - DNA, 5832 bp, Homo sapiens; identical to SEQ ID NO: 209
  ref <308>: DATABASE ACCESSION NUMBER: EMBL / AB011536
  ref <309>: DATABASE ENTRY DATE: 1998-08-24

SEQ ID NO: 214 - protein, 2923 aa, Homo sapiens; identical to SEQ ID NO: 210

SEQ ID NO: 215 - DNA, 2346 bp, Rattus norvegicus
  ref <308>: DATABASE ACCESSION NUMBER: EMBL / AB011679
  ref <309>: DATABASE ENTRY DATE: 1999-11-11
ctcgcatctctctgcagcagcctccggggctacgttccatcctatcagtctgagaccagcccagaagaaaaaaaccaaaaatccttaattatcttcttttgctcggtacctacattgggaccatcaaaaaaaaattattacagtaaaccgtagccatgagggaaatcgtgcacatccaggccggacagtgtggcaaccagatcggtgctaagttctgggaggtgataagcgatgaacacggcatcgaccccaccggcacctaccacggagacagcgacttgcagctggaccgaatctctgtgtactacaatgaagctacaggtggcaagtatgtccctcgagctatcttagtggatctagaacccgggactatggactccgttcgctcaggtccttttggccagatcttcagaccggacaactttgtttttggtcagtctggggcaggcaacaactgggctaagggtcactacacagagggagctgagctggttgactctgtcttggatgtggtgcggaaggaggcggagagctgtgactgcctgcaaggctttcagctgacccactcgctgggtggaggcacgggctctggcatgggcaccctgctcatcagcaagattcgagaagaataccccgaccgcatcatgaacaccttcagcgtggtgccctcacccaaagtgtctgacaccgtggttgagccctacaacgccaccctgtccgtccaccagttggtagagaacacagatgagacctactgcattgacaacgaggctctctacgacatctgcttccgtacccttaagctcaccacgccaacctacggagacctgaaccatctcgtctctgccaccatgagcggtgtcaccacctgcctccgtttcccgggccagctgaacgccgaccttcggaagctggctgtcaacatggtgcccttcccgcgtctccacttcttcatgcctggctttgcccctctcaccagccgtggaagccagcagtaccgggccctcactgtgcctgaactcacccagcaggtcttcgacgccaagaacatgatggccgcctgtgacccacgccacggccggtacctcacggttgcggctgtcttccgtggacggatgtccatgaaggaggtagatgagcaaatgctcaacgtgcagaataagaatagcagctacttcgtggaatggatccccaacaacgtcaagacggctgtctgtgacatcccaccgcgaggcctcaagatggcagtcaccttcatcggaaacagcacggccatccaggagctcttcaagcgcatctctgagcagtttacggcaatgttccgtcggaaggctttcctccactggtacacgggtgagggcatggacgagatggagttcaccgaagctgagagcaacatgaatgacctcgtctctgagtatcagcagtaccaggacgccaccgcagaagaggaagaggatttcggagaggaggcagaagaagaggcctaaggcggaagccctgcgtcacctcaggctgcttagttcccttagcttttttccaactgccctttgtttctttctgctgcctctgtcctgtttttgttccgttttgttttctcattggggggtaaacggtgcctggcacgtggcaggcgctcaataaatatttctttgtggaatgtctcctttctctttccgatctgacattctgagcgttaaccctgtgcttcctcctggtacccatttctttattatgactgtccagttaatattcttccaatatattctccaggaaccagcgttcggctccagacccggggtagaacccagcccagttctaagaactcaagagagtagccaccatcttaaagcaaagtagcgggtggggaaaaggtgggtagaggagatgctacttagggggtgggattttccagtcagggccatttagacacgggaatcgctggggctttcagtcgatggggctttcttttttccctgcttcatctctcggcctcaggagaggtattaacagtattatcaccatttatatcctagctgtcctgagccaaatctgccattggaggtgtcttcccctgtgttggttctccaagggacgttgtatggggatttgtgggggcagggcagcaaggccttgttctctaaatgtccagaaacactctaattaccatttccacctgggtgcctcacacactccccagaggggaggtaacatctctgccccatttccatcctgttccttggcttggtcattccctacctttctattttctgttaaacttggctttttttttttcatattgaaaagatgacattgccccgagagccaaaaataaatgggaattgg

SEQ ID NO: 216 - protein, 444 aa, Rattus norvegicus
  ref <308>: DATABASE ACCESSION NUMBER: SWISS-Prot / P05218
  ref <309>: DATABASE ENTRY DATE: 2002-06-15
MREIVHIQAGQCGNQIGAKFWEVISDEHGIDPTGTYHGDSDLQLDRISVYYNEATGGKYVPRAILVDLEPGTMDSVRSGPFGQIFRPDNFVFGQSGAGNNWAKGHYTEGAELVDSVLDVVRKEAESCDCLQGFQLTHSLGGGTGSGMGTLLISKIREEYPDRIMNTFSVVPSPKVSDTVVEPYNATLSVHQLVENTDETYCIDNEALYDICFRTLKLTTPTYGDLNHLVSATMSGVTTCLRFPGQLNADLRKLAVNMVPFPRLHFFMPGFAPLTSRGSQQYRALTVPELTQQVFDAKNMMAACDPRHGRYLTVAAVFRGRMSMKEVDEQMLNVQNKNSSYFVEWIPNNVKTAVCDIPPRGLKMAVTFIGNSTAIQELFKRISEQFTAMFRRKAFLHWYTGEGMDEMEFTEAESNMNDLVSEYQQYQDATAEEEEDFGEEAEEEA

SEQ ID NO: 217 - DNA, 1667 bp, Homo sapiens
  ref <308>: DATABASE ACCESSION NUMBER: EMBL / AF070561
  ref <309>: DATABASE ENTRY DATE: 1999-06-30
gcacctcgctgctccagcctctggggcgcattccaaccttccagcctgcgacctgcggagaaaaaaaattacttattttcttgccccatacataccttgaggcgagcaaaaaaattaaattttaaccatgagggaaatcgtgcacatccaggctggtcagtgtggcaaccagatcggtgccaagttctgggaggtgatcagtgatgaacatggcatcgaccccaccggcacctaccacggggacagcgacctgcagctggaccgcatctctgtgtactacaatgaagccacaggtggcaaatatgttcctcgtgccatcctggtggatctagaacctgggaccatggactctgttcgctcaggtccttttggccagatctttagaccagacaactttgtatttggtcagtctggggcaggtaacaactgggccaaaggccactacacagagggcgccgagctggttgattctgtcctggatgtggtacggaaggaggcagagagctgtgactgcctgcagggcttccagctgacccactcactgggcgggggcacaggctctggaatgggcactctccttatcagcaagatccgagaagaataccctgatcgcatcatgaataccttcagtgtggtgccttcacccaaagtgtctgacaccgtggtcgagccctacaatgccaccctctccgtccatcagttggtagagaatactgatgagacctattgcattgacaacgaggccctctatgatatctgcttccgcactctgaagctgaccacaccaacctacggggatctgaaccaccttgtctcagccaccatgagtggtgtcaccacctgcctccgtttccctggccagctcaatgctgacctccgcaagttggcagtcaacatggtccccttcccacgtctccatttctttatgcctggctttgcccctctcaccagccgtggaagccagcagtatcgagctctcacagtgccggaactcacccagcaggtcttcgatgccaagaacatgatggctgcctgtgacccccgccacggccgatacctcaccgtggctgctgtcttccgtggtcggatgtccatgaaggaggtcgatgagcagatgcttaacgtgcagaacaagaacagcagctactttgtggaatggatccccaacaatgtcaagacagccgtctgtgacatcccacctcgtggcctcaagatggcagtcaccttcattggcaatagcacagccatccaggagctcttcaagcgcatctcggagcagttcactgccatgttccgccggaaggccttcctccactggtacacaggcgagggcatggacgagatggagttcaccgaggctgagagcaacatgaacgacctcgtctctgagtatcagcagtaccaggatgccaccgcagaagaggaggaggatttcggtgaggaggccgaagaggaggcctaaggcagagcccccatcacctcaggcttctcagttcccttagccgtcttactcaactgcccctttcctctccctcagaatttgtgtttgctgcctctatcttgttttttgttttttcttctggggggggtctagaacagtgcctggcacatagtaggcgctcaataaatacttgtttgttgaaaaaaaaaaaaaaaaaaaaaaaaaa

SEQ ID NO: 218 - protein, 107 aa, Homo sapiens
  ref <308>: DATABASE ACCESSION NUMBER: SWISS-Prot / P20071
  ref <309>: DATABASE ENTRY DATE: 2002-06-15
GVQVETISPGDGRTFPKRGQTCVVHYTGMLEDGKKFDSSRDRNKPFKFMLGKQEVIRGWEEGVAQMSVGQRAKLTISPDYAYGATGHPGIIPPHATLVFDVELLKLE

SEQ ID NO: 219 - DNA, 616 bp, Rattus norvegicus
  ref <308>: DATABASE ACCESSION NUMBER: EMBL / AB012234
  ref <309>: DATABASE ENTRY DATE: 1999-09-17
ggtccatcacctcccctccttccaccagcaccaccaagcgccccaagtccatcgacgacagtgagatggagagtccagtcgatgatgtattctatcctgggacaggccgctccccagcagctggcagcagccagtctagcggatggcccaacgacgtggatgcaggccctgcttctctaaagaagtcaggaaagctggacttctgcagcgccctctcctctcagggcagctccccacgcatggctttcacccaccacccgctgcctgtgcttgctggagtcagaccagggagcccccgggccacagcatcagcactgcacttcccttccacctccatcattcagcagtcgagcccgtacttcacacacccaaccatccgctaccaccaccaccatgggcaggactcgctgaaggagttcgtacagtttgtgtgctctgacggctcgggtcaggccaccgggcagcattcacaacgacaggcgcctcctctgccaaccggtttgtcagcatcggatcccgggacagcaactttctgaacatcccacagcagtctcagtcctggttcctctgattaagatcaacaaagaaacaacaaaattttaaaaaaaaaaaaaaa

SEQ ID NO: 220 - protein, 441 aa, Rattus norvegicus
  ref <308>: DATABASE ACCESSION NUMBER: SWISS-Prot / P70257
  ref <309>: DATABASE ENTRY DATE: 2001-10-16
MYSPYCLTQDEFHPFIEALLPHVRAFSYTWFNLQARKRKYFKKHEKRMSKDEERAVKDELLGEKPEIKQKWASRLLAKLRKDIRPEFREDFVLTITGKKPPCCVLSNPDQKGKIRRIDCLRQADKVWRLDLVMVILFKGIPLESTDGERLYKSPQCSNPGLCVQPHHIGVTIKELDLYLAYFVHTPESGQSDSSNQQGDADIKPLPNGHLSFQDCFVTSGVWNVTELVRVSQTPVATASGPNFSLADLESPSYYNINQVTLGRRSITSPPSTSSTKRPKSIDDSEMESPVDDVFYPGTGRSPAAGSSQSSGWPNDVDAGPASLKKSGKLDFCSALSSQGSSPRMAFTHHPLPLLAGVRPGSPRATASALHFPSTSIIQQSSPYFTHPTIRYHHHHGQDSLKEFVQFVCSDGSGQATGQHSQRQAPPLPTGLSASDPGTATF

SEQ ID NO: 221 - DNA, 1486 bp, Homo sapiens
  ref <308>: DATABASE ACCESSION NUMBER: EMBL / U18759
  ref <309>: DATABASE ENTRY DATE: 1997-04-22
ctcaaaatcgggcgttgggctttgccgggtgcttcagatcaatggatgagttccacccgttcatcgaggcactgctgcctcacgtccgcgctttctcctacacctggttcaacctgcaggcgcggaagcgcaagtacttcaagaagcatgaaaagcggatgtcgaaggacgaggagcgggcggtgaaggacgagctgctgggcgagaagcccgagatcaagcagaagtgggcatcccggctgctggccaagctgcgcaaggacatccggcccgagttccgcgaggacttcgtgctgaccatcacgggcaagaagcccccctgctgcgtgctctccaaccccgaccagaagggcaagatccggcggattgactgcctgcgccaggctgacaaggtgtggcggctggacctggtcatggtgattttgtttaaggggatccccctggaaagtactgatggggagcggctctacaagtcgcctcagtgctcgaaccccggcctgtgcgtccagccacatcacattggagtcacaatcaaagaactggatctttatctggcttactttgtccacactccggaatccggacaatcagatagttcaaaccagcaaggagatgcggacatcaaaccactgcccaacgggcacttaagtttccaggactgttttgtgacttccggggtctggaatgtgacggagctggtgagagtatcacagactcctgttgcaacagcatcagggcccaacttctccctggcggacctggagagtcccagctactacaacatcaaccaggtgaccctggggcggcggtccatcacctcccctccttccaccagcaccaccaagcgccccaagtccatcgatgacagtgagatggagagccctgttgatgacgtgttctatcccgggacaggccgttccccagcagctggcagcagccagtccagcgggtggcccaacgatgtggatgcaggcccggcttctctaaagaagtcaggaaagctggacttctgcagtgccctctcctctcagggcagctccccgcgcatggctttcacccaccacccgctgcctgtgcttgctggagtcagaccagggagcccccgggccacagcatcagccctgcacttcccctccacgtccatcatccagcagtcgagcccgtatttcacgcacccgaccatccgctaccaccaccaccacgggcaggactcactgaaggagtttgtgcagtttgtgtgctcggatggctcgggccaggccaccggacagcattcgcaacgacaggcgcctcctctgccaaccggtttgtcagcatcggaccccgggacggcaactttctgaacatcccacagcagtctcagtcctggttcctctgataagatcgacaaaagaaacaacaaaatgagaagaagaggttcctcgaaaggggggagaagaattttgagaatggaaaaatcccccagcccagcccagccccaccgaaa

SEQ ID NO: 222 - protein, 502 aa, Homo sapiens
  ref <308>: DATABASE ACCESSION NUMBER: SWISS-Prot / Q14938
  ref <309>: DATABASE ENTRY DATE: 2001-10-16
MYSPYCLTQDEFHPFIEALLPHVRAFSYTWFNLQARKRKYFKKHEKRMSKDEERAVKDELLGEKPEIKQKWASRLLAKLRKDIRPEFREDFVLTITGKKPPCCVLSNPDQKGKIRRIDCLRQADKVWRLDLVMVILFKGIPLESTDGERLYKSPQCSNPGLCVQPHHIGVTIKELDLYLAYFVHTPESGQSDSSNQQGDADIKPLPNGHLSFQDCFVTSGVWNVTELVRVSQTPVATASGPNFSLADLESPSYYNINQVTLGRRSITSPPSTSTTKRPKSIDDSEMESPVDDVFYPGTGRSPAAGSSQSSGWPNDVDAGPASLKKSGKLDFCSALSSQGSSPRMAFTHHPLPVLAGVRPGSPRATASALHFPSTSIIQQSSPYFTHPTIRYHHHHGQDSLKEFVQFVCSDGSGQATGQPNGSGQGKVPGSFLLPPPPPVARPVPLPMPDSKSTSTAPDGAALTPPSPSFATTGASSANRFVSIGPRDGNFLNIPQQSQSWFL

SEQ ID NO: 223 - DNA, 616 bp, Rattus norvegicus; identical to SEQ ID NO: 219
  ref <308>: DATABASE ACCESSION NUMBER: EMBL / AB012234
  ref <309>: DATABASE ENTRY DATE: 1999-09-17

SEQ ID NO: 224 - protein, 441 aa, Rattus norvegicus; identical to SEQ ID NO: 220
  ref <308>: DATABASE ACCESSION NUMBER: SWISS-Prot / P70257
  ref <309>: DATABASE ENTRY DATE: 2001-10-16

SEQ ID NO: 225 - DNA, 1486 bp, Homo sapiens; identical to SEQ ID NO: 221
  ref <308>: DATABASE ACCESSION NUMBER: EMBL / U18759
  ref <309>: DATABASE ENTRY DATE: 1997-04-22

SEQ ID NO: 226 - protein, 502 aa, Homo sapiens; identical to SEQ ID NO: 222
  ref <308>: DATABASE ACCESSION NUMBER: SWISS-Prot / Q14938
  ref <309>: DATABASE ENTRY DATE: 2001-10-16

SEQ ID NO: 227 - DNA, 1408 bp, Rattus norvegicus
  ref <308>: DATABASE ACCESSION NUMBER: EMBL / AB013112
  ref <309>: DATABASE ENTRY DATE: 1998-10-09
gtatctctctagtcacctccagagatccgtgtggggctaatcaggtttttgtttgtttgtttgtttttggtttggtttggttttaatgtggtagtgaaggcagggaaccgagcaagcagaccttggtggaaagtgtacctctggcagaaaccccaagatgccttctgagaaggacggtgccaagaagagcctcatgcagaggctggccctgaagagccggatagcgaaggagacactctccgagttcctgggcacctttataatgattgtccttggatgtagctctattgcccaagcggtcctcagtcgagaacgttttggcgggatcatcactatcaatattggatttgcatcggcagtcgtgatggctctctatgtgacatttggtatctctgggggccacatcaacccagctgtgtcttttgcaatgtgcgtctttggaaggatggagtggttcaagttcccattttatgtgggagcccagtttttgggagcctttgttggggctgcaacggtctttggcatttattatgatggactcatggcctttgctggcggaaaactgctcgtcgtaggagaaaatgcaacggcattcatttttgcaacatatccagctccattcatatccacgccaggtgcctttgtagaccaagtggtgtctaccatgttcctccttctgatcgtctttgccatgtttgactccagaaacctgggtgtccccagaggcctggagcctgttgtcattagcctcctgatcattgtcctttcctgttctcccggactcaactctggctgtgccatgaacccagctcgagacctcagtcccaggctcttcactgcactggcaggatgggggtttgaggtcttcacagttggaaataacttctggtggatacctgtcgtgggtcctatgattggtgctttcctgggaggtcttatctacattctttttatccaaatgcatcactcgaagctcgacccagacatgaaggcagagccatctgagaacaacctagagaaacacgagctcagtgtcatcatgtagtgggatggccagatctgcagttaccgttcatccagttctttcttcagagaagatgtcacctgtgtgcctatgcagacttggggcgggggaatctacctgtctgctagttttctctagccaactgggacaaaaaaattacaaaggcatccgtggaaaactccaccagtcacccctccccagaatagcactgactgtttatgatgggtatttgatggaagtccttactcctaggtgattgctaagaattttgaaacttgaccatgtgcttggctggatagcctcagagacctttttttaccctgtatgaaattgtgtcatcaaaggctctgtcttcacaatctataaatacaacattctaaaact

SEQ ID NO: 228 - protein, 295 aa, Rattus norvegicus
  ref <308>: DATABASE ACCESSION NUMBER: SWISS-Prot / BAA33680
  ref <309>: DATABASE ENTRY DATE: 1999-07-15
MPSEKDGAKKSLMQRLALKSRIAKETLSEFLGTFIMIVLGCSSIAQAVLSRERFGGIITINIGFASAVVMALYVTFGISGGHINPAVSFAMCAFGRMEWFKFPFYVGAQFLGAFVGAATVFGIYYDGLMAFAGGKLLVVGENATAFIFATYPAPFISTPGAFVDQVVSTMFLLLIVFAMFDSRNLGVPRGLEPVVIGLLIIVLSCSLGLNSGCAMNPARDLSPRLFTALAGWGFEVFTVGNNFWWIPVVGPMIGAFLGGLIYILFIQMHHSKLDPDMKAEPSENNLEKHELSVIM

SEQ ID NO: 229 - DNA, 2948 bp, Homo sapiens
  ref <308>: DATABASE ACCESSION NUMBER: Refseq / NM_020980
  ref <309>: DATABASE ENTRY DATE: 2002-11-05
aggtaatgattaatctgtcaggcacaaaagggattgttttggggatttcgggttctaagtcgcagattcaaacaaatagcagcgaacagggaatgacagttccaccagaagacgattaagccacagcctctaattggaacggcatttgtacagtcagagactcttaccagacatctccaggaatctgtgagccattgtcaaaacgtccattttcatctggctgtgaaagtgaggaccacaacaggtaggtattggtagaaacaggagtcctcagagaagccccaagatgcagcctgagggagcagaaaagggaaaaagcttcaagcagagactggtcttgaagagcagcttagcgaaagaaaccctctctgagttcttgggcacgttcatcttgattgtccttggatgtggctgtgttgcccaagctattctcagtcgaggacgttttggaggggtcatcactatcaatgttggattttcaatggcagttgcaatggccatttatgtggctggcggtgtctctggtggtcacatcaacccagctgtgtctttagcaatgtgtctctttggacggatgaaatggttcaaattgccattttatgtgggagcccagttcttgggagcctttgtgggggctgcaaccgtctttggcatttactatgatggacttatgtcctttgctggtggaaaactgctgatcgtgggagaaaatgcaacagcacacatttttgcaacatacccagctccgtatctatctctggcgaacgcatttgcagatcaagtggtggccaccatgatactcctcataatcgtctttgccatttttgactccagaaacttgggagcccccagaggcctagagcccattgccatcggcctcctgattattgtcattgcttcctccctgggactgaacagtggctgtgccatgaacccagctcgagacctgagtcccagacttttcactgccttggcaggctgggggtttgaagtcttcagagctggaaacaacttctggtggattcctgtagtgggccctttggttggtgctgtcattggaggcctcatctatgttcttgtcattgaaatccaccatccagagcctgactcagtctttaaggcagaacaatctgaggacaaaccagagaaatatgaactcagtgtcatcatgtagtggcatgctcagctctggatttgcagtcagtttgggattctcttcagaaagatggcatctaagtgtctgtgttcttgtaagcctgaggtggaatccacccagttttgtctgctagccatatgggacatctaattggaaaagcatctgcataaaagtttggaaacaatgaccacttctctaccattgtcccccaccccaccccccagaataacgctgactgtcccctgaaacagccttctctcctgccctgtttatttcatcctcgatgggaattcttgctaggtaagcactaataactcggcatcttgacgatagtcccatttgggtggtttcagctgcactatctgtatgaaatggtgtcaccaaaacccttttcttcagtatcgacaaagattacattctgagtaccaaccaaaccctaaattgaaagacaaaactatggtttcagtcaacatattcatgaattagggagctaatgggttaagcttccagttcccgctatgctactggatttgtataaatactgatattctccaaacctagtggtgtagggagcaagagaatgcagctggaaggcacaaggggaggacattgtggcattcagaaactgcaggagacaagatgaatttgagaagccaaatggaatttttaatggaaaccatttatcagattaatctcttgctctcctgcattttagaggacaccaattaatttcctggtctttagtatataataacctaaaataccattgtaacctcagtcatgaaaaatacatcactctgtctttttagctcaaatgtattttcctaattgcccacttgagaacagacatttgacaagttatatcaacgactgtgcttgtccattattttacacatgccctagaagccaaaactgaaagccactggatcctggtctagctgaatcttcagagtgggaggtctccaaaaagatattaccttattgggcttaacaattcacaaggcactttcacacccattatctaatttaatcctcataatgactatgtgaggcaaatgccacattgcccatttttcagataaagaaacaaaatcttagggaagataagttgagttgtccaagagcacactgaaagttgaatgttatctaatgcattcctctacctttcagaagatcagtagctggctgagaatctttgccaaatcttccttgctagccagaagtggaattggcagcttctagaatatgtacacctctggacaaaatgttcctcaatcttaagatacaaagaccctcattgtctgggtctattcccacacttactgagtacagatgaaggaaagtggtagcaatttaatcataactttcatttgctgaaaaacattatgagaaggcctcccttcctaagccacctctggtcttgctaagtcttgatcttgcttcctgccagcaccaaacattacattcaggggatttcctctggctcagtcttttccccttgaagttctctaatagatgttacttttgacaaaagatcgcctatgagttacaagcaccaggggatgctctacatcaagggatgcaccttcagtcaaactgtcaaaaagcccagaattcccaaaggcattaggtttcccaactgctttgtgctgatatcagaacagcagaaattaaatgtgaaatgtttctgatgacttatgttctacaatctatggacatacgggatttttttttcttgctttgaagctacctggatatttcctatttgaaataaaattgttcggtcattgtt

SEQ ID NO: 230 - protein, 295 aa, Homo sapiens
  ref <308>: DATABASE ACCESSION NUMBER: SWISS-Prot / O43315
  ref <309>: DATABASE ENTRY DATE: 2002-06-15
MQPEGAEKGKSFKQRLVLKSSLAKETLSEFLGTFILIVLGCGCVAQAILSRGRFGGVITINVGFSMAVAMAIYVAGGVSGGHINPAVSLAMCLFGRMKWFKLPFYVGAQFLGAFVGAATVFGIYYDGLMSFAGGKLLIVGENATAHIFATYPAPYLSLANAFADQVVATMILLIIVFAIFDSRNLGAPRGLEPIAIGLLIIVIASSLGLNSGCAMNPARDLSPRLFTALAGWGFEVFRAGNNFWWIPVVGPLVGAVIGGLIYVLVIEIHHPEPDSVFKAEQSEDKPEKYELSVIM

SEQ ID NO: 231 - DNA, 1166 bp, Rattus norvegicus
  ref <308>: DATABASE ACCESSION NUMBER: EMBL / AB013454
  ref <309>: DATABASE ENTRY DATE: 1998-11-16
gactcattgtgggtgcccatcatgatgtcctacagcgagagattggggggaccggctgtctccccacttccagtccgtgggagacacatggtgcatggggcagcctttgcttatgtccccagcccacaagtcctgcacaggattcctgggacaaccacctatgccatctccagtctgagcccggtagccctcacagagcacagctgtccctatggggaggtcctggaatgtcatgacccgctccctgccaagctggcccaggaagaggagcaaaagccagagcccaggctgtcccagaagcttgcccaggttggcacaaagctcctgaaggtgccgttgatgctaggcttcctttacctctttgtctgctccctggacgtgctcagctctgccttccaactggccggagggaaagtggctggggacatcttcaaggacaatgccatcctgtccaacccagtggcagggctggtggtgggaatcctggtgacagttctggtgcagagctccagcacctcgacatccatcattgtcagcatggttccctctggcttgttggaggttttttttttttttttactttatccgcatttatttatgctgaatttattcccgtgccatgagcttttgtttcttcaatttcttctgggatatctttttcttctgtgcaacctcctcttctggctttggaacaatctgttccttctcagtgaggatcatctcgatgtggcagggggagctcatgtatgggttaatccggccgtgagctctgtaggttcgtctgcgcatcttaggagccttgttcacctggatgtgttcaatgaccagagagtctacatccaaacccttaagttcagcattactctctgcatttttaagcatgtgcagcaaaaattcagcactcttttttggccaccgtccctgtgtccagccccactgtttggcctgggcgcacctaccgactccaccattataccgccggaatggcacacactgcttctttaaagtgacatccttcagatacttggtggctttgcggatatgcatacccttgatggcctgggcagtttcccgggtgttcttaaagtgaacacgaaggtttgagcctcttgacttgcatgatttcgtggggttttctgggtcaagggagtagcgaaccaggatcc

SEQ ID NO: 232 - protein, 184 aa, Rattus norvegicus [sequence omitted]

SEQ ID NO: 233 - DNA, 770 bp, Homo sapiens
  ref <308>: DATABASE ACCESSION NUMBER: EMBL / X53777
  ref <309>: DATABASE ENTRY DATE: 1993-09-12
aggacacctttggattaataatgaaaacaactactctctgagcagctgttcgaatcatctgatatttatactgaatgagttactgtaagtacgtattgacagaattacactgtactttcctctaggtgatctgtgaaaatggttcgctattcacttgacccggagaaccccacgaaatcatgcaaatcaagaggttccaatcttcgtgttcactttaagaacactcgtgaaactgctcaggccatcaagggtatgcatatacgaaaagccacgaagtatctgaaagatgtcactttacagaaacagtgtgtaccattccgacgttacaatggtggagttggcaggtgtgcgcaggccaagcaatggggctggacacaaggtcggtggcccaaaaagagtgctgaatttttgctgcacatgcttaaaaacgcagagagtaatgctgaacttaagggtttagatgtagattctctggtcattgagcatatccaagtgaacaaagcacctaagatgcgccgccggacctacagagctcatggtcggattaacccatacatgagctctccctgccacattgagatgatccttacggaaaaggaacagattgttcctaaaccagaagaggaggttgcccagaagaaaaagatatcccagaagaaactgaagaaacaaaaacttatggcacgggagtaaattcagcattaaaataaatgtaattaaaaagaaaaaaaaaaaaaaaaaaaaaaaaaaaaaaaaaaaaaaaaaaaaaa

SEQ ID NO: 234 - protein, 184 aa, Homo sapiens [sequence omitted]

SEQ ID NO: 235 - DNA, 2318 bp, Rattus norvegicus
  ref <308>: DATABASE ACCESSION NUMBER: EMBL / AB013732
  ref <309>: DATABASE ENTRY DATE: 1998-05-15
ggagcggcgggcggagaggtgtgtggagcttgtggcttgggaggaaggcgctgtccgagagaacgtgatctgcgcggccgctgtgtcctggccttggaagtggttcagtcatggttgagatcaagaagatctgttgcattggtgcgggctacgtcggcggacccacatgcagtgtcattgctcgcatgtgccctgaaatcagggtaacggttgtggatgtcaatgaggccaggatcaatgcatggaattctccaacgcttcctatttatgagcctggactaaaagaagtagtcgaatcctgtcgagggaaaaacctctttttttctaccaatattgatgatgccatcagagaagccgatctagtgtttatttctgtgaacacaccaacaaaaacatatggaatgggaaaaggccgggcggcagatctgaagtatatcgaagcttgtgctcgccgcattgtgcagaactcaaatgggtacaaaattgtgactgagaaaagcacagtccctgtgcgggcagcggaaagcatccgccgcatatttgatgccaacacaaagcccaacttgaatctacaggttctgtccaatcctgagttcttggcagagggaacagccatcaaggacctaaagaacccagacagagtcctgattggaggggatgagaccccagagggccagagagctgttcaggcactctgtgctgtgtacgagcactgggttcccaaggaaaagatcctcaccaccaacacttggtcctcagagctttccaaactggcagccaatgcttttcttgcccagaggatcagcagcattaactccataagtgctctgtgtgaaagcacaggcgccgatgtggaagaggtggcaacggctatcgggatggaccaaagaattggaaataagtttctaaaagccagcgttggttttggtgggggctgcttccaaaaagatgttctgaatttggtttatctctgtgaggctctgaatctgcccgaagtagctcgttactggcagcaggtcatagacatgaatgactaccagaggaggaggtttgcatcacggatcatagacagcctgtttaatacagtgactgataagaagatagctatcttggggtttgcgttcaaaaaggatactggtgataccagggagtcctccagtatctacattagcaaatacctgatggacgagggtgcgcacctccacatctacgaccccaaagtacccagggagcagatagtggtggatctttctcatccaggcgtctcagcggatgaccaagtgtccagactggtgaccatttccaaggatccatatgaagcatgtgatggcgcccatgccctcgttatctgcacagagtgggacatgtttaaggaactggattatgaacggattcataaaagaatgctgaagccagccttcatatttgatggccggcgtgtcctggatgggctccacaatgagctacagaccattggcttccagattgaaacaattggcaaaaaggtatcttccaagagaattccatacactcctggtgaaattccaaagtttagtcttcaggatccacctaacaagaagcccaaagtctagacgtcgcccttttgcctgtgatgatttggtactgcagggtagccagcgtctgtctgatactaagtggtaaatgaactacgtgtttttatggaaacaaaaatatttttgtaatcatcaaatttatactagctatctgggtgttagcatatctagtaattatgagtctagaataatttttatatatttttatattattgtactctcagttactgaatggatggaaaacaatcatgttggtttaaatgtcagtttttataaataaaaatgaaaccttgaattttttagcattacaggttgttacagactgcactgtaataacacaagggaaaggcagtctcatttccctacctgttgtctctgcttatcactaaatgggacttcgaagccgtgaaatcactgtgctaggatggctgatgaaggtctctggacttttgttttaatgagattatgtcattagtggttttagttgtctttgtgtctcccaaaaccactctgtctttctctccatgcgtaactcgggcagtgctttcttttttgaaaattcagcctgaggaggaaatcagtctatggtctagttcgtcctgcctcttagcttctgtacctgcttgtcacatttgcacctatgagtcaagatatgtttgttacctttattttgatttatttctattacaattcaatttttttcctttaattaagaaaaccaataaagtctcatgtgtaaactgg

SEQ ID NO: 236 - protein, 493 aa, Rattus norvegicus
  ref <308>: DATABASE ACCESSION NUMBER: SWISS-Prot / O70199
  ref <309>: DATABASE ENTRY DATE: 1998-12-15
MVEIKKICCIGAGYVGGPTCSVIARMCPEIRVTVVDVNEARINAWNSPTLPIYEPGLKEVVESCRGKNLFFSTNIDDAIREADLVFISVNTPTKTYGMGKGRAADLKYIEACARRIVQNSNGYKIVTEKSTVPVRAAESIRRIFDANTKPNLNLQVLSNPEFLAEGTAIKDLKNPDRVLIGGDETPEGQRAVQALCAVYEHWVPKEKILTTNTWSSELSKLAANAFLAQRISSINSISALCESTGADVEEVATAIGMDQRIGNKFLKASVGFGGGCFQKDVLNLVYLCEALNLPEVARYWQQVIDMNDYQRRRFASRIIDSLFNTVTDKKIAILGFAFKKDTGDTRESSSIYISKYLMDEGAHLHIYDPKVPREQIVVDLSHPGVSADDQVSRLVTISKDPYEACDGAHALVICTEWDMFKELDYERIHKRMLKPAFIFDGRRVLDGLHNELQTIGFQIETIGKKVSSKRIPYTPGEIPKFSLQDPPNKKPKV

SEQ ID NO: 237 - DNA, 2355 bp, Homo sapiens
  ref <308>: DATABASE ACCESSION NUMBER: EMBL / AJ007702
  ref <309>: DATABASE ENTRY DATE: 1999-02-24
aattcggcacgaaggcgccgagagggagctcagatcgagcgggcgcgggtggagaagctgcggcagcgcggcccgtaggaaggtgctgtccgaacgatcgggataggagcggtccctgcgcttgctgctgggaagtggtacaatcatgtttgaaattaagaagatctgttgcatcggtgcaggctatgttggaggacccacatgtagtgtcattgctcatatgtgtcctgaaatcagggtaacggttgttgatgtcaatgaatcaagaatcaatgcgtggaattctcctacacttcctatttatgagccaggactaaaagaagtggtagaatcctgtcgaggaaaaaatctttttttttctaccaatattgatgatgccatcaaagaagctgatcttgtatttatttctgtgaatactccaacaaaaacctatggaatggggaaaggccgggcagcagatctgaagtatattgaagcttgtgctagacgcattgtgcaaaactcaaatgggtacaaaattgtgactgagaaaagcacagttccagtgcgggcagcagaaagtatccgtcgcatatttgatgcaaacacaaaacccaacttgaatttacaggtgctgtccaaccctgagtttctggcagaggggacagccatcaaggacctaaagaacccagacagagtactgattggaggggatgaaactccagagggccagagagctgtgcaggccctgtgtgctgtatatgagcactgggttcccagagaaaagatcctcaccactaatacttggtcttcagagctttccaaactggcagcaaatgcttttcttgcccagagaataagcagcattaactccataagtgctctgtgtgaagcaacaggagctgatgtagaagaggtagcaacagcgattggaatggaccagagaattggaaacaagtttctaaaagccagtgttgggtttggtgggagctgcttccaaaaggatgttctgaatttggtttatctctgtgaggctctgaatttgccagaagtagctcgttattggcagcaggtcatagacatgaatgactaccagaggaggaggtttgcttcccggatcatagatagtctgtttaatacagtaactgataagaagatagctattttgggatttgcattcaaaaaggacactggtgatacaagagaatcttctagtatatatattagcaaatatttgatggatgaaggtgcacatctacatatatatgatccaaaagtacctagggaacaaatagttgtggatctttctcatccaggtgtttcagaggatgaccaagtgtcccggctcgtgaccatttccaaggatccatatgaagcatgtgatggtgcccatgctgttgttatttgcactgagtgggacatgtttaaggaattggattatgaacgcattcataaaaaaatgctaaagccagcctttatcttcgatggacggcgtgtcctggatgggctccacaatgaactacaaaccattggcttccagattgaaacaattggcaaaaaggtgtcttcaaagagaattccatatgctccttctggtgaaattccgaagtttagtcttcaagatccacctaacaagaaacctaaagtctagagattgccatttttatttgtgatttttttttttttttggtacttcaggaaagcaaatatctatctgctattaaatggtaaatgaaccaagtgtttttttttgttttttttttgagacagagtctcactgttgcccaggctggagtgcagtggtgcaatctcggctcactgcaagctctgcttcccaggttcacgccattctcctggctcagcctcccaagtagctgggactacaggcacccgccacagtgcctggctaattttttttgtatttttagtagagacagggtttcaccatgtgagccaggatggtctcaatctcctgaccttgtgaaccacccgtctcggcctcccaaagtgctgggattacaggtgtgagccaccacgcctggcccatgaaccaagtgtttttaaggaaacaaaactatttttttaatcatcagatttatactagctatatggatattagcatatctggtaattatgaatctagaatttttttacatatttttataatactgttagctcagttattggatgagtgaaagataatcatgttggttttaatagtgtcaatttttgtaaaataaaaattaaacttcaaactctttactttataaattgtccataggccacactttaatatcacattataaagggaaggacagtcttcattcctcctggttattggtttgtttgtcattaaagatatattttgaatccatg

SEQ ID NO: 238 - protein, 494 aa, Homo sapiens
  ref <308>: DATABASE ACCESSION NUMBER: SWISS-Prot / O60701
  ref <309>: DATABASE ENTRY DATE: 2002-06-15
MFEIKKICCIGAGYVGGPTCSVIAHMCPEIRVTVVDVNESRINAWNSPTLPIYEPGLKEVVESCRGKNLFFSTNIDDAIKEADLVFISVNTPTKTYGMGKGRAADLKYIEACARRIVQNSNGYKIVTEKSTVPVRAAESIRRIFDANTKPNLNLQVLSNPEFLAEGTAIKDLKNPDRVLIGGDETPEGQRAVQALCAVYEHWVPREKILTTNTWSSELSKLAANAFLAQRISSINSISALCEATGADVEEVATAIGMDQRIGNKFLKASVGFGGSCFQKDVLNLVYLCEALNLPEVARYWQQVIDMNDYQRRRFASRIIDSLFNTVTDKKIAILGFAFKKDTGDTRESSSIYISKYLMDEGAHLHIYDPKVPREQIVVDLSHPGVSEDDQVSRLVTISKDPYEACDGAHAVVICTEWDMFKELDYERIHKKMLKPAFIFDGRRVLDGLHNELQTIGFQIETIGKKVSSKRIPYAPSGEIPKFSLQDPPNKKPKV

SEQ ID NO: 239 - DNA, 2532 bp, Rattus norvegicus
  ref <308>: DATABASE ACCESSION NUMBER: EMBL / AB014722
  ref <309>: DATABASE ENTRY DATE: 1999-01-11
cccattttgcgtcgtctgggttcgggtggcggcccggctccaggcggacgcactaatcatggggtcgtcaaagaagcaccgtggagagaaggaggcagccgggactacggctgcggccggtaccgggggcactaccgagcagccgccacggcatcgagagcacaagaaacacaagcatcggagcagcggcggcggcagcagcggcggcgaacgacggaagcggagccgcgagcgtggggccgagcgcgggagcgggaggcgcggggccgaagccgaggcccgcagcggcgcgcatggtcgtgaacgaagccaagcggaaccctcggagcggcgcgtgaagcgggagaaacgcgatgaaggctatgaggccgctgccagctccaaagccagctctggagatgcctcatcactcagcatcgaggagaccaataaactccgagcaaagttggggttgaagcccttggaagtcaatgctgttaagaaagaggcgggcaccaaggaggagcccgtggcagccgatgttatcaaccccatggccttgcgacagcgtgaagaactacgggagaagctggcagctgccaaggaaaagcgcttgctgaaccaaaaattggggaaaataaagacactgggggaggatgacccctggcttgatgacactgcagcctggatagagaggagccggcagctacagaaagagaaggacttggcggagaagcgggccaagctgctagaagagatggaccaagagtttggtgtgagcactttagtggaggaggagtttgagcagaggcgacaggacctgtacagcgcccgggacttgcaaggcctcaccgtggaacatgcaatcgattcctttcgagaaggggagactgtggtcctcactctcaaggacaaaggggttctgcaggagggggaggatgtgctggtgaatgtgaacatggtggacaaggagcgagcagacaagaacgtggaacttcggaagaagaagcctgactacctgccctatgtggaggacgagagtgtggatgacttggcacagcaaaaacctcgctctatcctggccaaatatgatgaggaactggagggcgagcggccacattccttccgtttagagcagggtggcatggccgatggcctgagagaacgagagctcgaagaaatccggaccaagctacggctgcaggctcagtctctgaacactgtagggccccggcttgcctctgagtacctcagtccggaggagatggtgactttcaaaaagaccaaacggagagtgaagaaaatccgaaagaaggagaaggaggtaataatgcgggcagatgacttgctgccccttggcgaagaccagactcaggacggggactttggatccaggcttcggggccggggtcggcgccgagttcctgaagtggaggaggaggcccttgaggatgaagagaaggaccctgtggcccagccgccaccatcagatgacactcgcgtagagaacatggacatcagtgatgaggaggatgggggggctcttccctcggggcccccagagctggaggaggacgaagcggagctggagctgcagaagcagctggagaaggggcgccggctgcggcagctgcagcaactgcagcagctgcgggacagcggtgagaaggtgctggagattgtgaagaaactggagtctcgccaacgtggctgggaagaggaagaggatcctgagcggaaggggaccatcgtgttcaatgccacttctgagttctgtcgcactctgggggaaatccccacttacggattagctggcaaccgagaggagcaggaggagctcatggactttgaaagggatgaagagcgctcggccaatggtggctctgaatcagatggcgaagagaacattggctggagcaccgtcaacctggatgaggagaagcaacatcaggatttctccgcttcctctaccaccatcctggatgaagagcccattgtgaacagagggctggcggctgccctgctcctgtgtcagaacaaaggactgttggagaccacggtacaaaaggtggcccgagtaaaggctcccaataagtcactgccttcagcagtgtactgcatcgaggataagatggccattgatgacaagtacagccgacgtgaggagtacaggggcttcacccaggacttcaaggagaaggatggctacaagcccgatgttaagattgaatatgtggatgagacgggcaggaaactgactcccaaggaggcattccggcagctgtcccaccgcttccatgggaagggctcagggaagatgaagactgagcggcggatgaagaagctggatgaggaggcgctcctaaagaaaatgagttccagtgacacgcccctgggaaccgtggcactgctccaggagaagcagaaggctcaaaagacaccgtacatcgtgctcagtggcagtggcaagagcatgaatgcgaacaccatcaccaaatgaagcacctccctgtcccagatgtaatgttaaataaagttcccgccttattttta

SEQ ID NO: 240 - protein, 806 aa, Rattus norvegicus
  ref <308>: DATABASE ACCESSION NUMBER: SWISS-Prot / BAA36584
  ref <309>: DATABASE ENTRY DATE: 2002-06-01
MGSSKKHRGEKEAAGTTAAAGTGGTTEQPPRHREHKKHKHRSSGGGSSGGERRKRSRERGAERGSGRRGAEAEARSGAHGRERSQAEPSERRVKREKRDEGYEAAASSKASSGDASSLSIEETNKLRAKLGLKPLEVNAVKKEAGTKEEPVAADVINPMALRQREELREKLAAAKEKRLLNQKLGKIKTLGEDDPWLDDTAAWIERSRQLQKEKDLAEKRAKLLEEMDQEFGVSTLVEEEFEQRRQDLYSARDLQGLTVEHAIDSFREGETVVLTLKDKGVLQEGEDVLVNVNMVDKERADKNVELRKKKPDYLPYVEDESVDDLAQQKPRSILAKYDEELEGERPHSFRLEQGGMADGLRERELEEIRTKLRLQAQSLNTVGPRLASEYLSPEEMVTFKKTKRRVKKIRKKEKEVIMRADDLLPLGEDQTQDGDFGSRLRGRGRRRVPEVEEEALEDEEKDPVAQPPPSDDTRVENMDISDEEDGGALPSGPPELEEDEAELELQKQLEKGRRLRQLQQLQQLRDSGEKVLEIVKKLESRQRGWEEEEDPERKGTIVFNATSEFCRTLGEIPTYGLAGNREEQEELMDFERDEERSANGGSESDGEENIGWSTVNLDEEKQHQDFSASSTTILDEEPIVNRGLAAALLLCQNKGLLETTVQKVARVKAPNKSLPSAVYCIEDKMAIDDKYSRREEYRGFTQDFKEKDGYKPDVKIEYVDETGRKLTPKEAFRQLSHRFHGKGSGKMKTERRMKKLDEEALLKKMSSSDTPLGTVALLQEKQKAQKTPYIVLSGSGKSMNANTITK

SEQ ID NO: 241 - DNA, 506 bp, Homo sapiens
  ref <308>: DATABASE ACCESSION NUMBER: EMBL / AI133253
  ref <309>: DATABASE ENTRY DATE: 2000-03-03
gttgaggcagggccggggcgggagggcgctgtcacttggtgatggtgttcgcgttcatgctcttgccgctgccgctgagcacgatgtagggggtcttctgagccttctgcttctcctggagcagggccacggtgcccaggggcgtgtcgctggagctcatcttcttcaggagcgcctcctcgtccagcttcttcatccgccgctctgtcttcatcttgcctgagcccttgccatctccgggggctccattcagatcgagaacggctactttgtacactactttgcccccgagggcctaaccacaatgcccaagaatgtggtctttgtcattgacaagagcggctccatgagtggcaggaaaatccagcagacccgggaagccctaatcaagatcctggatgacctcagccccagagaccagttcaacctcatcgtcttcagtacagaagcaactcagtggatgccatcactggtgccagcctcagccgagaacgtgaacaaggcca

SEQ ID NO: 242 - DNA, 2532 bp, Rattus norvegicus; identical to SEQ ID NO: 239
  ref <308>: DATABASE ACCESSION NUMBER: EMBL / AB014722
  ref <309>: DATABASE ENTRY DATE: 1999-01-11

SEQ ID NO: 243 - protein, 806 aa, Rattus norvegicus; identical to SEQ ID NO: 240
  ref <308>: DATABASE ACCESSION NUMBER: SWISS-Prot / BAA36584
  ref <309>: DATABASE ENTRY DATE: 2002-06-01

SEQ ID NO: 244 - DNA, 506 bp, Homo sapiens; identical to SEQ ID NO: 241
  ref <308>: DATABASE ACCESSION NUMBER: EMBL / AI133253
  ref <309>: DATABASE ENTRY DATE: 2000-03-03

SEQ ID NO: 245 - DNA, 1269 bp, Rattus norvegicus
  ref <308>: DATABASE ACCESSION NUMBER: EMBL / AB015191
  ref <309>: DATABASE ENTRY DATE: 1998-08-21
atgggctctaagtacccaaggtccctccgctgctgcctgcccctgtgggccttcgggctacaggtgacttttatcctcctcttctattttctcatcggccaagaccctatccaggcagatcacaagttcatggcgatctatcaagtcatccaggatttgacccttgtggcagccttgggtttcggcttcctgtcctcatcctttcggagacacggctggagcagtgtggccttcagcttcttcatgttggcccttggggtacaggggacaatcttgctggactatttcctgaattgggtcctcgactggaacatgatcaagaatccgttcagtccgtttctcagcatccagagagctaccataagcaccttaccgctgctgatctcagcgggcgctgtcttggggaaggtcaacttggtgcagctggccgtgatggtgctggtggaagctatgacctttggtgccatcagagtcgctgacaagaaggtcttcagaattgaagaccacataatcatgatgtacggacacgtgtttggggcctattttgggctgactgtggcatggtggctttccaagtctctgcccaggagaaggcatgagaacgcccagacagaaaaggttcagatgaccacgagctccagtctgtttgccatgctgggcaccctcttcttgtggatattctggccaagtatcaactctgctctcctggaagggacaaagaaaaagaacgcagtgttcaacacctactacgccctggcagtcagcacagtgacagccacctccatgtccgccctgagtcaccccaaagggaagatcaacatggttcacatccacaacgcagtgctggctgggggtgtggctgtcggtgccccgagttgcctgatttcttctccttggattgctatggtcctgggcctcacagctgggttgatctccatctggggagccaagtgtccacaggtgtgtttgagcgacttgctgctgaaccccagtgggatccactacaccttcggcttgcccggcctgctcggagcactcacctactactgcctccatataatagccgagtccaggccctccaatctctggattgtcacccaaacgatcactgacgtcggggctctcagctttgctatggcgatgggaatggtgactggactgctgacaggttgtctcctaagtgtcaaagtgtggagggctccccatgcagtcaagtactttgatgatcaggctttctgggagttcccccacttggctgtcgaattttaa

SEQ ID NO: 246 - protein, 422 aa, Rattus norvegicus
  ref <308>: DATABASE ACCESSION NUMBER: Refseq / NP_071950
  ref <309>: DATABASE ENTRY DATE: 2002-11-05
MGSKYPRSLRCCLPLWAFGLQVTFILLFYFLIGQDPIQADHKFMAIYQVIQDLTLVAALGFGFLSSSFRRHGWSSVAFSFFMLALGVQGTILLDYFLNWVLDWNMIKNPFSPFLSIQRATISTLPLLISAGAVLGKVNLVQLAVMVLVEAMTFGAIRVADKKVFRIEDHIIMMYGHVFGAYFGLTVAWWLSKSLPRRRHENAQTEKVQMTTSSSLFAMLGTLFLWIFWPSINSALLEGTKKKNAVFNTYYALAVSTVTATSMSALSHPKGKINMVHIHNAVLAGGVAVGAPSCLISSPWIAMVLGLTAGLISIWGAKCPQVCLSDLLLNPSGIHYTFGLPGLLGALTYYCLHIIAESRPSNLWIVTQTITDVGALSFAMAMGMVTGLLTGCLLSVKVWRAPHAVKYFDDQAFWEFPHLAVEF

SEQ ID NO: 247 - DNA, 1254 bp, Homo sapiens
  ref <308>: DATABASE ACCESSION NUMBER: EMBL / S82449
  ref <309>: DATABASE ENTRY DATE: 2000-08-11
atgagctctaagtacccgcggtctgtccggcgctgcctgcccctctgggccctaacactggaagcagctctcattctcctcttctatttttttacccactatgacgcttccttagaggatcaaaaggggctcgtggcatcctatcaagttggccaagatctgaccgtgatggcggccattggcttgggcttcctcacctcgagtttccggagacacagctggagcagtgtggccttcaacctcttcatgctggcgcttggtgtgcagtgggcaatcctgctggacggcttcctgagccagttcccttctgggaaggtggtcatcacactgttcagtattcggctggccaccatgagtgctatgtcggtgctgatctcagcgggtgctgtcttggggaaggtcaacttggcgcagttggtggtgatggtgctggtggaggtgacagctttaggcaccctgaggatggtcatcagtaatatcttcaacacagactaccacatgaacatgatgcacatctacgtgttcgcagcctattttgggctgtctgtggcctggtgcctgccaaagcctctacccgagggaacggaggataaagatcagacagcaacgatacccagtttgtctgccatgctgggcgccctcttcttgtggatgttctggccaagtttcaactctgctctgctgagaagtccaatcgaaaggaagaatgccgtgttcaacacctactatgctgtagcagtcagtgtggtgacagccatctcagggtcatccttggctcacccccaagggaagatcagcaagacttatgtgcacagtgcggtgttggcaggaggcgtggctgtgggtacctcgtgtcacctgatcccttctccgtggcttgccatggtgctgggtcttgtggctgggctgatctccgtcgggggagccaagtacctgccggggtgttgtaaccgagtgctggggattccccacagctccatcatgggctacaacttcagcttgctgggtctgcttggagagatcatctacattgtgctgctggtgcttgataccgtcggagccggcaatggcatgattggcttccaggtcctcctcagcattggggaactcagcttggccatcgtgatagctctcacgtctggtctcctgacaggtttgctcctaaatcttaaaatatggaaagcacctcatgaggctaaatattttgatgaccaagttttctggaagtttcctcatttggctgttggattttaa

SEQ ID NO: 248 - protein, 416 aa, Homo sapiens
  ref <308>: DATABASE ACCESSION NUMBER: SWISS-Prot / Q9UQ21
  ref <309>: DATABASE ENTRY DATE: 2002-06-15
SSKYPRSVRRCLPLWALTLEAALILLFYFFTHYDASLEDQKGLVASYQVGQDLTVMAAIGLGFLTSSFRRHSWSSVAFNLFMLALGVQWAILLDGFLSQFPSGKVVITLFSIRLATMSALSVLISVDAVLGKVNLAQLVVMVLVEVTALGNLRMVISNIFNTDYHMNMMHIYVFAAYFGLSVAWCLPKPLPEGTEDKDQTATIPSLSAMLGALFLWMFWPSFNSALLRSPIERKNAVFNTYYAVAVSVVTAISGSSLAHPQGKISKTYVHSAVLAGGVAVGTSCHLIPSPWLAMVLGLVAGLISVGGAKYLPGCCNRVLGIPHSSIMGYNFSLLGLLGEIIYIVLLVLDTVGAGNGMIGFQVLLSIGELSLAIVIALTSGLLTGLLLNLKIWKAPHEAKYFDDQVFWKFPHLAVGF

SEQ ID NO: 249 - DNA, 1269 bp, Rattus norvegicus; identical to SEQ ID NO: 245
  ref <308>: DATABASE ACCESSION NUMBER: EMBL / AB015191
  ref <309>: DATABASE ENTRY DATE: 1998-08-21

SEQ ID NO: 250 - protein, 422 aa, Rattus norvegicus; identical to SEQ ID NO: 246
  ref <308>: DATABASE ACCESSION NUMBER: Refseq / NP_071950
  ref <309>: DATABASE ENTRY DATE: 2002-11-05

SEQ ID NO: 251 - DNA, 1254 bp, Homo sapiens; identical to SEQ ID NO: 247
  ref <308>: DATABASE ACCESSION NUMBER: EMBL / S82449
  ref <309>: DATABASE ENTRY DATE: 2000-08-11

SEQ ID NO: 252 - protein, 416 aa, Homo sapiens; identical to SEQ ID NO: 248
  ref <308>: DATABASE ACCESSION NUMBER: SWISS-Prot / Q9UQ21
  ref <309>: DATABASE ENTRY DATE: 2002-06-15

SEQ ID NO: 253 - DNA, 1420 bp, Rattus norvegicus
  ref <308>: DATABASE ACCESSION NUMBER: EMBL / AB015946
  ref <309>: DATABASE ENTRY DATE: 1999-08-16
ccggaattcgccatggcgatgccgagagaaatcatcaccctacagttgggccagtgcggcaatcagattgggttcgagttctggaaacagctatgtgctgagcatggcatcagccccgagggcatcgtagaggagttcgccaccgagggcactgaccgcaaggacgtctttttctaccaggcagacgatgagcattacatcccccgggctgtgctgctggacctggagccccgggtgatccattccatcctcaactcctcctatgccaagctctacaacccagagaacatctacctgtccgagcatggaggaggggctggcaacaactgggccagcggattctcccagggagaaaaaatccacgaggacatttttgacatcattgatcgggaggcagatggcagtgacagcctagagggatttgtactgtgtcactccattgctggggggacaggctctggcttgggctcctacctcttggaacggctaaatgacaggtaccccaaaaaactagtgcagacgtactccgtgttccccaaccaggacgagatgagtgacgtggtggtccagccctacaactccctcctcacgttaaagaggctgacccagaacgcggactgtgtggtggtgctggacaacacggccctgaacctgatcgccacagaccgcctgcacatccagaacccatccttctcccagatcaaccagctggtgtccaccatcatgtcagccagcaccaccaccctgcgctaccccggatacatgaacaacgacctcatcggcctcatcgcctcactcattcccacccctcgactacacttcctcatgactggctatacccccctcaccacggaccagtcagtggccagtgtgaggaagacaacagtcctggatgtcatgaggagactgctacagcccaagaacgtgatggtgtccacaggtcgggatcgtcagaccaaccactgctacatcgccatcctcaacatcatccagggagaggtggaccccacccaggtccacaagagcctgcagaggatccgggagaggaagttggccaactttatcccctggggcccggccagcatccaggtggccctgtcaaggaagtctccatacctgccctcagcccaccgggtcagcgggctcatgatggccaaccacaccagtatctcctcgctttttgaaaggacctgtcgccagtttgacaagctgaggaaacgggaggccttcatggagcagttccgcaaggaggacatcttcaaggacaattttgacgagatggacacctccagggagattgtgcagcagctgattgacgagtaccatgcggccacacggccagactacatctcctggggcacccaggagcaatgagtcgcccgagacagggaccctcatctgccttaccggttagccatgg

SEQ ID NO: 254 - protein, 451 aa, Rattus norvegicus
  ref <308>: DATABASE ACCESSION NUMBER: SWISS-Prot / Q9Z310
  ref <309>: DATABASE ENTRY DATE: 2002-06-15
MPREIITLQLGQCGNQIGFEFWKQLCAEHGISPEGIVEEFATEGTDRKDVFFYQADDEHYIPRAVLLDLEPRVIHSILNSSYAKLYNPENIYLSEHGGGAGNNWASGFSQGEKIHEDIFDIIDREADGSDSLEGFVLCHSIAGGTGSGLGSYLLERLNDRYPKKLVQTYSVFPNQDEMSDVVVQPYNSLLTLKRLTQNADCVVVLDNTALNLIATDRLHIQNPSFSQINQLVSTIMSASTTTLRYPGYMNNDLIGLIASLIPTPRLHFLMTGYTPLTTDQSVASVRKTTVLDVMRRLLQPKNVMVSTGRDRQTNHCYIAILNIIQGEVDPTQVHKSLQRIRERKLANFIPWGPASIQVALSRKSPYLPSAHRVSGLMMANHTSISSLFERTCRQFDKLRKREAFMEQFRKEDIFKDNFDEMDTSREIVQQLIDEYHAATRPDYISWGTQEQ

SEQ ID NO: 255 - DNA, 1654 bp, Homo sapiens
  ref <308>: DATABASE ACCESSION NUMBER: EMBL / BC000619
  ref <309>: DATABASE ENTRY DATE: 2001-07-13
ggcacgagggcgggctggcgtgcggcgccgttgcgggcgggagcggctgcaacgccggtgcctgaggagcgatgccgagggaaatcatcaccctacagttgggccagtgcggcaatcagattgggttcgagttctggaaacagctgtgcgccgagcatggtatcagccccgagggcatcgtggaggagttcgccaccgagggcactgaccgcaaggacgtctttttctaccaggcagacgatgagcactacatcccccgggccgtgctgctggacttggaaccccgggtgatccactccatcctcaactccccctatgccaagctctacaacccagagaacatctacctgtcggaacatggaggaggagctggcaacaactgggccagcggattctcccagggagaaaagatccatgaggacatttttgacatcatagaccgggaggcagatggtagtgacagtctagagggctttgtgctgtgtcactccattgctggggggacaggctctggactgggttcctacctcttagaacggctgaatgacaggtatcctaagaagctggtgcagacatactcagtgtttcccaaccaggacgagatgagcgatgtggtggtccagccttacaattcactcctcacactcaagaggctgacgcagaatgcagactgtgtggtggtgctggacaacacagccctgaaccggattgccacagaccgcctgcacatccagaacccatccttctcccagatcaaccagctggtgtctaccatcatgtcagccagcaccaccaccctgcgctaccctggctacatgaacaatgacctcatcggcctcatcgcctcgctcattcccaccccacggctccacttcctcatgaccggctacacccctctcactacggaccagtcagtggccagcgtgaggaagaccacggtcctggatgtcatgaggcggctgctgcagcccaagaacgtgatggtgtccacaggccgagaccgccagaccaaccactgctacatcgccatcctcaacatcatccagggagaggtggaccccacccaggtccacaagagcttgcagaggatccgggaacgcaagttggccaacttcatcccgtggggccccgccagcatccaggtggccctgtcgaggaagtctccctacctgccctcggcccaccgggtcagcgggctcatgatggccaaccacaccagcatctcctcgctcttcgagagaacctgtcgccagtatgacaagctgcgtaagcgggaggccttcctggagcagttccgcaaggaggacatgttcaaggacaactttgatgagatggacacatccagggagattgtgcagcagctcatcgatgagtaccatgcggccacacggccagactacatctcctggggcacccaggagcagtgagtcccccaggacagggaccctcatctgccttactggttggcccaagccctgcctgactgaccaccccctcagagcacagatcagggacctcacgcatctctttctcatatacatggactctctgttggcctgcaaacacatttacttctcctcttatgagactatttatctttaataaagcactggatataaaaaaaaaaaaaaaaaaaaaaaaaaaaaaaaaaaaa

SEQ ID NO: 256 - protein, 451 aa, Homo sapiens
  ref <308>: DATABASE ACCESSION NUMBER: SWISS-Prot / P23258
  ref <309>: DATABASE ENTRY DATE: 2002-06-15
MPREIITLQLGQCGNQIGFEFWKQLCAEHGISPEGIVEEFATEGTDRKDVFFYQADDEHYIPRAVLLDLEPRVIHSILNSPYAKLYNPENIYLSEHGGGAGNNWASGFSQGEKIHEDIFDIIDREADGSDSLEGFVLCHSIAGGTGSGLGSYLLERLNDRYPKKLVQTYSVFPNQDEMSDVVVQPYNSLLTLKRLTQNADCVVVLDNTALNRIATDRLHIQNPSFSQINQLVSTIMSASTTTLRYPGYMNNDLIGLIASLIPTPRLHFLMTGYTPLTTDQSVASVRKTTVLDVMRRLLQPKNVMVSTGRDRQTNHCYIAILNIIQGEVDPTQVHKSLQRIRERKLANFIPWGPASIQVALSRKSPYLPSAHRVSGLMMANHTSISSLFERTCRQYDKLRKREAFLEQFRKEDMFKDNFDEMDTSREIVQQLIDEYHAATRPDYISWGTQEQ

SEQ ID NO: 257 - DNA, 3202 bp, Rattus norvegicus
  ref <308>: DATABASE ACCESSION NUMBER: EMBL / AB016161
  ref <309>: DATABASE ENTRY DATE: 1999-01-22
agacacctccccgacgccctcccagaagccttccccagaagaagtgtcccccctgagctgcccccccaccccaaggaggccgcccccgcccctcctcgccatgggcccggggggaccctgtaccccagtggggtggccgctgcctcttctgctggtgatggcggctggggtggctccggtgtgggcctctcactcccctcatctcccgcggcctcacccgagggtccccccgcacccctcctcagaacggcgtgcagtatacatcggggcgctgtttcccatgagcgggggctggccggggggccaggcctgccagcccgcggtggagatggcgctggaggacgttaacagccgcagagacatcctgccggactacgagctcaagcttatccaccacgacagcaagtgtgacccagggcaagccaccaagtacttgtacgaactactctacaatgaccccatcaagatcattctcatgcctggctgtagttctgtctccacacttgtagctgaggctgcccggatgtggaaccttattgtgctctcatatggctccagttcaccagccttgtcaaaccgacagcggtttcccacgttcttccggacgcatccatccgccacactccacaatcccacccgggtgaaactcttcgaaaagtggggctggaagaagatcgctaccatccaacagaccaccgaggtcttcacctcaacgctggatgacctggaggagcgagtgaaagaggctgggatcgagatcactttccgacagagtttcttctcggatccagctgtgcctgttaaaaacctgaagcgtcaagatgctcgaatcatcgtgggacttttctatgagacggaagcccggaaagttttttgtgaggtctataaggaaaggctctttgggaagaagtacgtctggttcctcatcgggtggtatgctgacaactggttcaagacctatgacccgtcaatcaattgtacagtggaagaaatgaccgaggcggtggagggccacatcaccacggagattgtcatgctgaaccctgccaacacccgaagcatttccaacatgacgtcacaggaatttgtggagaaactaaccaagcggctgaaaagacaccccgaggagactggaggcttccaggaggcaccactggcctatgatgctatctgggccttggctttggccttgaacaagacgtctggaggaggtggtcgttccggcgtgcgcctggaggactttaactacaacaaccagaccattacagaccagatctaccgggccatgaactcctcctcctttgagggcgtttctggccatgtggtctttgatgccagcggctcccggatggcatggacacttatcgagcagctacagggcggcagctacaagaagatcggctactacgacagcaccaaggatgatctttcctggtccaaaacggacaagtggattggagggtctcccccagctgaccagaccttggtcatcaagacattccgtttcctgtctcagaaactctttatctccgtctcagttctctccagcctgggcattgttcttgctgttgtctgtctgtcctttaacatctacaactcccacgttcgttatatccagaactcccagcccaacctgaacaatctgactgctgtgggctgctcactggcactggctgctgtcttccctctcgggctggatggttaccacatagggagaagccagttcccgtttgtctgccaggcccgcctttggctcttgggcttgggctttagtctgggctatggctctatgttcaccaagatctggtgggtccacacagtcttcacgaagaaggaggagaagaaggagtggaggaagaccctagagccctggaaactctatgccactgtgggcctgctggtgggcatggatgtcctgactcttgccatctggcagattgtggaccccttgcaccgaaccattgagacttttgccaaggaggaaccaaaggaagacatcgatgtctccattctgccccagttggagcactgcagctccaagaagatgaatacgtggcttggcattttctatggttacaaggggctgctgctgctgctgggaatctttcttgcttacgaaaccaagagcgtgtccactgaaaagatcaatgaccacagggccgtgggcatggctatctacaatgtcgcggtcctgtgtctcatcactgctcctgtgaccatgatcctttccagtcagcaggacgcagcctttgcctttgcctctctggccatcgtgttctcttcctacatcactctggttgtgctctttgtgcccaagatgcgcaggctgatcacccgaggggaatggcagtctgaaacgcaggacaccatgaaaacaggatcatccaccaacaacaacgaggaagagaagtcccgactgttggagaaggaaaaccgagaactggaaaagatcatcgctgaggtgtgcggtgacaaacaaccggggccccccgtgtctgagggtgggttgcccgtagtggggccttcgatagaggtttgagtgttggtggttcacagagggtctcggcctgcagaggaaccggagagggagaggggaagggttgagtttcagtcccgtcagcccgaggagagggaggggggttctgcagacttcagcccacctgaggcaaaagagcagtcactggcagtagttagggggaggccattgtgagacattggttgcccacagtgttactgtgtccgggctgtagttagggaccgtgcagtgctgggtgggggcgggaaatggcctttccacttgtctgatgcaatcttcatttattccttttttttttttttttaaatcactgattttctccatctattctctcggtgccattacgttctgtgggcttcctttgttctcccctgattcacattttaatttcctttctcactcgtacatctcgtttcatcgtctccccccccctccctccttccattccacatcgccctcctcccacactcccgattgtgtttcttcctccagaaagaggagcgcgtctctgaactgcgccatcagctccagtctcggcagcaactccgctcacggcgccaccccccaacacccccagatccctctggaggccttcccaggggaccctctgagccccctgaccggcttagctgtgatgggagtcgagtacatttgctttacaagtga

SEQ ID NO: 258 - protein, 991 aa, Rattus norvegicus
  ref <308>: DATABASE ACCESSION NUMBER: SWISS-Prot / Q9Z0U4
  ref <309>: DATABASE ENTRY DATE: 2001-10-16
MLLLLLVPLFLRPLGAGGAQTPNATSEGCQIIHPPWEGGIRYRGLTRDQVKAINFLPVDYEIEYVCRGEREVVGPKVRKCLANGSWTDMDTPSRCVRICSKSYLTLENGKVFLTGGDLPALDGARVEFRCDPDFHLVGSSRSVCSQGQWSTPKPHCQVNRTPHSERRAVYIGALFPMSGGWPGGQACQPAVEMALEDVNSRRDILPDYELKLIHHDSKCDPGQATKYLYELLYNDPIKIILMPGCSSVSTLVAEAARMWNLIVLSYGSSSPALSNRQRFPTFFRTHPSATLHNPTRVKLFEKWGWKKIATIQQTTEVFTSTLDDLEERVKEAGIEITFRQSFFSDPAVPVKNLKRQDARIIVGLFYETEARKVFCEVYKERLFGKKYVWFLIGWYADNWFKTYDPSINCTVEEMTEAVEGHITTEIVMLNPANTRSISNMTSQEFVEKLTKRLKRHPEETGGFQEAPLAYDAIWALALALNKTSGGGGRSGVRLEDFNYNNQTITDQIYRAMNSSSFEGVSGHVVFDASGSRMAWTLIEQLQGGSYKKIGYYDSTKDDLSWSKTDKWIGGSPPADQTLVIKTFRFLSQKLFISVSVLSSLGIVLAVVCLSFNIYNSHVRYIQNSQPNLNNLTAVGCSLALAAVFPLGLDGYHIGRSQFPFVCQARLWLLGLGFSLGYGSMFTKIWWVHTVFTKKEEKKEWRKTLEPWKLYATVGLLVGMDVLTLAIWQIVDPLHRTIETFAKEEPKEDIDVSILPQLEHCSSKKMNTWLGELWSFAVSSDVQRRATVGGDSPICVWPAPESIFYGYKGLLLLLGIFLAYETKSVSTEKINDHRAVGMAIYNVAVLCLITAPVTMILSSQQDAAFAFASLAIVFSSYITLVVLFVPKMRRLITRGEWQSETQDTMKTGSSTNNNEEEKSRLLEKENRELEKIIAEKEERVSELRHQLQSRQQLRSRRHPPTPPDPSGGLPRGPSEPPDRLSCDGSRVHLLYK

SEQ ID NO: 259 - DNA, 4445 bp, Homo sapiens
  ref <308>: DATABASE ACCESSION NUMBER: EMBL / AJ225028
  ref <309>: DATABASE ENTRY DATE: 1998-12-11
cgctccccgctcccgtggctgccgccgccccggggaagaagagacaggggtggggtttgggggaagcgagagaggaggggagagaccctggccaggctggagcctggattcgaggggaggagggacgggaggaggagaaaggtggaggagaagggaggggggagcggggaggagcggccgggcctggggccttgaggcccggggagagccggggagccgggcccgcgcgccgagatgttgctgctgctgttactggcgccactcttcctccgccccccgggcgcgggcggggcgcagacccccaacgccacctcagaaggttgccagatcatacacccgccctgggaagggggcatcaggtaccggggcctgactcgggaccaggtgaaggctatcaacttcctgccagtggactatgagattgagtatgtgtgccggggggagcgcgaggtggtggggcccaaggtccgcaagtgcctggccaacggctcctggacagatatggacacacccagccgctgtgtccgaatctgctccaagtcttatttgaccctggaaaatgggaaggttttcctgacgggtggggacctcccagctctggacggagcccgggtggatttccggtgtgaccccgacttccatctggtgggcagctcccggagcatctgtagtcagggccagtggagcacccccaagccccactgccaggtgaatcgaacgccacactcagaacggcgcgcagtgtacatcggggcactgtttcccatgagcgggggctggccagggggccaggcctgccagcccgcggtggagatggcgctggaggacgtgaatagccgcagggacatcctgccggactatgagctcaagctcatccaccacgacagcaagtgtgatccaggccaagccaccaagtacctatatgagctgctctacaacgaccctatcaagatcatccttatgcctggctgcagctctgtctccacgctggtggctgaggctgctaggatgtggaacctcattgtgctttcctatggctccagctcaccagccctgtcaaaccggcagcgtttccccactttcttccgaacgcacccatcagccacactccacaaccctacccgcgtgaaactctttgaaaagtggggctggaagaagattgctaccatccagcagaccactgaggtcttcacttcgactctggacgacctggaggaacgagtgaaggaggctggaattgagattactttccgccagagtttcttctcagatccagctgtgcccgtcaaaaacctgaagcgccaggatgcccgaatcatcgtgggacttttctatgagactgaagcccggaaagttttttgtgaggtgtacaaggagcgtctctttgggaagaagtacgtctggttcctcattgggtggtatgctgacaattggttcaagatctacgacccttctatcaactgcacagtggatgagatgactgaggcggtggagggccacatcacaactgagattgtcatgctgaatcctgccaatacccgcagcatttccaacatgacatcccaggaatttgtggagaaactaaccaagcgactgaaaagacaccctgaggagacaggaggcttccaggaggcaccgctggcctatgatgccatctgggccttggcactggccctgaacaagacatctggaggaggcggccgttctggtgtgcgcctggaggacttcaactacaacaaccagaccattaccgaccaaatctaccgggcaatgaactcttcgtcctttgagggtgtctctggccatgtggtgtttgatgccagcggctctcggatggcatggacgcttatcgagcagcttcagggtggcagctacaagaagattggctactatgacagcaccaaggatgatctttcctggtccaaaacagataaatggattggagggtcccccccagctgaccagaccctggtcatcaagacattccgcttcctgtcacagaaactctttatctccgtctcagttctctccagcctgggcattgtcctagctgttgtctgtctgtcctttaacatctacaactcacatgtccgttatatccagaactcacagcccaacctgaacaacctgactgctgtgggctgctcactggctttagctgctgtcttccccctggggctcgatggttaccacattgggaggaaccagtttcctttcgtctgccaggcccgcctctggctcctgggcctgggctttagtctgggctacggttccatgttcaccaagatttggtgggtccacacggtcttcacaaagaaggaagaaaagaaggagtggaggaagactctggaaccctggaagctgtatgccacagtgggcctgctggtgggcatggatgtcctcactctcgccatctggcagatcgtggaccctctgcaccggaccattgagacatttgccaaggaggaacctaaggaagatattgacgtctctattctgccccagctggagcattgcagctccaggaagatgaatacatggcttggcattttctatggttacaaggggctgctgctgctgctgggaatcttccttgcttatgagaccaagagtgtgtccactgagaagatcaatgatcaccgggctgtgggcatggctatctacaatgtggcagtcctgtgcctcatcactgctcctgtcaccatgattctgtccagccagcaggatgcagcctttgcctttgcctctcttgccatagttttctcctcctatatcactcttgttgtgctctttgtgcccaagatgcgcaggctgatcacccgaggggaatggcagtcggaggcgcaggacaccatgaagacagggtcatcgaccaacaacaacgaggaggagaagtcccggctgttggagaaggagaaccgtgaactggaaaagatcattgctgagaaagaggagcgtgtctctgaactgcgccatcaactccagtctcggcagcagctccgctcccggcgccacccaccgacacccccagaaccctctgggggcctgcccaggggaccccctgagccccccgaccggcttagctgtgatgggagtcgagtgcatttgctttataagtgagggtagggtgagggaggacaggccagtagggggagggaaagggagaggggaagggcaggggactcaggaagcagggggtccccatccccagctgggaagaacatgctatccaatctcatctcttgtaaatacatgtccccctgtgagttctgggctgatttgggtctctcatacctctgggaaacagacctttttctctcttactgcttcatgtaattttgtatcacctcttcacaatttagttcgtacctggcttgaagctgctcactgctcacacgctgcctcctcagcagcctcactgcatctttctcttcccatgcaacaccctcttctagttaccacggcaacccctgcagctcctctgcctttgtgctctgttcctgtccagcaggggtctcccaacaagtgctctttccaccccaaaggggcctctccttttctccactgtcataatctctttccatcttacttgcccttctatactttctcacatgtggctccccctgaattttgcttcctttgggagctcattcttttcgccaaggctcacatgctccttgcctctgctctgtgcactcacgctcagcacacatgcatcctcccctctcctgcgtgtgcccactgaacatgctcatgtgtacacacgcttttcccgtatgctttcttcatgttcagtcacatgtgctctcgggtgccctgcattcacagctacgtgtgcccctctcatggtcatgggtctgcccttgagcgtgtttgggtaggcatgtgcaatttgtctagcatgctgagtcatgtctttcctatttgcacacgtccatgtttatccatgtactttccctgtgtaccctccatgtaccttgtgtactttcttcccttaaatcatggtattcttctgacagagccatatgtaccctaccctgcacattgttatgcacttttccccaattcatgtttggtggggccatccacaccctctccttgtcacagaatctccatttctgctcagattccccccatctccattgcattcatgtactaccctcagtctacactcacaatcatcttctcccaagactgctcccttttgttttgtgtttttttgaggggaattaaggaaaaataagtgggggcaggtttggagagctgcttccagtggatagttgatgagaatcctgaccaaaggaaggcacccttgactgttgggatagacagatggacctatggggtgggaggtggtgtccctttcacactgtggtgtctcttggggaaggatctccccgaatctcaataaaccagtgaacagtgtgactcggcaaaaaaaaaaa

SEQ ID NO: 260 - protein, 961 aa, Homo sapiens
  ref <308>: DATABASE ACCESSION NUMBER: SWISS-Prot / Q9UBS5
  ref <309>: DATABASE ENTRY DATE: 2002-06-15
MLLLLLLAPLFLRPPGAGGAQTPNATSEGCQIIHPPWEGGIRYRGLTRDQVKAINFLPVDYEIEYVCRGEREVVGPKVRKCLANGSWTDMDTPSRCVRICSKSYLTLENGKVFLTGGDLPALDGARVDFRCDPDFHLVGSSRSICSQGQWSTPKPHCQVNRTPHSERRAVYIGALFPMSGGWPGGQACQPAVEMALEDVNSRRDILPDYELKLIHHDSKCDPGQATKYLYELLYNDPIKIILMPGCSSVSTLVAEAARMWNLIVLSYGSSSPALSNRQRFPTFFRTHPSATLHNPTRVKLFEKWGWKKIATIQQTTEVFTSTLDDLEERVKEAGIEITFRQSFFSDPAVPVKNLKRQDARIIVGLFYETEARKVFCEVYKERLFGKKYVWFLIGWYADNWFKIYDPSINCTVDEMTEAVEGHITTEIVMLNPANTRSISNMTSQEFVEKLTKRLKRHPEETGGFQEAPLAYDAIWALALALNKTSGGGGRSGVRLEDFNYNNQTITDQIYRAMNSSSFEGVSGHVVFDASGSRMAWTLIEQLQGGSYKKIGYYDSTKDDLSWSKTDKWIGGSPPADQTLVIKTFRFLSQKLFISVSVLSSLGIVLAVVCLSFNIYNSHVRYIQNSQPNLNNLTAVGCSLALAAVFPLGLDGYHIGRNQFPFVCQARLWLLGLGFSLGYGSMFTKIWWVHTVFTKKEEKKEWRKTLEPWKLYATVGLLVGMDVLTLAIWQIVDPLHRTIETFAKEEPKEDIDVSILPQLEHCSSRKMNTWLGIFYGYKGLLLLLGIFLAYETKSVSTEKINDHRAVGMAIYNVAVLCLITAPVTMILSSQQDAAFAFASLAIVFSSYITLVVLFVPKMRRLITRGEWQSEAQDTMKTGSSTNNNEEEKSRLLEKENRELEKIIAEKEERVSELRHQLQSRQQLRSRRHPPTPPEPSGGLPRGPPEPPDRLSCDGSRVHLLYK

SEQ ID NO: 261 - DNA, 3202 bp, Rattus norvegicus; identical to SEQ ID NO: 257
  ref <308>: DATABASE ACCESSION NUMBER: EMBL / AB016161
  ref <309>: DATABASE ENTRY DATE: 1999-01-22

SEQ ID NO: 262 - protein, 991 aa, Rattus norvegicus; identical to SEQ ID NO: 258
  ref <308>: DATABASE ACCESSION NUMBER: SWISS-Prot / Q9Z0U4
  ref <309>: DATABASE ENTRY DATE: 2001-10-16

SEQ ID NO: 263 - DNA, 4445 bp, Homo sapiens; identical to SEQ ID NO: 259
  ref <308>: DATABASE ACCESSION NUMBER: EMBL / AJ225028
  ref <309>: DATABASE ENTRY DATE: 1998-12-11

SEQ ID NO: 264 - protein, 961 aa, Homo sapiens; identical to SEQ ID NO: 260
  ref <308>: DATABASE ACCESSION NUMBER: SWISS-Prot / Q9UBS5
  ref <309>: DATABASE ENTRY DATE: 2002-06-15

SEQ ID NO: 265 - DNA, 2427 bp, Rattus norvegicus
  ref <308>: DATABASE ACCESSION NUMBER: EMBL / AB016800
  ref <309>: DATABASE ENTRY DATE: 1998-11-16
cgcacgcagaacctgcggtgggcgatcaggtactgagaaagctaccaaggttgcctgctctactcagcacttgagccctggtggaggtctatctttctggaaggatctgagcctctcctccttccctcagatcctgatggcttcaaagtcccagcacaacgcttccaaagccaagaatcacaacgtcaaggctgaatctcaaggacaatggggccgtgcctgggaagtggactggttctccctggtcagcgtcattttcctgctgctcttcgcaccgttcattgtgtactacttcatcatggcatgtgaccagtacagctgctcgctgactgcccccatattggacgtagctacaggccgtgcgagtctggcagacatctgggccaagacaccgcctgtgacagctaaggctgcccaactgtatgccttgtgggtcagcttccaggtgctgctttactcctggcttcctgacttctgccacagatttctgccaggttatgtgggaggcgtccaagaaggtgccataactccagcagggattgtaaataagtatgaggtgaatgggctgcaagcctggctcattacccacttcctctggtttgtgaacgcttacctcctatcctggttctcccccaccatcatctttgacaactggatcccgttgctatggtgtgccaacatcctgggctacgctgtgtccacctttgcaatgatcaaggggtacctgttccccaccagcgccgaagactgcaaattcacaggcaatttcttctacaactacatgatggggattgagttcaacccccgcatcggaaagtggtttgacttcaagctgttcttcaatgggcgcccggggattgtggcctggactcttatcaacctgtcctttgctgccaagcagcaggagctttatggccatgtgaccaactccatgattttggtcaatgtcttacaggccatctatgtgttagacttcttctggaacgaaacctggtacctgaagaccattgacatctgccatgaccactttggatggtacctgggctggggagattgcgtgtggctgccctacctctacacactgcagggcctgtacttggtgtaccaccctgtacagctctccacccccaacgccttgggcgtcctgctgctcggcctggtgggttactatatcttccgaatgaccaaccatcagaaggacctgttccgccggacagatggacactgcctcatctggggcaagaaacccaaggccatcgagtgctcctacacgtcagccgacgggctgaagcaccgcagcaagctgttggtttcaggcttctggggtgtggcccgccacttcaactatacgggagacctgatgggcagcctcgcctactgcctggcttgtggcggcggccacctcctcccctacttctacatcatctatatgactatcctgcttacccaccgctgcctccgtgatgagcaccgctgtgccaacaagtatggccgtgactgggagcgctacgtagccgctgtgccctaccgcctgctgcctgggatcttctgagggccaccctggcaagcagaaagaggcgtcattgaatgtgtggagttgggtgcatgggggccagcatccggctttcccctgcaggggcctccttggtttgctcttctggaggatggagagccaggcgccccacagtgtctggctggtggcaactagagctgagttcacactgatgcctcagcagaatgactggttctccctgttcagcatcctgagggcagaggaccttggccctttcatgtctgttggaagcccaccatctatgttgtctagatagcttaggcttaccaggtgtctcccaggattgggccatcctggtaaactggagacaatgtaggatctaaagagttttggcaatgtcaccttcactcccacctgcaatggtgggctggacccctttttctgtctgtagcgtgatcagcagagggttcaggggccattgaaggaggaaggctctttgtttaggttctttactgtttttacccgaggaatgccaagcagcagactggaatatcccactctgcacatccctggctgacttgataaagtctgtctgacatatgagatggggttcccagaactccccaagtaccccagctagcagcttatccatctcccctcttccggaaggtgcttcttgtttacccctgagacttggctcagaggtgaacagacttggctctgacaacccagaatgtatcaccagttagtggcctcagccacaccttccccaacaggagaaccagcgttggggaaggaatccattctcattagtgacactgccccccaaaactcagggttattttgtaaaactagataggctcatgttagccttgcaagcggttctttgtattaaatctgccctgttaaatgag

SEQ ID NO: 266 - protein, 471 aa, Rattus norvegicus
  ref <308>: DATABASE ACCESSION NUMBER: SWISS-Prot / BAA34306
  ref <309>: DATABASE ENTRY DATE: 2003-02-01
MASKSQHNASKAKNHNVKAESQGQWGRAWEVDWFSLVSVIFLLLFAPFIVYYFIMACDQYSCSLTAPILDVATGRASLADIWAKTPPVTAKAAQLYALWVSFQVLLYSWLPDFCHRFLPGYVGGVQEGAITPAGIVNKYEVNGLQAWLITHFLWFVNAYLLSWFSPTIIFDNWIPLLWCANILGYAVSTFAMIKGYLFPTSAEDCKFTGNFFYNYMMGIEFNPRIGKWFDFKLFFNGRPGIVAWTLINLSFAAKQQELYGHVTNSMILVNVLQAIYVLDFFWNETWYLKTIDICHDHFGWYLGWGDCVWLPYLYTLQGLYLVYHPVQLSTPNALGVLLLGLVGYYIFRMTNHQKDLFRRTDGHCLIWGKKPKAIECSYTSADGLKHRSKLLVSGFWGVARHFNYTGDLMGSLAYCLACGGGHLLPYFYIIYMTILLTHRCLRDEHRCANKYGRDWERYVAAVPYRLLPGIF

SEQ ID NO: 267 - DNA, 2427 bp, Rattus norvegicus; identical to SEQ ID NO: 265
  ref <308>: DATABASE ACCESSION NUMBER: EMBL / AB016800
  ref <309>: DATABASE ENTRY DATE: 1998-11-16

SEQ ID NO: 268 - protein, 471 aa, Rattus norvegicus; identical to SEQ ID NO: 266
  ref <308>: DATABASE ACCESSION NUMBER: SWISS-Prot / BAA34306
  ref <309>: DATABASE ENTRY DATE: 2003-02-01

SEQ ID NO: 269 - DNA, 2427 bp, Rattus norvegicus; identical to SEQ ID NO: 265
  ref <308>: DATABASE ACCESSION NUMBER: EMBL / AB016800
  ref <309>: DATABASE ENTRY DATE: 1998-11-16

SEQ ID NO: 270 - protein, 471 aa, Rattus norvegicus; identical to SEQ ID NO: 266
  ref <308>: DATABASE ACCESSION NUMBER: SWISS-Prot / BAA34306
  ref <309>: DATABASE ENTRY DATE: 2003-02-01

SEQ ID NO: 271 - DNA, 2427 bp, Rattus norvegicus; identical to SEQ ID NO: 265
  ref <308>: DATABASE ACCESSION NUMBER: EMBL / AB016800
  ref <309>: DATABASE ENTRY DATE: 1998-11-16

SEQ ID NO: 272 - protein, 471 aa, Rattus norvegicus; identical to SEQ ID NO: 266
  ref <308>: DATABASE ACCESSION NUMBER: SWISS-Prot / BAA34306
  ref <309>: DATABASE ENTRY DATE: 2003-02-01

SEQ ID NO: 273 - DNA, 591 bp, Rattus norvegicus
  ref <308>: DATABASE ACCESSION NUMBER: EMBL / AB017170
  ref <309>: DATABASE ENTRY DATE: 1998-12-23
cattgcagttgagctgtaccagggccatgtccgtgttagctacgacccaggcagctaccccagctctgctatctacagtgctgaaacaatcaacgatgggcagttccacacagttgagctggtgacctttgaccagatggtgaacctctccatcgatggtggcagccccatgaccatggacaactttggaaagcactacacactcaacagtgaggcccccctctatgtgggagggatgcccgtggatgtgaactcagctgccttccgcctgtggcagatcctcaatggcaccagcttccacggttgcatccggaatctatacatcaacaacgaactgcaggacttcaccaagacacagatgaagccgggcgtggtgcccggctgcgagccctgccgaaaactctactgtctacatggcatttgccagcccaacgccaccccagggcccgtgtgccactgcgaggctggctgggggggcctgcactgtgaccagccagtggacggcccctgccatggccacaagtgtgtccatgggaaatgcgtgcccctcgatgcacttgcctacagctgccagtgccaggatgggtactc

SEQ ID NO: 274 - protein, 196 aa, Rattus norvegicus
  ref <308>: DATABASE ACCESSION NUMBER: SWISS-Prot / BAA35187
  ref <309>: DATABASE ENTRY DATE: 2003-02-01
IAVELYQGHVRVSYDPGSYPSSAIYSAETINDGQFHTVELVTFDQMVNLSIDGGSPMTMDNFGKHYTLNSEAPLYVGGMPVDVNSAAFRLWQILNGTSFHGCIRNLYINNELQDFTKTQMKPGVVPGCEPCRKLYCLHGICQPNATPGPVCHCEAGWGGLHCDQPVDGPCHGHKCVHGKCVPLDALAYSCQCQDGY

SEQ ID NO: 275 - DNA, 5094 bp, Homo sapiens
  ref <308>: DATABASE ACCESSION NUMBER: EMBL / AB017167
  ref <309>: DATABASE ENTRY DATE: 1998-12-23
gcgaaacggcagaggagccgagccccctccgcccaaggcgccctccctccgtccgcgcacaggcgccgtcgcttggaggagcaaggtgcctcccagcccgcaggggcgccgcgcgcaagcccgcgggctcttcggtggctctgccccgggactgcacctggaggcggccccggacggggatggtcagcggctgctgccgtctggctcgcgagcgggacgctgtgagggcaccatggcgctgactcccgggtgggggtcctcggcggggccggtccggccggagctctggctgctgctgtgggcagccgcgtggcgcctgggtgcctcggcgtgccccgccctctgcacctgcaccggaaccacggtggactgccacggcacggggctgcaggccattcccaagaatatacctcggaacaccgagcgcctggaactcaatggcaacaacatcactcggatccataagaatgactttgcggggctcaagcagctgcgggtgctgcagctgatggagaaccagattggagcagtggaacgtggtgcttttgatgacatgaaggagctggagcggctgcgactgaaccgaaaccagctgcacatgttaccggaactgctgttccagaacaaccaggctttgtcaagactggacttgagtgagaacgccatccaggccatccccaggaaagcttttcggggagctacggaccttaaaaatttacggctggacaagaaccagatcagctgcattgaggaaggggccttccgtgctctgcgggggctggaggtgctgaccctgaacaacaacaatatcaccaccatccccgtgtccagcttcaaccatatgcccaagctacggaccttccgcctgcactccaaccacctgttttgcgactgccacctggcctggctctcgcagtggctgaggcagcggccaaccatcgggctcttcacccagtgctcgggcccagccagcctgcgtggcctcaatgtggcagaggtccagaagagtgagttcagctgctcaggccagggagaagcggggcgcgtgcccacctgcaccctgtcctccggctcctgcccggccatgtgcacctgcagcaatggcatcgtggactgtcgtggaaaaggcctcactgccatcccggccaacctgcccgagaccatgacggagatacgcctggagctgaacggcatcaagtccatccctcctggagccttctcaccctacagaaagctacggaggatagacctgagcaacaatcagatcgctgagattgcacccgacgccttccagggcctccgctccctgaactcgctggtcctctatggaaacaagatcacagacctcccccgtggtgtgtttggaggcctatacaccctacagctcctgctcctgaatgccaacaagatcaactgcatccggcccgatgccttccaggacctgcagaacctctcactgctctccctgtatgacaacaagatccagagcctcgccaagggcactttcacctccctgcgggccatccagactctgcacctggcccagaaccctttcatttgcgactgtaacctcaagtggctggcagacttcctgcgcaccaatcccatcgagacgagtggtgcccgctgtgccagtccccggcgcctcgccaacaagcgcatcgggcagatcaagagcaagaagttccggtgctcagccaaagagcagtacttcattccaggcacggaggattaccagctgaacagcgagtgcaacagcgacgtggtctgtccccacaagtgccgctgtgaggccaacgtggtggagtgctccagcctgaagctcaccaagatccctgagcgcatcccccagtccacggcagaactgcgattgaataacaatgagatttccatcctggaggccactgggatgtttaaaaaacttacacatctgaagaaaatcaatctgagcaacaacaaggtgtcagaaattgaagatggggccttcgagggcgcagcctctgtgagcgagctgcacctaactgccaaccagctggagtccatccggagcggcatgttccggggtctggatggcttgaggaccctaatgctgcggaacaaccgcatcagctgcatccacaacgacagcttcacgggcctgcgcaacgtccggctcctctcgctctacgacaaccagatcaccaccgtatccccaggagccttcgacaccctccagtccctctccacactgaatctcctggccaaccctttcaactgcaactgccagctggcctggctaggaggctggctacggaagcgcaagatcgtgacggggaacccgcgatgccagaaccctgactttttgcggcagattcccctgcaggacgtggccttccctgacttcaggtgtgaggaaggccaggaggaggggggctgcctgccccgcccacagtgcccacaggagtgcgcctgcctggacaccgtggtccgatgcagcaacaagcacctgcgggccctgcccaagggcattcccaagaatgtcacagaactctatttggacgggaaccagttcacgctggttccgggacagctgtctaccttcaagtacctgcagctcgtggacctgagcaacaacaagatcagttccttaagcaattcctccttcaccaacatgagccagctgaccactctgatcctcagctacaatgccctgcagtgcatcccgcctttggccttccagggactccgctccctgcgcctgctgtctctccacggcaatgacatctccaccctccaagagggcatctttgcagacgtgacctccctgtctcacctggccattggtgccaaccccctatactgtgactgccacctccgctggctgtccagctgggtgaagactggctacaaggaaccgggcattgctcgttgtgctgggccccaggacatggagggcaagctgctcctcaccacgcctgccaagaagtttgaatgccaaggtcctccaacgctggctgtccaggccaagtgtgatctctgcttgtccagtccgtgccagaaccagggcacctgccacaacgacccccttgaggtgtacaggtgcgcctgccccagcggctataagggtcgagactgtgaggtgtccctgaacagctgttccagtggcccctgtgaaaatgggggcacctgccatgcacaggagggcgaggatgccccgttcacgtgctcctgtcccaccggctttgaaggaccaacctgtggggtgaacacagatgactgtgtggatcatgcctgtgccaatgggggcgtctgtgtggatggtgtgggcaactacacctgccagtgccccctgcagtatgagggaaaggcctgtgagcagctggtggacttgtgctctccggatctgaacccatgtcaacacgaggcccagtgtgtgggcaccccggatgggcccaggtgtgagtgcatgccaggttatgcaggtgacaactgcagtgagaaccaggatgactgcagggaccaccgctgccagaatggggcccagtgtatggatgaagtcaacagctactcctgcctctgtgctgagggctacagtggacagctctgtgagatccctccccatctgcctgcccccaagagcccctgtgaggggactgagtgccagaatggggccaactgtgtggaccagggcaacaggcctgtgtgccagtgcctcccaggcttcggtggccctgagtgtgagaagttgctcagtgtcaactttgtggatcgggacacttacctgcagttcactgacctgcaaaactggccacgggccaacatcacgttgcaggtctccacggcagaggacaatgggatccttctgtacaacggggacaacgaccacattgcagttgagctgtaccagggccatgtgcgtgtcagctacgacccaggcagctaccccagctctgccatctacagtgctgagacgatcaacgatgggcaattccacaccgttgagctggttgcctttgaccagatggtgaatctctccattgatggcgggagccccatgaccatggacaactttggcaaacattacacgctcaacagcgaggcgccactctatgtgggagggatgcccgtggatgtcaactcagctgccttccgcctgtggcagatcctcaacggcaccggcttccacggttgcatccgaaacctgtacatcaacaacgagctgcaggacttcaccaagacgcagatgaagccaggcgtggtgccaggctgcgaaccctgccgcaagctctactgcctgcatggcatctgccagcccaatgccaccccagggcccatgtgccactgcgaggctggctgggtgggcctgcactgtgaccagcccgctgacggcccctgccatggccacaagtgtgtccatgggcaatgcgtgcccctcgacgctctttcctacagctgccagtgccaggatgggtactcgggggcactgtgcaaccaggccggggccctggcagagccctgcagaggcctgcagtgcctgcatggccactgccaggcctcaggcaccaagggggcacactgtgtgtgtgaccccggcttttcgggcgagctgtgtgagcaagagtccgagtgccggggggaccctgtccgggactttcaccaggtccagaggggctatgccatctgccagaccacgcgccccctgtcatgggtggagtgccggggctcgtgcccaggccagggctgctgccagggccttcggctgaagcggaggaagttcacctttgagtgcagcgatgggacctcttttgccgaggaggtggaaaagcccaccaagtgtggctgtgccctctgcgcatagcgctgggcgtggacaggccggtgagggcgggcaaggggccccagccgctgcagcagcggagacagtcgccagcagctgggctggggtgcaggtcatcacaggacggctcctgggcagctgggccctcctgggtggggtggtgccagagcagccttttaaaagcaaattgcgccatagctgggggcagcgggggtgggcgaggcctgagctgcgggctgccctctccggaagtccttgcacaaataggcgcttaataa

SEQ ID NO: 276 - protein, 1534 aa, Homo sapiens
  ref <308>: DATABASE ACCESSION NUMBER: SWISS-Prot / BAA35184
  ref <309>: DATABASE ENTRY DATE: 2003-02-01
MALTPGWGSSAGPVRPELWLLLWAAAWRLGASACPALCTCTGTTVDCHGTGLQAIPKNIPRNTERLELNGNNITRIHKNDFAGLKQLRVLQLMENQIGAVERGAFDDMKELERLRLNRNQLHMLPELLFQNNQALSRLDLSENAIQAIPRKAFRGATDLKNLRLDKNQISCIEEGAFRALRGLEVLTLNNNNITTIPVSSFNHMPKLRTFRLHSNHLFCDCHLAWLSQWLRQRPTIGLFTQCSGPASLRGLNVAEVQKSEFSCSGQGEAGRVPTCTLSSGSCPAMCTCSNGIVDCRGKGLTAIPANLPETMTEIRLELNGIKSIPPGAFSPYRKLRRIDLSNNQIAEIAPDAFQGLRSLNSLVLYGNKITDLPRGVFGGLYTLQLLLLNANKINCIRPDAFQDLQNLSLLSLYDNKIQSLAKGTFTSLRAIQTLHLAQNPFICDCNLKWLADFLRTNPIETSGARCASPRRLANKRIGQIKSKKFRCSAKEQYFIPGTEDYQLNSECNSDVVCPHKCRCEANVVECSSLKLTKIPERIPQSTAELRLNNNEISILEATGMFKKLTHLKKINLSNNKVSEIEDGAFEGAASVSELHLTANQLESIRSGMFRGLDGLRTLMLRNNRISCIHNDSFTGLRNVRLLSLYDNQITTVSPGAFDTLQSLSTLNLLANPFNCNCQLAWLGGWLRKRKIVTGNPRCQNPDFLRQIPLQDVAFPDFRCEEGQEEGGCLPRPQCPQECACLDTVVRCSNKHLRALPKGIPKNVTELYLDGNQFTLVPGQLSTFKYLQLVDLSNNKISSLSNSSFTNMSQLTTLILSYNALQCIPPLAFQGLRSLRLLSLHGNDISTLQEGIFADVTSLSHLAIGANPLYCDCHLRWLSSWVKTGYKEPGIARCAGPQDMEGKLLLTTPAKKFECQGPPTLAVQAKCDLCLSSPCQNQGTCHNDPLEVYRCACPSGYKGRDCEVSLNSCSSGPCENGGTCHAQEGEDAPFTCSCPTGFEGPTCGVNTDDCVDHACANGGVCVDGVGNYTCQCPLQYEGKACEQLVDLCSPDLNPCQHEAQCVGTPDGPRCECMPGYAGDNCSENQDDCRDHRCQNGAQCMDEVNSYSCLCAEGYSGQLCEIPPHLPAPKSPCEGTECQNGANCVDQGNRPVCQCLPGFGGPECEKLLSVNFVDRDTYLQFTDLQNWPRANITLQVSTAEDNGILLYNGDNDHIAVELYQGHVRVSYDPGSYPSSAIYSAETINDGQFHTVELVAFDQMVNLSIDGGSPMTMDNFGKHYTLNSEAPLYVGGMPVDVNSAAFRLWQILNGTGFHGCIRNLYINNELQDFTKTQMKPGVVPGCEPCRKLYCLHGICQPNATPGPMCHCEAGWVGLHCDQPADGPCHGHKCVHGQCVPLDALSYSCQCQDGYSGALCNQAGALAEPCRGLQCLHGHCQASGTKGAHCVCDPGFSGELCEQESECRGDPVRDFHQVQRGYAICQTTRPLSWVECRGSCPGQGCCQGLRLKRRKFTFECSDGTSFAEEVEKPTKCGCALCA

SEQ ID NO: 277 - DNA, 1903 bp, Rattus norvegicus
  ref <308>: DATABASE ACCESSION NUMBER: EMBL / AB017544
  ref <309>: DATABASE ENTRY DATE: 1999-10-15
gtcaggcctgaggaagatggcgtcctcggagcaggcagagcagccgaaccagcccagctcttctccaggaagtgaaaatgtggtgcctcgagagcctctgattgccacagcagtgaagttcctacagaactctcgggtccggcagagcccacttgcgaccaggagagcatttcttaagaagaaagggctgacagatgaagagattgacctggctttccagcagtcgggcactgcttccgacgagccttcacccgtgggcccagctaccccggtggttcctgtccagccccctcacctcatttcacagccatacagccccggaggttcccgatggcgagattacggtgccttggccatcatcctggcaggaattgcatttggcttccaccagctctacaagaagtacctgctgcccctcatcctgggaggccgagaggaccggaagcagctggagaggatggcggcgagtctctcggaactgagtggcagtgtggcccagacagtgactcaggtacagacaacactggcctctgtccaggagctactgagacagcagcagcagaaggtccaggagctagcccatgagctggccgctgccaaggctaccacatcaaccaactggatcctggagtcccagaatatcaatgagctcaagtcagaaatcaactctctgaaaggacttcttctgaatcggagacagttccctccctccccgtcagccccgaagatcccctcctggcagatcccagtgaagtctccgtcaccctccagccccgcggccgtgaaccaccacagcagcagtgacatctcccctgtcagcaatgagtctccgtcctcctctccagggaaggacggccacagccctgagggctccacagccacataccgcctgctggggcctcaggaagagggggaaggggtgatggacgtcaagggccaggtgaggatggaggtgcaaggggaggaggagaagagggaggacgaggagggcgaggaggatgaggatgatgacgtgagccacgtggatgaagaggacgtcctcggggtacagagggaggacagacggggcggcgatgggcagatcaatgagcaggtagagaagctgcggcggccagagggcgccagcaatgagagtgagcgagactagggctggcgcttggttgcccgccttcccagtgccccagggcctcagaggcgggtgggcaagagttgtggctctgcttccatgaggggggccggaaacccaggtaggggtggggccgtccttccgtgcagtgtgggctgcgtttcttttcaccagcctcccagacaggttcccagccccagccacgggcccaggccgagaactcgggagctctgcactccagccccctccttgacgggtgtcttgtctaggtgtgtcctctgagtaccttgaccacctgacaccatgcatggccagagctcatgtcatttcctgcctctgtcacctcagtgcaggggaactatggcccccctcggtcttgctgtctcccccactgtgccctggcctggcttgtggcttcttctttgcctgttccaatagccagggtgccagccccgctcttcatctctggggctgccagccttcccacagccaggtcctggctgacagatgccgcccttgggcgcctgtccccagcccacctgcccgttgttttttataccacacgagacgtcctcgcttgctgtgtcgtggtttagctactcagtggtgaggcgtgcttctccctcctgcggtggaggaggcagcagggccttcctgaccaacagccatgtctgtccttcccactgagaaacacatgttcatttacgtgatcatgtatagatttcagactataagataagactgtacataatgtaataaatacgagttgccatattt

SEQ ID NO: 278 - protein, 376 aa, Rattus norvegicus
  ref <308>: DATABASE ACCESSION NUMBER: SWISS-Prot / BAA36835
  ref <309>: DATABASE ENTRY DATE: 2003-02-01
MASSEQAEQPNQPSSSPGSENVVPREPLIATAVKFLQNSRVRQSPLATRRAFLKKKGLTDEEIDLAFQQSGTASDEPSPVGPATPVVPVQPPHLISQPYSPGGSRWRDYGALAIILAGIAFGFHQLYKKYLLPLILGGREDRKQLERMAASLSELSGSVAQTVTQVQTTLASVQELLRQQQQKVQELAHELAAAKATTSTNWILESQNINELKSEINSLKGLLLNRRQFPPSPSAPKIPSWQIPVKSPSPSSPAAVNHHSSSDISPVSNESPSSSPGKDGHSPEGSTATYRLLGPQEEGEGVMDVKGQVRMEVQGEEEKREDEEGEEDEDDDVSHVDEEDVLGVQREDRRGGDGQINEQVEKLRRPEGASNESERD

SEQ ID NO: 279 - DNA, 1247 bp, Homo sapiens
  ref <308>: DATABASE ACCESSION NUMBER: EMBL / AF045186
  ref <309>: DATABASE ENTRY DATE: 2000-03-03
gaaagatggcgtcctcggagcaggcagagcagccgagccagccaagctctactccaggaagtgaaaatgtgctgcctcgagagccgctgattgccacggcagtgaagtttctacagaattcccgggtccgccagagcccacttgcaaccaggagagcatttctaaagaagaaagggctgacagatgaagagattgatatggccttccagcagtcgggcactgctgccgatgagccttcgtccttgggcccagccacacaggtggttcctgtccagccccctcacctcatatctcagccatacagtcccgcaggctcccgatggcgagattacggcgccctggccatcatcatggcaggcattgcatttggctttcaccagctctacaagaaatacctgctccccctcatcctgggcggccgagaggacagaaagcagctggagaggatggaggccggtctctctgagctgagtggcagcgtggcccagacagtgactcagttacagacgaccctcgcctccgtccaggagctgctgattcagcagcagcagaagatccaggagcttgcccacgagctggccgctgccaaggccaccacatccaccaactggatcctggagtcccagaatatcaacgaactcaagtccgaaattaactccttgaaagggcttcttttaaatcggaggcagttccctccatccccatcagccccgaagatcccctcctggcagatcccagtcaagtcaccgtcaccctccagccctgcggccgtgaaccaccacagcagcagcgacatctcacctgtcagcaacgagtccacgtcgtcctcgcctgggaaggagggccacagccccgagggctccacggtcacctaccacttgctgggcccccaggaggaaggcgagggggtggtggacgtcaagggccaggtgcggatggaggtgcaaggcgaggaggagaagagggaggacaaggaggacgaggaggatgaggaggatgatgatgtgagccatgtggacgaggaggactgcctgggggtgcagagggaggaccgccggggcggggatgggcagatcaacgagcaggtggagaagctgcggcggcccgagggcgccagcaacgagagtgagcgggactagggctgcgcctgctgcctccagccctgaggatggcatctagtgtgcccgtgcgtggccataccctgcctccctctctggccctgggagggcagcttggagcccaggtag

SEQ ID NO: 280 - protein, 377 aa, Homo sapiens
  ref <308>: DATABASE ACCESSION NUMBER: SWISS-Prot / O75381
  ref <309>: DATABASE ENTRY DATE: 2002-06-15
MASSEQAEQPSQPSSTPGSENVLPREPLIATAVKFLQNSRVRQSPLATRRAFLKKKGLTDEEIDMAFQQSGTAADEPSSLGPATQVVPVQPPHLISQPYSPAGSRWRDYGALAIIMAGIAFGFHQLYKKYLLPLILGGREDRKQLERMEAGLSELSGSVAQTVTQLQTTLASVQELLIQQQQKIQELAHELAAAKATTSTNWILESQNINELKSEINSLKGLLLNRRQFPPSPSAPKIPSWQIPVKSPSPSSPAAVNHHSSSDISPVSNESTSSSPGKEGHSPEGSTVTYHLLGPQEEGEGVVDVKGQVRMEVQGEEEKREDKEDEEDEEDDDVSHVDEEDCLGVQREDRRGGDGQINEQVEKLRRPEGASNESERD

SEQ ID NO: 281 - DNA, 1903 bp, Rattus norvegicus; identical to SEQ ID NO: 277
  ref <308>: DATABASE ACCESSION NUMBER: EMBL / AB017544
  ref <309>: DATABASE ENTRY DATE: 1999-10-15

SEQ ID NO: 282 - protein, 376 aa, Rattus norvegicus; identical to SEQ ID NO: 278
  ref <308>: DATABASE ACCESSION NUMBER: SWISS-Prot / BAA36835
  ref <309>: DATABASE ENTRY DATE: 2003-02-01

SEQ ID NO: 283 - DNA, 1247 bp, Homo sapiens; identical to SEQ ID NO: 279
  ref <308>: DATABASE ACCESSION NUMBER: EMBL / AF045186
  ref <309>: DATABASE ENTRY DATE: 2000-03-03

SEQ ID NO: 284 - protein, 377 aa, Homo sapiens; identical to SEQ ID NO: 280
  ref <308>: DATABASE ACCESSION NUMBER: SWISS-Prot / O75381
  ref <309>: DATABASE ENTRY DATE: 2002-06-15

SEQ ID NO: 285 - DNA, 1903 bp, Rattus norvegicus; identical to SEQ ID NO: 277
  ref <308>: DATABASE ACCESSION NUMBER: EMBL / AB017544
  ref <309>: DATABASE ENTRY DATE: 1999-10-15

SEQ ID NO: 286 - protein, 376 aa, Rattus norvegicus; identical to SEQ ID NO: 278
  ref <308>: DATABASE ACCESSION NUMBER: SWISS-Prot / BAA36835
  ref <309>: DATABASE ENTRY DATE: 2003-02-01

SEQ ID NO: 287 - DNA, 1247 bp, Homo sapiens; identical to SEQ ID NO: 279
  ref <308>: DATABASE ACCESSION NUMBER: EMBL / AF045186
  ref <309>: DATABASE ENTRY DATE: 2000-03-03

SEQ ID NO: 288 - protein, 377 aa, Homo sapiens; identical to SEQ ID NO: 280
  ref <308>: DATABASE ACCESSION NUMBER: SWISS-Prot / O75381
  ref <309>: DATABASE ENTRY DATE: 2002-06-15

SEQ ID NO: 289 - DNA, 1903 bp, Rattus norvegicus; identical to SEQ ID NO: 277
  ref <308>: DATABASE ACCESSION NUMBER: EMBL / AB017544
  ref <309>: DATABASE ENTRY DATE: 1999-10-15

SEQ ID NO: 290 - protein, 376 aa, Rattus norvegicus; identical to SEQ ID NO: 278
  ref <308>: DATABASE ACCESSION NUMBER: SWISS-Prot / BAA36835
  ref <309>: DATABASE ENTRY DATE: 2003-02-01

SEQ ID NO: 291 - DNA, 1247 bp, Homo sapiens; identical to SEQ ID NO: 279
  ref <308>: DATABASE ACCESSION NUMBER: EMBL / AF045186
  ref <309>: DATABASE ENTRY DATE: 2000-03-03

SEQ ID NO: 292 - protein, 377 aa, Homo sapiens; identical to SEQ ID NO: 280
  ref <308>: DATABASE ACCESSION NUMBER: SWISS-Prot / O75381
  ref <309>: DATABASE ENTRY DATE: 2002-06-15

SEQ ID NO: 293 - DNA, 1401 bp, Rattus norvegicus
  ref <308>: DATABASE ACCESSION NUMBER: EMBL / AB017655
  ref <309>: DATABASE ENTRY DATE: 2000-06-22
atgaataactcaacaaactcctcgaacaatggcttggctattaccagtccttacaagacatttgaagtggtatttattgtccttgtggctggatccctcagtctggtgaccatcattgggaacattctggtcatggtttccattaaagtcaaccgccaccttcagactgtcaacaattacttcttgttcagcctggcctgtgctgacctcatcataggtgttttctccatgaacttgtataccctctacactgtgattggctactggcctttgggacctgtagtatgtgacctttggctagcattggactatgttgtcagcaatgcctccgttatgaatctcctcatcatcagctttgatagatacttctgtgtcacgaaacctctgacctacccagttaagcggaccacaaaaatggcaggcatgatgattgcagctgcgtgggtcctttccttcatcctctgggccccagccattctcttctggcagttcatcgtaggggtgaggactgtggaggatggggagtgctatattcagttcttttccaatgcggccgtcaccttcggcactgccattgcagctttctatctgcctgtcatcatcatgactgtgctctattggcatatatcccgggcaagcaagagtagaataaagaaggaaaagaaggaacctgtggccaaccaagacccagtatctccgagtctggtgcaaggaagaattgtaaagccaaacaataacaatatgcctggtggtgatggcggcctggaacacaacaagatccagaatggcaaggctccacgggacggcgtgactgaaaactgtgttcagggggaggagaaagagagctccaatgattcgacgtcagtcagtgctgtggcctccaatatgagagatgatgagataacccaggatgaaaacacagtttccacttcgctgggccactccagagatgacaactctaagcaaacatgcatcaaaattgtcaccaaggcccaaaagggtgatgtgtgcaccccaacgagtaccactgtagaactagttgggtcgtcgggtcagaatggggatgaaaagcagaacattgtagcccgcaaaatcgtgaagatgaccaagcagcctgccaaaaagaagcctccaccatcccgggaaaagaaagtgaccaggacaatcttggctatcctgttggctttcatcataacgtgggcgccatacaatgtcatggtgctcatcaatactttctgtgcaccctgcatccccaatacagtatggacaattggctactggctctgttacatcaatagcaccatcaatccggcctgctatgcgctttgtaatgccaccttcaaaaagacttttaagcacctcctcatgtgtcattacaagaacataggcgctacacggtga

SEQ ID NO: 294 - protein, 466 aa, Rattus norvegicus
  ref <308>: DATABASE ACCESSION NUMBER: SWISS-Prot / P10980
  ref <309>: DATABASE ENTRY DATE: 2001-10-16
MNNSTNSSNNGLAITSPYKTFEVVFIVLVAGSLSLVTIIGNILVMVSIKVNRHLQTVNNYFLFSLACADLIIGVFSMNLYTLYTVIGYWPLGPVVCDLWLALDYVVSNASVMNLLIISFDRYFCVTKPLTYPVKRTTKMAGMMIAAAWVLSFILWAPAILFWQFIVGVRTVEDGECYIQFFSNAAVTFGTAIAAFYLPVIIMTVLYWHISRASKSRIKKEKKEPVANQDPVSPSLVQGRIVKPNNNNMPGGDGGLEHNKIQNGKAPRDGVTENCVQGEEKESSNDSTSVSAVASNMRDDEITQDENTVSTSLGHSRDDNSKQTCIKIVTKAQKGDVCTPTSTTVELVGSSGQNGDEKQNIVARKIVKMTKQPAKKKPPPSREKKVTRTILAILLAFIITWAPYNVMVLINTFCAPCIPNTVWTIGYWLCYINSTINPACYALCNATFKKTFKHLLMCHYKNIGATR

SEQ ID NO: 295 - DNA, 1401 bp, Homo sapiens
  ref <308>: DATABASE ACCESSION NUMBER: Refseq / NM_000739
  ref <309>: DATABASE ENTRY DATE: 2002-11-05
atgaataactcaacaaactcctctaacaatagcctggctcttacaagtccttataagacatttgaagtggtgtttattgtcctggtggctggatccctcagtttggtgaccattatcgggaacatcctagtcatggtttccattaaagtcaaccgccacctccagaccgtcaacaattactttttattcagcttggcctgtgctgaccttatcataggtgttttctccatgaacttgtacaccctctacactgtgattggttactggcctttgggacctgtggtgtgtgacctttggctagccctggactatgtggtcagcaatgcctcagttatgaatctgctcatcatcagctttgacaggtacttctgtgtcacaaaacctctgacctacccagtcaagcggaccacaaaaatggcaggtatgatgattgcagctgcctgggtcctctctttcatcctctgggctccagccattctcttctggcagttcattgtaggggtgagaactgtggaggatggggagtgctacattcagtttttttccaatgctgctgtcacctttggtacggctattgcagccttctatttgccagtgatcatcatgactgtgctatattggcacatatcccgagccagcaagagcaggataaagaaggacaagaaggagcctgttgccaaccaagaccccgtttctccaagtctggtacaaggaaggatagtgaagccaaacaataacaacatgcccagcagtgacgatggcctggagcacaacaaaatccagaatggcaaagcccccagggatcctgtgactgaaaactgtgttcagggagaggagaaggagagctccaatgactccacctcagtcagtgctgttgcctctaatatgagagatgatgaaataacccaggatgaaaacacagtttccacttccctgggccattccaaagatgagaactctaagcaaacatgcatcagaattggcaccaagaccccaaaaagtgactcatgtaccccaactaataccaccgtggaggtagtggggtcttcaggtcagaatggagatgaaaagcagaatattgtagcccgcaagattgtgaagatgactaagcagcctgcaaaaaagaagcctcctccttcccgggaaaagaaagtcaccaggacaatcttggctattctgttggctttcatcatcacttgggccccatacaatgtcatggtgctcattaacaccttttgtgcaccttgcatccccaacactgtgtggacaattggttactggctttgttacatcaacagcactatcaaccctgcctgctatgcactttgcaatgccaccttcaagaagacctttaaacaccttctcatgtgtcattataagaacataggcgctacaaggtaa

SEQ ID NO: 296 - protein, 466 aa, Homo sapiens
  ref <308>: DATABASE ACCESSION NUMBER: Refseq / NP_000730
  ref <309>: DATABASE ENTRY DATE: 2002-11-05
MNNSTNSSNNSLALTSPYKTFEVVFIVLVAGSLSLVTIIGNILVMVSIKVNRHLQTVNNYFLFSLACADLIIGVFSMNLYTLYTVIGYWPLGPVVCDLWLALDYVVSNASVMNLLIISFDRYFCVTKPLTYPVKRTTKMAGMMIAAAWVLSFILWAPAILFWQFIVGVRTVEDGECYIQFFSNAAVTFGTAIAAFYLPVIIMTVLYWHISRASKSRIKKDKKEPVANQDPVSPSLVQGRIVKPNNNNMPSSDDGLEHNKIQNGKAPRDPVTENCVQGEEKESSNDSTSVSAVASNMRDDEITQDENTVSTSLGHSKDENSKQTCIRIGTKTPKSDSCTPTNTTVEVVGSSGQNGDEKQNIVARKIVKMTKQPAKKKPPPSREKKVTRTILAILLAFIITWAPYNVMVLINTFCAPCIPNTVWTIGYWLCYINSTINPACYALCNATFKKTFKHLLMCHYKNIGATR

SEQ ID NO: 297 - DNA, 470 bp, Rattus norvegicus
  ref <308>: DATABASE ACCESSION NUMBER: EMBL / AB017711
  ref <309>: DATABASE ENTRY DATE: 1999-08-05
tttctctgctctgcgacccggaccggccagtaaggagaaggtatcatgtcagacaacgaagacaatttcgatggcgatgactttgatgacgtggaggaggacgaagggcttgacgacttggaaaatgctgaggaggagggtcaggaaaatgttgagattctcccatctggtgaacgaccgcaggccaaccagaagcgtatcaccactccatacatgaccaagtacgagcgagcccgagtgctgggcacccgggctctccagattgcgatgtgtgccccagtaatggtggagctggagggggagacagaccctttgctcatcgccatgaaggaactcaaggcccggaagatccccatcatcattcgccgttacctgccagatggaagctatgaggattggggcgtggatgagctcatcatcagcgactgagcagagctgtcaggctgtgccaggcaccatctctatgccca

SEQ ID NO: 298 - protein, 127 aa, Rattus norvegicus
  ref <308>: DATABASE ACCESSION NUMBER: SWISS-Prot / O88828
  ref <309>: DATABASE ENTRY DATE: 2002-06-15
MSDNEDNFDGDDFDDVEEDEGLDDLENAEEEGQENVEILPSGERPQANQKRITTPYMTKYERARVLGTRALQIAMCAPVMVELEGETDPLLIAMKELKARKIPIIIRRYLPDGSYEDWGVDELIISD

SEQ ID NO: 299 - DNA, 546 bp, Homo sapiens
  ref <308>: DATABASE ACCESSION NUMBER: Refseq / NM_021974
  ref <309>: DATABASE ENTRY DATE: 2001-07-05
gcgcgagtcgtagtgtcgctgtttgcgggtctccgcggcgggaccggggcgcagcggggtcgctgaggcgagggtgtcatgtcagacaacgaggacaattttgatggcgacgactttgatgatgtggaggaggatgaagggctagatgacttggagaatgccgaagaggaaggccaggagaatgtcgagatcctcccctctggggagcgaccgcaggccaaccagaagcgaatcaccacaccatacatgaccaagtacgagcgagcccgcgtgctgggcacccgagcgctccagattgcgatgtgtgcccctgtgatggtggagctggagggggagacagatcctctgctcattgccatgaaggaactcaaggcccgaaagatccccatcatcattcgccgttacctgccagatgggagctatgaagactggggggtggacgagctcatcatcaccgactgagctggagtcatcttcctgcccttgccccatgcccaattttcattctcactttatatgtgtaaataataaaatattcaactttcc

SEQ ID NO: 300 - protein, 127 aa, Homo sapiens
  ref <308>: DATABASE ACCESSION NUMBER: SWISS-Prot / P41584
  ref <309>: DATABASE ENTRY DATE: 2002-06-15
MSDNEDNFDGDDFDDVEEDEGLDDLENAEEEGQENVEILPSGERPQANQKRITTPYMTKYERARVLGTRALQIAMCAPVMVELEGETDPLLIAMKELKARKIPIIIRRYLPDGSYEDWGVDELIITD

SEQ ID NO: 301 - DNA, 1942 bp, Rattus norvegicus
  ref <308>: DATABASE ACCESSION NUMBER: EMBL / AB017912
  ref <309>: DATABASE ENTRY DATE: 1999-07-22
ggagcagctcgctcgcctgcagctcgcgagcgctgagcgagccgcccgaagggtagatttaccaggctgtttctgagtgtggattgttacccttggtaagaaaatgtcgtccatcttgccattcactccgccagtggtgaagagacttctgggatggaaaaaatcagccggtgggtctggaggagcaggtggtggagaacagaatggacaggaagaaaagtggtgtgaaaaagcagtgaaaagtctggtgaaaaagctaaagaaaacaggacgattagatgagcttgagaaagccatcaccactcagaattgcaatactaagtgtgtcaccataccaagcacttgctctgaaatttggggactgagtacagcaaatacggtagatcagtgggacacaacaggcctttacagcttctctgaacaaaccaggtctcttgatggtcgtcttcaggtgtctcatcggaaagggctgccacatgttatatattgccggctgtggcgctggccagaccttcacagccatcatgagctcaaggcgatcgagaactgcgaatacgctttcagtctgaaaaaagatgaagtgtgtgtgaacccttaccactaccagagggtggagacaccagtcttgcctccagtcttggtgcctcggcacacagagattctaacagaactgccgcctctggatgactatacccactccattccagaaaacacaaatttcccagcaggaattgagccacagagtaattacatcccagaaacaccaccacctggatatatcagtgaagatggagaaactagtgaccaacagttgaaccaaagtatggacacaggctctccggctgaactgtctcctaccactctctcccctgtcaatcacagcttggatttgcagccagttacttattcagaacctgcattttggtgttcaatcgcatattatgaactaaaccagagggttggagagaccttccatgcgtcacagccctcactcactgtagacggctttacagatccatcgaactcggagaggttctgcttaggtttgctctccaacgttaacagaaacgctactgtagaaatgaccagaaggcatataggaaggggagtgcgcttgtattacataggtggggaagtgtttgccgagtgcctaagtgatagtgcgatctttgtgcagagccccaactgtaaccagagatacggctggcaccccgcgacagtgtgcaaaatcccaccaggctgtaacctgaagatcttcaacaaccaagaatttgctgctcttctggctcagtctgttaaccagggttttgaggccgtttatcagctgactcgaatgtgcaccataagaatgagcttcgtgaaggggtggggagcagaataccggaggcagacagtaacaagtactccttgctggattgaacttcatctgaatggccccctgcagtggttggacaaagtattaactcagatgggatccccgtcagtgcgatgctcaagcatgtcctaaagtccgtcagcagtggagctcattggaagacttaacgtaccaactcctccgccacagtactcgtgtgtgatcccgtggactgtgctagtcaaaacccagagcgaaaacagcacttgaggtctcatcagttaaagcaccttgtggagtctgtttcctacatttgaattttagatgggaaattagtgtctagaaatgccctccccagaggggacaaagaagacttaaagacttaatgatgtttcgttgggcataagacagtgtcccaaaggttattaataccagtagtagttgtgtacagtaacgtgtccagacccagtattgcagtgctctgctgtttgtataccttcttagtgtgcataaatgaggtgtgtgctgctgcttggtctaggcaagcctttataaaattacagtacctaatctgttattcccaaaaaa

SEQ ID NO: 302 - protein, 467 aa, Rattus norvegicus
  ref <308>: DATABASE ACCESSION NUMBER: SWISS-Prot / O70436
  ref <309>: DATABASE ENTRY DATE: 2002-06-15
MSSILPFTPPVVKRLLGWKKSAGGSGGAGGGEQNGQEEKWCEKAVKSLVKKLKKTGRLDELEKAITTQNCNTKCVTIPSTCSEIWGLSTANTVDQWDTTGLYSFSEQTRSLDGRLQVSHRKGLPHVIYCRLWRWPDLHSHHELKAIENCEYAFSLKKDEVCVNPYHYQRVETPVLPPVLVPRHTEILTELPPLDDYTHSIPENTNFPAGIEPQSNYIPETPPPGYISEDGETSDQQLNQSMDTGSPAELSPTTLSPVNHSLDLQPVTYSEPAFWCSIAYYELNQRVGETFHASQPSLTVDGFTDPSNSERFCLGLLSNVNRNATVEMTRRHIGRGVRLYYIGGEVFAECLSDSAIFVQSPNCNQRYGWHPATVCKIPPGCNLKIFNNQEFAALLAQSVNQGFEAVYQLTRMCTIRMSFVKGWGAEYRRQTVTSTPCWIELHLNGPLQWLDKVLTQMGSPSVRCSSMS

SEQ ID NO: 303 - DNA, 2041 bp, Homo sapiens
  ref <308>: DATABASE ACCESSION NUMBER: EMBL / U68018
  ref <309>: DATABASE ENTRY DATE: 2000-03-04
aggttcgatacaagaggctgttttcctagcgtggcttgctgcctttggtaagaacatgtcgtccatcttgccattcacgccgccagttgtgaagagactgctgggatggaagaagtcagctggtgggtctggaggagcaggcggaggagagcagaatgggcaggaagaaaagtggtgtgagaaagcagtgaaaagtctggtgaagaagctaaagaaaacaggacgattagatgagcttgagaaagccatcaccactcaaaactgtaatactaaatgtgttaccataccaagcacttgctctgaaatttggggactgagtacaccaaatacgatagatcagtgggatacaacaggcctttacagcttctctgaacaaaccaggtctcttgatggtcgtctccaggtatcccatcgaaaaggattgccacatgttatatattgccgattatggcgctggcctgatcttcacagtcatcatgaactcaaggcaattgaaaactgcgaatatgcttttaatcttaaaaaggatgaagtatgtgtaaacccttaccactatcagagagttgagacaccagttttgcctccagtattagtgccccgacacaccgagatcctaacagaacttccgcctctggatgactatactcactccattccagaaaacactaacttcccagcaggaattgagccacagagtaattatattccagaaacgccacctcctggatatatcagtgaagatggagaaacaagtgaccaacagttgaatcaaagtatggacacaggctctccagcagaactatctcctactactctttcccctgttaatcatagcttggatttacagccagttacttactcagaacctgcattttggtgttcaatagcatattatgaattaaatcagagggttggagaaaccttccatgcatcacagccctcactcactgtagatggctttacagacccatcaaattcagagaggttctgcttaggtttactctccaatgttaaccgaaatgccacggtagaaatgacaagaaggcatataggaagaggagtgcgcttatactacataggtggggaagtttttgctgagtgcctaagtgatagtgcaatctttgtgcagagccccaattgtaatcagagatatggctggcaccctgcaacagtgtgtaaaattccaccaggctgtaatctgaagatcttcaacaaccaggaatttgctgctcttctggctcagtctgttaatcagggttttgaagccgtctatcagctaactagaatgtgcaccataagaatgagttttgtgaaagggtggggagcagaataccgaaggcagacggtaacaagtactccttgctggattgaacttcatctgaatggacctctacagtggttggacaaagtattaactcagatgggatccccttcagtgcgttgctcaagcatgtcataaagcttcaccaatcaagtcccatggaaaagacttaatgtaacaactcttctgttcattagcattgtgttgtggtccctatggctgtttactatccaaaagttcaagagagaaaacagcacttgaggtctcatcaattaaagcaccttgtggaatctgtttcctatatttgaatattagatgggaaaattagtgtctagaaatactctcccattaaagaggaagagaagattttaaagacttaatgatgtcttattgggcataaaactgagtgtcccaaaggtttattaataacagtagtagttatgtgtacaggtaatgtatcatgatccagtatcacagtattgtgctgtttatatacatttttagtttgcatagatgaggtgtgtgtgtgcgctgcttcttgatctaggcaaacctttataaagttgcagtacctaatctgttattcccacttctctgttatttttgtgtgtcttttttaatatataatatatatcaagattttcaaattatttagaagcagattttcctgtagaaaaactaatttttctgccttttaccaaaaataaactcttggggaag

SEQ ID NO: 304 - protein, 467 aa, Homo sapiens
  ref <308>: DATABASE ACCESSION NUMBER: SWISS-Prot / Q15796
  ref <309>: DATABASE ENTRY DATE: 2002-06-15
MSSILPFTPPVVKRLLGWKKSAGGSGGAGGGEQNGQEEKWCEKAVKSLVKKLKKTGRLDELEKAITTQNCNTKCVTIPSTCSEIWGLSTPNTIDQWDTTGLYSFSEQTRSLDGRLQVSHRKGLPHVIYCRLWRWPDLHSHHELKAIENCEYAFNLKKDEVCVNPYHYQRVETPVLPPVLVPRHTEILTELPPLDDYTHSIPENTNFPAGIEPQSNYIPETPPPGYISEDGETSDQQLNQSMDTGSPAELSPTTLSPVNHSLDLQPVTYSEPAFWCSIAYYELNQRVGETFHASQPSLTVDGFTDPSNSERFCLGLLSNVNRNATVEMTRRHIGRGVRLYYIGGEVFAECLSDSAIFVQSPNCNQRYGWHPATVCKIPPGCNLKIFNNQEFAALLAQSVNQGFEAVYQLTRMCTIRMSFVKGWGAEYRRQTVTSTPCWIELHLNGPLQWLDKVLTQMGSPSVRCSSMS

SEQ ID NO: 305 - DNA, 1942 bp, Rattus norvegicus; identical to SEQ ID NO: 301
  ref <308>: DATABASE ACCESSION NUMBER: EMBL / AB017912
  ref <309>: DATABASE ENTRY DATE: 1999-07-22

SEQ ID NO: 306 - protein, 467 aa, Rattus norvegicus; identical to SEQ ID NO: 302
  ref <308>: DATABASE ACCESSION NUMBER: SWISS-Prot / O70436
  ref <309>: DATABASE ENTRY DATE: 2002-06-15

SEQ ID NO: 307 - DNA, 2041 bp, Homo sapiens; identical to SEQ ID NO: 303
  ref <308>: DATABASE ACCESSION NUMBER: EMBL / U68018
  ref <309>: DATABASE ENTRY DATE: 2000-03-04

SEQ ID NO: 308 - protein, 467 aa, Homo sapiens; identical to SEQ ID NO: 304
  ref <308>: DATABASE ACCESSION NUMBER: SWISS-Prot / Q15796
  ref <309>: DATABASE ENTRY DATE: 2002-06-15

SEQ ID NO: 309 - DNA, 1942 bp, Rattus norvegicus; identical to SEQ ID NO: 301
  ref <308>: DATABASE ACCESSION NUMBER: EMBL / AB017912
  ref <309>: DATABASE ENTRY DATE: 1999-07-22

SEQ ID NO: 310 - protein, 467 aa, Rattus norvegicus; identical to SEQ ID NO: 302
  ref <308>: DATABASE ACCESSION NUMBER: SWISS-Prot / O70436
  ref <309>: DATABASE ENTRY DATE: 2002-06-15

SEQ ID NO: 311 - DNA, 2041 bp, Homo sapiens; identical to SEQ ID NO: 303
  ref <308>: DATABASE ACCESSION NUMBER: EMBL / U68018
  ref <309>: DATABASE ENTRY DATE: 2000-03-04

SEQ ID NO: 312 - protein, 467 aa, Homo sapiens; identical to SEQ ID NO: 304
  ref <308>: DATABASE ACCESSION NUMBER: SWISS-Prot / Q15796
  ref <309>: DATABASE ENTRY DATE: 2002-06-15

SEQ ID NO: 313 - DNA, 1942 bp, Rattus norvegicus; identical to SEQ ID NO: 301
  ref <308>: DATABASE ACCESSION NUMBER: EMBL / AB017912
  ref <309>: DATABASE ENTRY DATE: 1999-07-22

SEQ ID NO: 314 - protein, 467 aa, Rattus norvegicus; identical to SEQ ID NO: 302
  ref <308>: DATABASE ACCESSION NUMBER: SWISS-Prot / O70436
  ref <309>: DATABASE ENTRY DATE: 2002-06-15

SEQ ID NO: 315 - DNA, 2041 bp, Homo sapiens; identical to SEQ ID NO: 303
  ref <308>: DATABASE ACCESSION NUMBER: EMBL / U68018
  ref <309>: DATABASE ENTRY DATE: 2000-03-04

SEQ ID NO: 316 - protein, 467 aa, Homo sapiens; identical to SEQ ID NO: 304
  ref <308>: DATABASE ACCESSION NUMBER: SWISS-Prot / Q15796
  ref <309>: DATABASE ENTRY DATE: 2002-06-15

SEQ ID NO: 317 - DNA, 2044 bp, Rattus norvegicus
  misc_feature (1)..(2044): n=a, c, g or t
  ref <308>: DATABASE ACCESSION NUMBER: EMBL / AB019393
  ref <309>: DATABASE ENTRY DATE: 2001-11-30
ctgagcagggccacccatccagacaccttgcagcagagccttctagaagaagcctcacccagccttcataccgatgccctcctgtgcacgctgctgcagctgcggtcccaagatgccagctctccagctgctgtttctggcctgcctggtatggggaatgggggccaggacagcacagttccgaaaggccaacgatcggagtggtcgatgccagtacaccttcactgtggccagccccagtgaatctagctgcccaagggaggaccaggccatgtcagccatccaggaccttcagagagatagcagcatccagcatgcagacctagagtccaccaaggcccgggtcagatccctggagagtctcctccaccagatgacctcaggcggagttactgggacccaggaggtccaggaggggctacaaggccagctgggtgccctgaggagagagcgggaccagctggagacccaaaccagggatctggaggtagcctataacaatctcctgagagacaaatcagctttggaggaagagaagaggcagctggaacaagagaataaagatttggccaggaggctagaaggcagcagccaggaggtagcaaggctgaggagaggccagtgtccctcaacccaccacccctctcaggacatgttgccaggctccagggaagtctctcagtggaatttggacacgttggctttccaggaactgaagtcagaactaacagaggttcctgcttcccaaatcttgaagaatcaatctggtcatcccaggagcaaagagggagacaaaggatgtggagtgctaatgtgggtaggagagccagtcaccctgaggacagctgagacaatcactggaaagtatggagtatggatgagagaccccaagcccactcacccctacacccaggagaccacttggaggattgacacggttggcacaggcatccgccaggtgtttgagtacagtcagataagccagttcgagcagggctatccttcaaaggtccatgtgctcccccaggcactggaaagcacaggtgctgtggtgtatgcagggagcctgtatttccagggtgctgagtccagaactgtgctcaggtatgaactgaacacagaaacagtgaaggcagagaaggaaattcctggagctggctaccatggacagttcccatacgcatggggtggctacacagacatcgacttagctgtggatgagagcggcctctgggtcatctatagcacagaggaaaccagaggagccatagtcctctccaaattgaacccagagaacctggaacttgagagtacctgggagaccaacatccgtaagcagtctgtggctaatgcctttgttatctgtggcatcttgtacacggtgagcagctactcttcagtccatgcaaccatcaactttgcctatgacactaacactgggatcagcaagaccctgaccatcccattcaagaatcgctacaaatacagcagcatggtcgactacaaccccctggagaggaaactctttgcctgggacaacttcaacatggtcacctatgatatcaagctctcagagatgtgaggagcctctatccctaccagagaaggcagaaaaagggggaagttccaggctcccaggtgaagcagctgcaanaggaggcagccagatgctgggggcttctgcttctcaagattttgtttgtccaggtcaatacctcggggcttgtacagttgcatatattctgctctcttctgtcagctttcaaaggggtgttcatcttttaaaaatcatatagtgtagcagtccagagaaaaactagaagtgttgtttcctcatgaaaccattgcttttgcaagctgtatggttactacaaaccttgagaggcagcaacagttctaccaagaggagggagataacggggagggggtgaccaccactcctgtggttagaactgctcctgcagtatttactccagtttctaaggctacagatatagcatgtacattaaaccctttgccctgtgaaataaagttatcttacacg

SEQ ID NO: 318 - protein, 502 aa, Rattus norvegicus
  ref <308>: DATABASE ACCESSION NUMBER: SWISS-Prot / Q9R1J4
  ref <309>: DATABASE ENTRY DATE: 2001-10-16
MPSCAYCCSCGPKMPALQLLFLACLVWGMGARTAQFRKANDRSGRCQYTFTVASPSESSCPREDQAMSAIQDLQRDSSIQHADLESTKARVRSLESLLHQMTSGGVTGTQEVQEGLQGQLGALRRERDQLETQTRDLEVAYNNLLRDKSALEEEKRQLEQENKDLARRLEGSSQEVARLRRGQCPSTHHPSQDMLPGSREVSQWNLDTLAFQELKSELTEVPASQILKNQSGHPRSKEGDKGCGVLMWVGEPVTLRTAETITGKYGVWMRDPKPTHPYTQETTWRIDTVGTGIRQVFEYSQISQFEQGYPSKVHVLPQALESTGAVVYSGSLYFQGAESRTVLRYELNTETVKAEKEIPGAGYHGQFPYAWGGYTDIDLAVDESGLWVIYSTEETRGAIVLSKLNPENLELESTWETNIRKQSVANAFVICGILYTVSSYSSVHATINFAYDTNTGISKTLTIPFKNRYKYSSMVDYNPLERKLFAWDNFNMVTYDIKLSEM

SEQ ID NO: 319 - DNA, 2000 bp, Homo sapiens
  ref <308>: DATABASE ACCESSION NUMBER: EMBL / U85257
  ref <309>: DATABASE ENTRY DATE: 2000-03-04
agagctttccagaggaagcctcaccaagcctctgcaatgaggttcttctgtgcacgttgctgcagctttgggcctgagatgccagctgtccagctgctgcttctggcctgcctggtgtgggatgtgggggccaggacagctcagctcaggaaggccaatgaccagagtggccgatgccagtataccttcagtgtggccagtcccaatgaatccagctgcccagagcagagccaggccatgtcagtcatccataacttacagagagacagcagcacccaacgcttagacctggaggccaccaaagctcgactcagctccctggagagcctcctccaccaattgaccttggaccaggctgccaggccccaggagacccaggaggggctgcagagggagctgggcaccctgaggcgggagcgggaccagctggaaacccaaaccagagagttggagactgcctacagcaacctcctccgagacaagtcagttctggaggaagagaagaagcgactaaggcaagaaaatgagaatctggccaggaggttggaaagcagcagccaggaggtagcaaggctgagaaggggccagtgtccccagacccgagacactgctcgggctgtgccaccaggctccagagaagtttctacgtggaatttggacactttggccttccaggaactgaagtccgagctaactgaagttcctgcttcccgaattttgaaggagagcccatctggctatctcaggagtggagagggagacaccggatgtggagaactagtttgggtaggagagcctctcacgctgagaacagcagaaacaattactggcaagtatggtgtgtggatgcgagaccccaagcccacctacccctacacccaggagaccacgtggagaatcgacacagttggcacggatgtccgccaggtttttgagtatgacctcatcagccagtttatgcagggctacccttctaaggttcacatactgcctaggccactggaaagcacgggtgctgtggtgtactcggggagcctctatttccagggcgctgagtccagaactgtcataagatatgagctgaataccgagacagtgaaggctgagaaggaaatccctggagctggctaccacggacagttcccgtattcttggggtggctacacggacattgacttggctgtggatgaagcaggcctctgggtcatttacagcaccgatgaggccaaaggtgccattgtcctctccaaactgaacccagagaatctggaactcgaacaaacctgggagacaaacatccgtaagcagtcagtcgccaatgccttcatcatctgtggcaccttgtacaccgtcagcagctacacctcagcagatgctaccgtcaactttgcttatgacacaggcacaggtatcagcaagaccctgaccatcccattcaagaaccgctataagtacagcagcatgattgactacaaccccctggagaagaagctctttgcctgggacaacttgaacatggtcacttatgacatcaagctctccaagatgtgaaaagcctccaagctgtacaggcaatggcagaaggagatgctcagggctcctggggggagcaggctgaagggagagccagccagccagggcccaggcagctttgactgctttccaagttttcattaatccagaaggatgaacatggtcaccatctaactattcaggaattgtagtctgagggcgtagacaatttcatataataaatatcctttatcttctgtcagcatttatgggatgtttaatgacatagttcaagttttcttgtgatttggggcaaaagctgtaaggcataatagtttcttcctgaaaaaccattgctcttgcatgttacatggttaccacaagccacaataaaaagcataacttctaaaggaagcagaatagctcctctggccagcatcgaatataagtaagatgcatttactacagttggcttctaatgcttcaga

SEQ ID NO: 320 - protein, 504 aa, Homo sapiens
  ref <308>: DATABASE ACCESSION NUMBER: SWISS-Prot / Q99972
  ref <309>: DATABASE ENTRY DATE: 2001-10-16
MRFFCARCCSFGPEMPAVQLLLLACLVWDVGARTAQLRKANDQSGRCQYTFSVASPNESSCPEQSQAMSVIHNLQRDSSTQRLDLEATKARLSSLESLLHQLTLDQAARPQETQEGLQRELGTLRRERDQLETQTRELETAYSNLLRDKSVLEEEKKRLRQENENLARRLESSSQEVARLRRGQCPQTRDTARAVPPGSREVSTWNLDTLAFQELKSELTEVPASRILKESPSGYLRSGEGDTGCGELVWVGEPLTLRTAETITGKYGVWMRDPKPTYPYTQETTWRIDTVGTDVRQVFEYDLISQFMQGYPSKVHILPRPLESTGAVVYSGSLYFQGAESRTVIRYELNTETVKAEKEIPGAGYHGQFPYSWGGYTDIDLAVDEAGLWVIYSTDEAKGAIVLSKLNPENLELEQTWETNIRKQSVANAFIICGTLYTVSSYTSADATVNFAYDTGTGISKTLTIPFKNRYKYSSMIDYNPLEKKLFAWDNLNMVTYDIKLSKM

SEQ ID NO: 321 - DNA, 853 bp, Rattus norvegicus
  ref <308>: DATABASE ACCESSION NUMBER: EMBL / AB020504
  ref <309>: DATABASE ENTRY DATE: 1998-12-04
ggccacgcgtcgactagtacggggggggggggggaatgaggcggaccatctgaccccgctcgctcgctccacgcgctggcacgggagcgacagccaactgcagagcgaattcctctcacgccagtcactcagagcaatgaaactgtaacagttgttttcccaaatactgtacgatggtacgactgaccagcaacttccttttgttttgtattatatatatctttaaaatatcttgtcagttttactatgtatgttcatccattcaccaaagccctcaaaaagaagtttctccacagaacaggcacctcaggctctgtcccaaggaatgtgttttaatttttgcccggataaaagaaaataagctttgcacacactctcgattctttatttgcaggcaaacttcactctttattatctgaaacttttccattctcagcctcttagaggcacagatggctcaagtttcagtggcaaaaaagtctttttttttttttctttctgtaaccaaactagagcaaatttggaattcagtctgggactaaaacgtcacagcagaaaaaaaatgaaaaaaaaataatttgctttttctttctttcatttagcagcataaataagtttggccactgggagtacagtacaggggttgggacaacgatcccgtatttgaagacctacttctagcaccagcatcaagaactaaatccacctcaggactcacagaacccaggacaacttgccatctttgagcaacatatgcattgaagagtgtatatagaagcaacagtaaatagattaacagaggctaatactgtgattgattgacattggcaatggttggcaaaaaaaaaaaaaa

SEQ ID NO: 322 - protein, 81 aa, Rattus norvegicus
  ref <308>: DATABASE ACCESSION NUMBER: SWISS-Prot / BAA34715
  ref <309>: DATABASE ENTRY DATE: 2001-12-01
MVRLTSNFLLFCIIYIFKISCQFYYVCSSIHQSPQKEVSPQNRHLRLCPKECVLIFARIKENKLCTHSRFFICRQTSLFII

SEQ ID NO: 323 - DNA, 3571 bp, Homo sapiens
  misc_feature (1)..(3571): n=a, c, g or t
  ref <308>: DATABASE ACCESSION NUMBER: EMBL / AY008274
  ref <309>: DATABASE ENTRY DATE: 2002-10-05
ctcagcaggtcaggacatttggtaggggaaggttgaaagacaaaagcagcaggccttgggttctcagccttttaaaaactattattaaatatatatttttaaaatttagtggttagagcttttagtaatgtgcctgtattacatgtagagagtattcgtcaaccaagaggagttttaaaatgtcaaaaccgggaaaacctactctaaaccatggcttggttcctgttgatcttaaaagtgcaaaagagcctctaccacatcaaaccgtgatgaagatatttagcattagcatcattgcccaaggcctccctttttgtcgaagacggatgaaaagaaagttggaccatggttctgaggtccgctctttttctttgggaaagaaaccatgcaaagtctcagaatatacaagtaccactgggcttgtaccatgttcagcaacaccaacaacttttggggacctcagagcagccaatggccaagggcaacaacgacgccgaattacatctgtccagccacctacaggcctccaggaatggctaaaaatgtttcagagctggagtggaccagagaaattgcttgctttagatgaactcattgatagttgtgaaccaacacaagtaaaacatatgatgcaagtgatagaaccccagtttcaacgagacttcatttcattgctccctaaagagttggcactctatgtgctttcattcctggaacccaaagacctgctacaagcagctcagacatgtcgctactggagaattttggctgaagacaaccttctctggagagagaaatgcaaagaagaggggattgatgaaccattgcacatcaagagaagaaaagtaataaaaccaggtttcatacacagtccatggaaaagtgcatacatcagacagcacagaattgatactaactggaggcgaggagaactcaaatctcctaaggtgctgaaaggacatgatgatcatgtgatcacatgcttacagttttgtggtaaccgaatagttagtggttctgatgacaacactttaaaagtttggtcagcagtcacaggcaaatgtctgagaacattagtgggacatacaggtggagtatggtcatcacaaatgagagacaacatcatcattagtggatctacagatcggacactcaaagtgtggaatgcagagactggagaatgtatacacaccttatatgggcatacttccactgtgcgttgtatgcatcttcatgaaaaaagagttgttagcggttctcgagatgccactcttagggtttgggatattgagacaggccagtgtttacatgttttgatgggtcatgttgcagcagtccgctgtgttcaatatgatggcaggagggttgttagtggagcatatgattttatggtaaaggtgtgggatccagagactgaaacctgtctacacacgttgcaggggcatactaatagagtctattcattacagtttgatggtatccatgtggtgagtggatctcttgatacatcaatccgtgtttgggatgtggagacagggaattgcattcacacgttaacagggcaccagtcgttaacaagtggaatggaactcaaagacaatattcttgtctctgggaatgcagattctacagttaaaatctgggatatcaaaacaggacagtgtttacaaacattgcaaggtcccaacaagcatcagagtgctgtgacctgtttacagttcaacaagaactttgtaattaccagctcagatgatggaactgtaaaactatgggacttgaaaacgggtgaatttattcgaaacctagtcacattggagagtggggggagtgggggagttgtgtggcggatcagagcctcaaacacaaagctggtgtgtgcagttgggagtcggaatgggactgaagaaaccaagctgctggtgctggactttgatgtggacatgaagtgaagagcagaaaagatgaatttgtccaattgtgtagacgatatactccctgcccttccccctgcaaaaagaaaaaaagaaaagaaaaagaaaaaaatcccttgttctcagtggtgcaggatgttggcttggggcaacagattgaaaagacctacagactaagaaggaaaagaagaagagatgacaaaccataactgacaagagaggcgtctgctgtctcatcacataaaaggcttcacttttgactgagggcagctttgcaaaatgagactttctaaatcaaaccaggtgcaattatttctttattttcttctccagtggtcattggggcagtgttaatgctgaaacatcattacagattctgctagcctgttcttttaccactgacagctagacacctagaaaggaactgcaataatatcaaaacaagtactggttgactttctaattagagagcatctgcaacaaaaagtcatttttctggagtggaaaagcttaaaaaaattactgtgaattgtttttgtacagttatcatgaaaagcttttttttttattttttngccaaccattgccaatgtcaatcaatcacagtattagcctctgttaatctatttactgttgcttccatatacattcttcaatgcatatgttgctcaaaggtggcaagttgtcctgggttctgtgagtcctgagatggatttaattcttgatgctggtgctagaagtaggtcttcaaatatgggattgttgtcccaaccctgtactgtactcccagtggccaaacttatttatgctgctaaatgaaagaaagaaaaaagcaaattattttttttattttttttctgctgtgacgttttagtcccagactgaattccaaatttgctctagtttggttatggaaaaaagactttttgccactgaaacttgagccatctgtgcctctaagaggctgagaatggaagagtttcagataataaagagtgaagtttgcctgcaagtaaagaattgagagtgtgtgcaaagcttattttcttttatctgggcaaaaattaaaacacattccttggaacagagctattacttgcctgttctgtggagaaacttttctttttgagggctgtggtgaatggatgaacgtacatcgtaaaactgacaaaatattttaaaaatatataaaacacaaaattaaaataaagttgctggtcagtcttagtgttttacagtatttgggaaaacaactgttacagttttattgctctgagtaactgacaaagcagaaactattcagtttttgtagtaaaggcgtcacatgcaaacaaacaaaatgaatgaaacagtcaaatggtttgcctcattctccaagagccacaactcaagctgaactgtgaaagtggtttaacactgtatcctaggcgatcttttttcctccttctgtttatttttttgnttgttttatttatagtctgatttaaaacaatcagattcaagttggttaattttagttatgtaacaacctgacatgatggaggaaaacaacctttaaagggattgtgtctatggtttgattcacttagaaattttattttcttataacttaagtgcaataaaatgtgttttttcatgtt

SEQ ID NO: 324 - protein, 590 aa, Homo sapiens
  misc_feature (1)..(590): Xaa=Unknown amino acid
MSKPGKPTLNHGLVPVDLKSAKEPLPHQTVMKIFSISIIAQGLPFCRRRMKRKLDHGSEVRSFSLGKKPCKVSEYTSTTGLVPCSATPTTFGDLRAANGQGQQRRRITSVQPPTGLQEWLKMFQSWSGPEKLLALDELIDSCEPTQVKHMMQVIEPQFQRDFISLLPKELALYVLSFLEPKDLLQAAQTCRYWRILAEDNLLWREKCKEEGIDEPLHIKRRKVIKPGFIHSPWKSAYIRQHRIDTNWRRGELKSPKVLKGHDDHVITCLQFCGNRIVSGSDDNTLKVWSAVTGKCLRTLVGHTGGVWSSQMRDNIIISGSTDRTLKVWNAETGECIHTLYGHTSTVRCMHLHEKRVVSGSRDATLRVWDIETGQCLHVLMGHVAAVRCVQYDGRRVVSGAYDFMVKVWDPETETCLHTLQGHTNRVYSLQFDGIHVVSGSLDTSIRVWDVETGNCIHTLTGHQSLTSGMELKDNILVSGNADSTVKIWDIKTGQCLQTLQGPNKHQSAVTCLQFNKNFVITSSDDGTVKLWDLKTGEFIRNLVTLESGGSGGVVWRIRASNTKLVCAVGSRNGTEETKLLVLDFDVDMKX

SEQ ID NO: 325 - DNA, 853 bp, Rattus norvegicus; identical to SEQ ID NO: 321
  ref <308>: DATABASE ACCESSION NUMBER: EMBL / AB020504
  ref <309>: DATABASE ENTRY DATE: 1998-12-04

SEQ ID NO: 326 - protein, 81 aa, Rattus norvegicus; identical to SEQ ID NO: 322
  ref <308>: DATABASE ACCESSION NUMBER: SWISS-Prot / BAA34715
  ref <309>: DATABASE ENTRY DATE: 2001-12-01

SEQ ID NO: 327 - DNA, 3571 bp, Homo sapiens; identical to SEQ ID NO: 323
  misc_feature (1)..(3571): n=a, c, g or t
  ref <308>: DATABASE ACCESSION NUMBER: EMBL / AY008274
  ref <309>: DATABASE ENTRY DATE: 2002-10-05

SEQ ID NO: 328 - protein, 590 aa, Homo sapiens; identical to SEQ ID NO: 324
  misc_feature (1)..(590): Xaa=Unknown amino acid

SEQ ID NO: 329 - DNA, 853 bp, Rattus norvegicus; identical to SEQ ID NO: 321
  ref <308>: DATABASE ACCESSION NUMBER: EMBL / AB020504
  ref <309>: DATABASE ENTRY DATE: 1998-12-04

SEQ ID NO: 330 - protein, 81 aa, Rattus norvegicus; identical to SEQ ID NO: 322
  ref <308>: DATABASE ACCESSION NUMBER: SWISS-Prot / BAA34715
  ref <309>: DATABASE ENTRY DATE: 2001-12-01

SEQ ID NO: 331 - DNA, 3571 bp, Homo sapiens; identical to SEQ ID NO: 323
  misc_feature (1)..(3571): n=a, c, g or t
  ref <308>: DATABASE ACCESSION NUMBER: EMBL / AY008274
  ref <309>: DATABASE ENTRY DATE: 2002-10-05

SEQ ID NO: 332 - protein, 590 aa, Homo sapiens; identical to SEQ ID NO: 324
  misc_feature (1)..(590): Xaa=Unknown amino acid

SEQ ID NO: 333 - DNA, 853 bp, Rattus norvegicus; identical to SEQ ID NO: 321
  ref <308>: DATABASE ACCESSION NUMBER: EMBL / AB020504
  ref <309>: DATABASE ENTRY DATE: 1998-12-04

SEQ ID NO: 334 - protein, 81 aa, Rattus norvegicus; identical to SEQ ID NO: 322
  ref <308>: DATABASE ACCESSION NUMBER: SWISS-Prot / BAA34715
  ref <309>: DATABASE ENTRY DATE: 2001-12-01

SEQ ID NO: 335 - DNA, 3571 bp, Homo sapiens; identical to SEQ ID NO: 323
  misc_feature (1)..(3571): n=a, c, g or t
  ref <308>: DATABASE ACCESSION NUMBER: EMBL / AY008274
  ref <309>: DATABASE ENTRY DATE: 2002-10-05

SEQ ID NO: 336 - protein, 590 aa, Homo sapiens; identical to SEQ ID NO: 324
  misc_feature (1)..(590): Xaa=Unknown amino acid

SEQ ID NO: 337 - DNA, 696 bp, Rattus norvegicus
  ref <308>: DATABASE ACCESSION NUMBER: EMBL / AB022014
  ref <309>: DATABASE ENTRY DATE: 1999-01-11
atggaggggtgtgtgtctaacctaatggtctgtaacctggcctacaacgggaagctggatgagttgaaggaaagcattttggctgataagtctctggccactagaactgatcaggacagcagaacagcattgcactgggcatgctcagctggtcatacagaaattgttgaattcttgctgcaacttggagtgccagtaaatgaaaaagacgatgcaggttggtctcctcttcatattgctgcttccgctggccgggatgagattgtaaaagcccttctgataaaaggggcacaagtgaatgccgtcaatcagaatggctgcacggcccttcattatgcagcttccaagaataggcatgagattgctgttatgttactagaaggtggggctaatccagatgctaagaaccattatgatgctacagcaatgcaccgggcagcagccaagggtaacttgaagatggttcatatccttctgttctacaaagcatccacaaacatccaagatactgagggtaacactcctctacacttagcctgtgatgaggagagagtggaagaagcaaaattgctggtgacccaaggagcaagtatttacattgaaaataaggaagaaaagacaccgctgcaagtcgccaaagggggcctgggtttaatactcaaaagaatcgcagaaagtgaagaggcttctatgtag

SEQ ID NO: 338 - protein, 231 aa, Rattus norvegicus
  ref <308>: DATABASE ACCESSION NUMBER: SWISS-Prot / Q9Z2X3
  ref <309>: DATABASE ENTRY DATE: 2002-06-15
MEGCVSNLMVCNLAYNGKLDELKESILADKSLATRTDQDSRTALHWACSAGHTEIVEFLLQLGVPVNEKDDAGWSPLHIAASAGRDEIVKALLIKGAQVNAVNQNGCTALHYAASKNRHEIAVMLLEGGANPDAKNHYDATAMHRAAAKGNLKMVHILLFYKASTNIQDTEGNTPLHLACDEERVEEAKLLVTQGASIYIENKEEKTPLQVAKGGLGLILKRIAESEEASM

SEQ ID NO: 339 - DNA, 1468 bp, Homo sapiens
  ref <308>: DATABASE ACCESSION NUMBER: EMBL / AB009619
  ref <309>: DATABASE ENTRY DATE: 2001-07-31
aagtagttgctgggacagcgaaatggaggggtgtgtgtctaacctaatggtctgcaacctggcctacagcgggaagctggaagagttgaaggagagtattctggccgataaatccctggctactagaactgaccaggacagcagaactgcattgcactgggcatgctcagctggacatacagaaattgttgaatttttgttgcaacttggagtgccagtgaatgataaagacgatgcaggttggtctcctcttcatattgcggcttctgctggccgggatgagattgtaaaagcccttctgggaaaaggtgctcaagtgaatgctgtcaatcaaaatggctgtactcccttacattatgcagcttcgaaaaacaggcatgagatcgctgtcatgttactggaaggcggggctaatccagatgctaaggaccattatgaggctacagcaatgcaccgggcagcagccaagggtaacttgaagatgattcatatccttctgtactacaaagcatccacaaacatccaagacactgagggtaacactcctctacacttagcctgtgatgaggagagagtggaagaagcaaaactgctggtgtcccaaggagcaagtatttacattgagaataaagaagaaaagacacccctgcaagtggccaaaggtggcctgggtttaatactcaagagaatggtggaaggttaaacagcttggatttattcttactttgtatgttgtgttgttgtccccagtgtcctacaaactaatgtatttgtgcacaagacatcatctatgaatgatgaagttttctcaccttcaaagtcttataaacatgttgactcttgttcctgctgagttacttgttcgaagcttacagcttgttttccaggcatcgaataactgttgagattgttctactgttgtcgtatattcttctatattgaattctggttaatttggagtaactaattctgtggctgttgtgagtcttcagcaccctcccatgtaccttatatccctctctgaaacagaacagctccaatagcaacaagctagttgttctgccagatgtttctatgtggattctgtaatgttcctccatacagttaaaacatcctaacttgtttttcaagctcactcaggcctacgccaaacgtttctgttttttttaaccatgaggtttaatttatttttgtgataggagggatatttacatattttagtggaccacattttaagttggatggtgtgctctaaaatactgaaaaacaatagcccatatacctatgtatttgtttttgatgggttgtttactctgaaataaaatgtatggttttcttaaaaggaagttttaaagtacctattttgtgtcatcctgtattgaaaagaatgtcaagcttgttaaaatgacatgtaacaaaaatgtattttgatttgtatttcagaaactaaaaaataaaatgttgaaag

SEQ ID NO: 340 - protein, 226 aa, Homo sapiens
  ref <308>: DATABASE ACCESSION NUMBER: SWISS-Prot / O75832
  ref <309>: DATABASE ENTRY DATE: 2002-06-15
MEGCVSNLMVCNLAYSGKLEELKESILADKSLATRTDQDSRTALHWACSAGHTEIVEFLLQLGVPVNDKDDAGWSPLHIAASAGRDEIVKALLGKGAQVNAVNQNGCTPLHYAASKNRHEIAVMLLEGGANPDAKDHYEATAMHRAAAKGNLKMIHILLYYKASTNIQDTEGNTPLHLACDEERVEEAKLLVSQGASIYIENKEEKTPLQVAKGGLGLILKRMVEG

SEQ ID NO: 341 - DNA, 5350 bp, Rattus norvegicus
  misc_feature (1)..(5350): n=a, c, g or t
  ref <308>: DATABASE ACCESSION NUMBER: EMBL / AF000114
  ref <309>: DATABASE ENTRY DATE: 2000-03-03
gggtaggagaaagggaagggtgggtaaggacggaaaaagcagcatcggtcagccgcgaaccccaggagaaaanntgggggcctgagccagaaccggagccctagcggcacaagncagacacccagggttggtcanctccgcatgatgagtctccggcttttcagcattctgctcgccgctgtggtctctggagcccagggctggggctactatggctgcaatgaggagctggtggggcctctgtatgcacggtctctgggtgcttcctcctactatggactctttaccacagcccgctttgcccggctacacggcatcagtggatggtcgccccggattggggacccgaatccctggctccagatagacttaatgaagaagcatcgaatccgggctgtggccacacagggagcctttaattcttgggattgggtcacacgttacatgctgctctacggggaccgtgtggacagctggacaccattctaccaacaagggcacaacgcgaccttcttcggtaatgtcaacgactcggcggtggtacgccatgacctgcactaccattttacggctcgctacatccgcatcgtgccactggcctggaacccccgcggcaagattggcttgaggctgggcatctacggttgtccctacacgtccaacatcctgtattttgacggcgatgatgccatttcataccgcttccagcgaggggccagtcaaagtctttgggacgtgttcgcttttagtttcaagacagaggagaaggacgggctgctgttgcacaccgaaggctcccagggggattatgtgacgcttgaactgcaaggagcacacctgctgctgcacatgagcctgggcagcagccccatccagccgagacctggtcacaccacggtgagcgctggtggcgtacttaatgacctaagctggcattatgtgcgggtggaccgatacggccgagaagcaaatctcaccctggatggttacgtacatcgctttgtgctcaacggcgactttgaaaggctgaatctcgaaaatgagatattcatcggaggtctagtgggcgcagcgcgtaagaacctggcctaccgccataacttccgtggctgtatagaaaacgtgatctacaaccggatcaacatagctgaaatggcagtgcagcgccattcgcggatcaccttcgagggtaatgtggctttccggtgcttggatcccgttccacaccccatcaacttcggaggccctcacaacttcgtccaagtgcctggctttccacgtcgaggccgccttgctgtctccttccgcttccgcacctgggacctcacagggctgctccttttctcccgcttgggggatgggctgggtcatgtggagctgatgcttagtgaagggcaagtcaatgtatccatcgcgcagactggccgcaagaagcttcagtttgctgcggggtaccgcctgaatgatggcttctggcatgaggtgaactttgtggcacaggaaaaccatgcggtcatcagtattgatgatgtggagggggcagaggtcagggtatcatacccactgctgatccgcacagggacttcatacttctttggtggttgtcccaaaccagccagtcgatggggctgccactccaaccagacagcattccatggctgcatggagctgctcaaggtggatggtcaactggtcaacctcactctggtagagtttcggaagcttggttactttgctgaggtcctctttgacacatgtggcatcacagacagatgcagccctaatatgtgtgagcatgatgggcgctgctaccagtcttgggatgacttcatctgctactgcgaactcaccggctacaagggagttacctgccatgaaccattgtataaggagtcctgtgaagcctatcgcctcagcgggaaatattctggaaattacaccattgatcctgatggcagtggacccctgaaaccatttgtagtgtattgtgatatccgagagaaccgagcatggacagttgtgcgacatgacaggctatggaccactcgagtgacaggttccagcatggaccggccctttctgggggccatccaatactggaatgcctcctgggaggaagtcagtgctctggccaatgcttcccagcactgtgagcagtggatcgagttctcctgctacaattcccggctgctcaacactgcaggaggctacccctacagcttttggattggccgaaatgaagaacagcatttctactggggaggctcccagcctgggatccaacgctgtgcctgtgggctggaccagagctgtatagaccctgcactgcactgcaactgcgatgctgaccagccacagtggagaacagacaaggggctcctgacctttgtggaccatctgcctgtcactcaggtagtgataggtgacacaaaccgctccagctctgaagctcagttcttcctgaggcctctgcgctgttatggtgaccgcaattcctggaacactatctccttccgcactggagctgcactgcgtttccctccaatccgtgccaaccacagccttgatgtctccttctacttcaggacctcggctccctcaggagtcttcctagagaacatggggggtcctttctgccagtggcgccgaccttacgtgagagtggagctcaacacatcccgggatgtggtctttgcctttgatattggcaatggggatgagaacctgacagtgcactcagatgacttcgagttcaatgatgacgagtggcatttggtccgggctgaaatcaacgtgaagcaggcccggctgcgagtggaccatcggccctgggtgctaaggcccatgcccctgcagacgtacatctggctggagtatgaccaacccctctatgtgggatctgcagagcttaagaggcgcccatttgtggggtgcttgagggccatgcgtttgaatggagtgactctgaacttggagggtcgtgccaatgcctccgagggcaccttccccaactgcacgggccactgcacccacccccggttcccctgtttccacggaggacgctgtgtggagcgatacagctactacacgtgtgactgtgacctcacagcttttgatggaccatattgtaatcacgatattggtggattctttgagactggcacatggatgcgctataacctccagtcagcactgcgttctgcggcccaggagttctctcacatgctgagccggccggtaccgggctatgagcctggctatatcccaggctacgacactcctggttacgtgcctgggtaccatggtcctgggtaccgcctacccgactacccaaggcctggccggccagtgcccggataccggggncccgtgtacaatgttactggagaggaggtctcctttagcttcagcaccagctctgctcctgcagtcctgctctacgtcagctcctttgtgcgtgactacatggccgtgctcatcaaggaagatgggaccctacagcttcgctatcagctgggcaccagtccctatgtgtaccagctaaccacccggccagtgaccgatggccaaccccatagtgtcaacatcacccgggtctaccgaaacctctttatccaggtggactacttcccgctgacagaacagaagttctctctcctggtggacagccagctggactcccccaaggccttgtatctagggcgtgtgatggagacaggagtcattgacccagagattcagcggtacaacaccccaggtttctcaggctgcctgtctggtgtccggttcaacaatgtggctcctctcaagacccatttccgaacccctcgccccatgactgctgagctggcggaggccatgcgggttcaaggagaactgtcggagtctaactgtggcgctatgccacgccttgtctccgaggtgccaccagagcttgatccctggtacctgcccccagatttcccatactaccatgacgacggatggattgccatactcttaggttttttggtggccttcctgctgctggggcttgtgggaatgctggtgctgttctatctgcaaaatcatcgatacaagggctcctatcacaccaacgagcccaaggccacccatgattcccaccctggcggcaaagctcccctacctccctcaggccctgcccaggcccctgcccccactccagctcccacccaggttccgaccccagccccagccccagcctctggcccaggccccagggaccagaacctcccccagatcttggaggagtccaggtctgaatgagtcacaagggcttcagggaccaaggccaactcctctaagtnccttnagctcctgcctctcctctcccctgtcagggacatttggctcttcttagcaggctctgttcaccaggaggatcccctcttgccaagtttggtgtgcagagctacagatgggaccaaagggagtggccgagtctcactgcctaaaccaatgccctgcccccaccccccaccccagctcctggctgtttgcctgccctacgggagaaagctcatggagctgaggcgggcctttcctgccatctctgtcccagctgctggcaaggattaacaaccaagggcaggggagatgaactgcctcccttcctgtgggtattatcagcagggacagatgtgggggatcgaggggctgcacagggcaggcagggagggagggaggaggctgctaaaacacaccctggagcctcccccctgccctnctgaccggctgtcttccatctncttcctctcagctggggttgagggaagaacttcatccccaccccccacctcacccaaccctttttgttcttacagagaccaagaggcctcagcttagtcactttagtacctccactgcttcacatgctttagccaaagccataaaaagcctgcaagtagaagaaataatgcagaccctgcccagccagtcctctgctcctccacccctttccaaaatacgcaatagcctgggtgcctgtgtgcaggcctggcccccctccgtgcatgaggagccccccctcccccgctcagagatgctgcgtgttcgtccaggaggtcatattctttatatatattttttgttgcaaagcctctctctagagaactatatattactctaattttttaattatctgtttatatataaaagaactcagtgggccgtcctgtgctgtgcccagtttgtagtgagctccttctgtgttggatgtctcatgagtcctgccagccactcacccgcctgccgggcctccattctagagcagggcagagcccgctgtgccctcacctgagcaggttcaataaaagcagngtggcagaaa

SEQ ID NO: 342 - protein, 1381 aa, Rattus norvegicus
  ref <308>: DATABASE ACCESSION NUMBER: SWISS-Prot / P97846
  ref <309>: DATABASE ENTRY DATE: 2002-06-15
MMSLRLFSILLAAVVSGAQGWGYYGCNEELVGPLYARSLGASSYYGLFTTARFARLHGISGWSPRIGDPNPWLQIDLMKKHRIRAVATQGAFNSWDWVTRYMLLYGDRVDSWTPFYQQGHNATFFGNVNDSAVVRHDLHYHFTARYIRIVPLAWNPRGKIGLRLGIYGCPYTSNILYFDGDDAISYRFQRGASQSLWDVFAFSFKTEEKDGLLLHTEGSQGDYVTLELQGAHLLLHMSLGSSPIQPRPGHTTVSAGGVLNDLSWHYVRVDRYGREANLTLDGYVHRFVLNGDFERLNLENEIFIGGLVGAARKNLAYRHNFRGCIENVIYNRINIAEMAVQRHSRITFEGNVAFRCLDPVPHPINFGGPHNFVQVPGFPRRGRLAVSFRFRTWDLTGLLLFSRLGDGLGHVELMLSEGQVNVSIAQTGRKKLQFAAGYRLNDGFWHEVNFVAQENHAVISIDDVEGAEVRVSYPLLIRTGTSYFFGGCPKPASRWGCHSNQTAFHGCMELLKVDGQLVNLTLVEFRKLGYFAEVLFDTCGITDRCSPNMCEHDGRCYQSWDDFICYCELTGYKGVTCHEPLYKESCEAYRLSGKYSGNYTIDPDGSGPLKPFVVYCDIRENRAWTVVRHDRLWTTRVTGSSMDRPFLGAIQYWNASWEEVSALANASQHCEQWIEFSCYNSRLLNTAGGYPYSFWIGRNEEQHFYWGGSQPGIQRCACGLDQSCIDPALHCNCDADQPQWRTDKGLLTFVDHLPVTQVVIGDTNRSSSEAQFFLRPLRCYGDRNSWNTISFRTGAALRFPPIRANHSLDVSFYFRTSAPSGVFLENMGGPFCQWRRPYVRVELNTSRDVVFAFDIGNGDENLTVHSDDFEFNDDEWHLVRAEINVKQARLRVDHRPWVLRPMPLQTYIWLEYDQPLYVGSAELKRRPFVGCLRAMRLNGVTLNLEGRANASEGTFPNCTGHCTHPRFPCFHGGRCVERYSYYTCDCDLTAFDGPYCNHDIGGFFETGTWMRYNLQSALRSAAQEFSHMLSRPVPGYEPGYIPGYDTPGYVPGYHGPGYRLPDYPRPGRPVPGYRGPVYNVTGEEVSFSFSTSSAPAVLLYVSSFVRDYMAVLIKEDGTLQLRYQLGTSPYVYQLTTRPVTDGQPHSVNITRVYRNLFIQVDYFPLTEQKFSLLVDSQLDSPKALYLGRVMETGVIDPEIQRYNTPGFSGCLSGVRFNNVAPLKTHFRTPRPMTAELAEAMRVQGELSESNCGAMPRLVSEVPPELDPWYLPPDFPYYHDDGWIAILLGFLVAFLLLGLVGMLVLFYLQNHRYKGSYHTNEPKATHDSHPGGKAPLPPSGPAQAPAPTPAPTQVPTPAPAPASGPGPRDQNLPQILEESRSE

SEQ ID NO: 343 - DNA, 5293 bp, Homo sapiens
  ref <308>: DATABASE ACCESSION NUMBER: EMBL / U87223
  ref <309>: DATABASE ENTRY DATE: 2000-03-04
caagagcggaggaccaggaaccagagagagagagagagaaaagagagaggagagacagagcgcttgggggcgaaaggagagagggagggaagggtgggtaaggaggagagagcggtctgctgcaaaccccaggaggagagcttggagcccaagccagaactcgagccctagccggagccgttcacagggaggcggctgccgggaccgtcagccctgcatgatgcatctccggctcttctgcatcctgctcgccgcggtctcaggagccgagggctggggctactacggctgcgacgaggagctggtgggtcccctgtatgcacgctccctgggcgcctcctcctactacagtctccttactgcgccgcgattcgccaggctgcacggcataagcgggtggtcaccacggattggggatccgaatccctggctccagatagacttaatgaagaagcaccggatccgggccgtggccacacagggctcctttaattcttgggactgggtcacacgttacatgctactctacggcgaccgagtggacagctggacaccgttctaccagcgagggcacaactcgaccttctttggtaacgtgaacgagtcggcggtggtgcgccatgacctgcacttccacttcactgcgcgctacatccgcatcgtgcccctggcctggaacccacgcggcaagatcggcctgaggctcggcctctatggctgcccatacaaggccgacatactctatttcgacggcgacgatgccatctcctaccgcttcccgcgaggggtcagccgaagcctgtgggacgtgttcgccttcagcttcaagaccgaggagaaggacggtcttctgctgcacgccgagggcgcccagggcgactacgtgacgctcgagctggagggggcacacctgctgctgcacatgagcctgggcagcagccctatccagccaagaccaggtcacaccaccgtgagcgcaggcggagtcctcaatgaccagcactggcactatgtgcgggtggaccgatttggccgcgatgtaaatttcaccctggacggctatgtgcagcgctttattctcaatggagacttcgagaggctgaacctggacactgagatgttcatcggaggtctggtgggcgccgcgcggaagaacctggcctatcggcataacttccgcggctgcatagaaaacgtaatcttcaaccgcgtcaacatcgcagacctggccgtgcggcgccattcccggatcaccttcgagggtaaggtggcttttcgttgcctggacccggtaccgcaccctatcaacttcggaggccctcacaacttcgttcaagtgcccggtttcccacgccgtggccgcctggcagtctcatttcgcttccgcacctgggacctcaccgggcttctccttttctcccgtctgggggacgggctgggccacgtggagctgacgctcagcgaagggcaggtcaacgtgtccatcgcgcagagcggccgaaagaagcttcagttcgctgctgggtaccgactgaatgacggcttttggcacgaggtgaattttgtggcacaggaaaaccatgcagttatcagcattgatgatgtggaaggggcagaggtcagggtctcatacccgttgctgatccggacagggacctcatatttctttgggggttgtcccaagccagccagtcgatgggactgccactccaaccagacggcattccatggctgcatggagctgctcaaggtggatggtcaactggtcaacctgactctggtggagggccggcggcttggattctatgctgaggtcctctttgatacatgtggcatcactgataggtgcagccctaacatgtgtgagcatgatggacgctgctaccagtcttgggatgacttcatttgctactgcgaactgacgggctacaagggagagacctgccacacacctttgtataaggaatcctgtgaggcttatcggctcagtgggaaaacttctggaaacttcaccattgatcctgatggcagtggccccctgaagccatttgtagtgtactgtgatatccgagagaaccgagcgtggacagttgtgcggcatgacaggctgtggacaactcgagtgacaggttccagcatggagcggccattcctgggggctatccagtactggaatgcatcctgggaggaagtcagtgcccttgccaatgcttcccagcattgtgaacagtggatcgagttctcctgctacaattcccggctgctcaacactgcaggaggctacccctacagcttttggattggccgaaatgaggagcagcacttctactggggaggctcccagcctgggatccagcgctgtgcctgtggtctggaccggagctgtgtggaccctgccttgtactgcaactgtgacgctgaccagccccagtggagaactgacaagggactgctgacctttgtggaccatctgcctgtcactcaggtagtgataggggatacgaaccgctccacttctgaggcccagttcttcctgaggcctctgcgctgctatggcgatcgaaattcctggaacaccatttccttccacaccggggctgcactacgcttccccccaatccgtgccaaccacagcctggatgtctccttctacttcaggacctctgctccctcgggggtcttcctagagaatatggggggcccttactgccagtggcgccgaccttatgtgcgggtggaactcaacacatcccgggatgtggtcttcgcctttgatgtggggaatggggatgagaacctcacagtacactcagacgactttgagttcaatgatgacgagtggcacctggtccgggctgaaatcaacgtgaagcaggcccggctccgagtggatcaccggccctgggttctgcggcctatgccactgcagacctacatctggatggagtatgaccagcccctctatgtgggatctgcagagcttaagagacgcccctttgtgggttgcttgagggccatgcgtctgaacggagtgactctgaacctggagggccgtgccaatgcctctgagggtacctcacccaactgcacaggccactgtgcccaccctcggctcccctgtttccatggaggccgctgcgtggagcgctatagctactacacgtgtgactgtgacctcacggcttttgatgggccatactgcaaccacgatattggtggtttctttgagccgggcacctggatgcgctataacctacagtcagcgctgcgctctgcagccagggagttctcccacatgctgagccggccagtgccaggctatgagcctggctacatcccgggctatgatactccgggctatgtgcctggctaccatggccccgggtaccgcctgcccgactacccccggcctggtcggcctgtgcccggttaccgtgggcctgtctacaacgttacgggagaggaggtctccttcagcttcagcaccagctccgcccctgctgtcctgctctacgtcagttcctttgttcgtgactacatggctgtgctcatcaaggatgatgggacccttcagctgcgatatcagctgggcaccagtccctacgtgtaccagctaaccactcgaccagtgaccgatggccagccccatagcatcaatatcacccgtgtttaccggaacctcttcatccaggtggactacttcccactgacagagcagaagttctcgctgttggtggacagccagttggactcacccaaggccttgtatttagggcgtgtgatggagacaggagtcattgacccggagatccagcgctacaacaccccaggtttctcaggctgcctgtctggtgttcgattcaacaacgtggctcccctcaagacccacttccgaacccctcgacccatgactgctgagctagctgaggcccttcgagttcagggagaactgtccgaatctaattgcggagctatgccacgtcttgtttcagaggtgccacctgagcttgatccctggtatctgcccccagacttcccctactaccatgatgaaggatgggttgccatacttttaggctttttggtggcctttctgctgctggggctggtgggaatgttggtgctcttctatctgcaaaatcatcgctataagggctcctaccataccaatgagcccaaggctgcccacgagtaccatcctggcagcaaacctcccctacccacttcaggccctgcccaggtccccacccctacagcagctcccaaccaagctccagcctcagccccagccccagccccaactccagccccagcccctggcccccgggatcagaacctaccccagatcctggaggagtccaggtctgaatgagtcagaagggcttctgggaccaattccagctcctgacattcccccagtcctgcctctcccccatcctatcagggacatttggctcctcttagctggctctgctcatccagaggatattcccccatcccccccccatcaagtttggtgggcagagctacagatgggacccaagggagtggccgagcctcactgcctaaaccaatgcccttctcatccctgtttccccaggctcctggctgtttatctgccccaaaggagaagcctcatggggttgacataggtcctttctgccatctctgttccagctgctgtcagggattaacaacagagtgtaggggagattaactgcctcccttccaatagacactatcagcagggacagatgtgtgggagtgcagggctgcagagggtatggggggaggaggctgctaaaccctatcccccagcctcccccctgccctgaagatcttccatttgcttccactcagctggaggctcaagagggcttgatggctgtcccctgcccccctccttttgttttgtacacagagaccaagaggcctcagtttagcaccttagtacctccgctgcttcacttgctttagccaaagccataaaaaacctgcaacgtagagaaaataatgcagataccctgactagccagccctctactcctccaaccttttccaagatatgcaatggcctttgtgcctgcccaaaggcttcgcccctccagtgcatgaggaaccctctttcctccgctcagagatgctgcttcatttacccaggaggtcatattctttatatatattttttgttgcaaagtgtctctctagagaaactctatatattattcgaatttttaaattatttgtttatatataaaagaaaagctcaattggcaaaaaaaaaaaaaaaaaa

SEQ ID NO: 344 - protein, 1384 aa, Homo sapiens
  ref <308>: DATABASE ACCESSION NUMBER: SWISS-Prot / P78357
  ref <309>: DATABASE ENTRY DATE: 2002-06-15
MMHLRLFCILLAAVSGAEGWGYYGCDEELVGPLYARSLGASSYYSLLTAPRFARLHGISGWSPRIGDPNPWLQIDLMKKHRIRAVATQGSFNSWDWVTRYMLLYGDRVDSWTPFYQRGHNSTFFGNVNESAVVRHDLHFHFTARYIRIVPLAWNPRGKIGLRLGLYGCPYKADILYFDGDDAISYRFPRGVSRSLWDVFAFSFKTEEKDGLLLHAEGAQGDYVTLELEGAHLLLHMSLGSSPIQPRPGHTTVSAGGVLNDQHWHYVRVDRFGRDVNFTLDGYVQRFILNGDFERLNLDTEMFIGGLVGAARKNLAYRHNFRGCIENVIFNRVNIADLAVRRHSRITFEGKVAFRCLDPVPHPINFGGPHNFVQVPGFPRRGRLAVSFRFRTWDLTGLLLFSRLGDGLGHVELTLSEGQVNVSIAQSGRKKLQFAAGYRLNDGFWHEVNFVAQENHAVISIDDVEGAEVRVSYPLLIRTGTSYFFGGCPKPASRWDCHSNQTAFHGCMELLKVDGQLVNLTLVEGRRLGFYAEVLFDTCGITDRCSPNMCEHDGRCYQSWDDFICYCELTGYKGETCHTPLYKESCEAYRLSGKTSGNFTIDPDGSGPLKPFVVYCDIRENRAWTVVRHDRLWTTRVTGSSMERPFLGAIQYWNASWEEVSALANASQHCEQWIEFSCYNSRLLNTAGGYPYSFWIGRNEEQHFYWGGSQPGIQRCACGLDRSCVDPALYCNCDADQPQWRTDKGLLTFVDHLPVTQVVIGDTNRSTSEAQFFLRPLRCYGDRNSWNTISFHTGAALRFPPIRANHSLDVSFYFRTSAPSGVFLENMGGPYCQWRRPYVRVELNTSRDVVFAFDVGNGDENLTVHSDDFEFNDDEWHLVRAEINVKQARLRVDHRPWVLRPMPLQTYIWMEYDQPLYVGSAELKRRPFVGCLRAMRLNGVTLNLEGRANASEGTSPNCTGHCAHPRLPCFHGGRCVERYSYYTCDCDLTAFDGPYCNHDIGGFFEPGTWMRYNLQSALRSAAREFSHMLSRPVPGYEPGYIPGYDTPGYVPGYHGPGYRLPDYPRPGRPVPGYRGPVYNVTGEEVSFSFSTSSAPAVLLYVSSFVRDYMAVLIKDDGTLQLRYQLGTSPYVYQLTTRPVTDGQPHSINITRVYRNLFIQVDYFPLTEQKFSLLVDSQLDSPKALYLGRVMETGVIDPEIQRYNTPGFSGCLSGVRFNNVAPLKTHFRTPRPMTAELAEALRVQGELSESNCGAMPRLVSEVPPELDPWYLPPDFPYYHDEGWVAILLGFLVAFLLLGLVGMLVLFYLQNHRYKGSYHTNEPKAAHEYHPGSKPPLPTSGPAQVPTPTAAPNQAPASAPAPAPTPAPAPGPRDQNLPQILEESRSE

SEQ ID NO: 345 - DNA, 5350 bp, Rattus norvegicus; identical to SEQ ID NO: 341
  misc_feature (1)..(5350): n=a, c, g or t
  ref <308>: DATABASE ACCESSION NUMBER: EMBL / AF000114
  ref <309>: DATABASE ENTRY DATE: 2000-03-03

SEQ ID NO: 346 - protein, 1381 aa, Rattus norvegicus; identical to SEQ ID NO: 342
  ref <308>: DATABASE ACCESSION NUMBER: SWISS-Prot / P97846
  ref <309>: DATABASE ENTRY DATE: 2002-06-15

SEQ ID NO: 347 - DNA, 5293 bp, Homo sapiens; identical to SEQ ID NO: 343
  ref <308>: DATABASE ACCESSION NUMBER: EMBL / U87223
  ref <309>: DATABASE ENTRY DATE: 2000-03-04

SEQ ID NO: 348 - protein, 1384 aa, Homo sapiens; identical to SEQ ID NO: 344
  ref <308>: DATABASE ACCESSION NUMBER: SWISS-Prot / P78357
  ref <309>: DATABASE ENTRY DATE: 2002-06-15

SEQ ID NO: 349 - DNA, 9316 bp, Rattus norvegicus
  ref <308>: DATABASE ACCESSION NUMBER: EMBL / AF000368
  ref <309>: DATABASE ENTRY DATE: 1997-10-15
atggcgatgctgcctcctccaggacctcagagtttcgttcacttcacaaaacagtcccttgccctcattgaacagcgtatttctgaagaaaaagccaaggaacacaaagacgaaaagaaagatgatgaggaagaaggccccaagcccagcagtgacttggaagctgggaaacagctccccttcatctatggagacattccccctggaatggtgtcagagcccctggaggacctggacccatactatgctgacaaaaaaacttttatagtattgaacaaagggaaagcaatcttccgtttcaacgccacccctgctttgtacatgctgtctcccttcagtcctctaagaagaatatctattaagatcttagtgcactccttattcagcatgctaatcatgtgcacaattctgacgaactgcatattcatgaccttgagcaaccctccagaatggaccaaaaatgtagagtacacttttactgggatatatacttttgaatcactcataaaaatccttgcaagaggcttttgcgtgggagaattcaccttcctccgtgacccttggaactggctggactttgttgtcattgtttttgcgtatttaacagaatttgtaaacctaggcaatgtttcagctcttcgaactttcagagtcttgagagctttgaaaactatttctgtaatcccaggactaaagaccatcgtgggggccctgatccagtcagtgaagaagctctctgacgtcatgatcctcactgtgttctgtctcagtgtgtttgcactaattggactacagctgtttatgggcaacttgaagcataaatgtttcaggaaggaactcgaagagaatgaaacattagaaagtatcatgaatactgctgagagtgaagaagaattgaaaaaatatttttattacttggagggatccaaagatgctctactctgcggcttcagcacagattcagggcagtgtccagaaggctacatctgtgtgaaggctggcagaaacccggattatggctacacgagctttgacacattcagctgggccttcttggccttgtttcggctaatgactcaggactactgggagaacctttaccaacagactctgcgtgctgctggcaaaacctacatgattttctttgtcgtggttatttttctgggctccttttacctgataaacttgatcctggctgtggtagccatggcgtatgaggaacagaaccaggccaacatcgaagaagctaaacagaaagagttagaatttcagcagatgttagaccgactcaaaaaggagcaggaagaagctgaggcgatcgctgcagctgctgctgagttcacgagtatagggcggagcaggatcatgggactctctgagagctcttcagaaacctccaggctgagctcaaagagtgccaaggagagaagaaaccgaagaaagaaaaagaaacagaagatgtccagtggcgaggaaaagggtgacgatgagaagctgtccaagtcaggatcagaggaaagcatccgaaagaaaagtttccatctcggtgtggaagggcaccaccggacccgggaaaagaggctgtccacccccaaccagtcgccactcagcattcgcgggtccctgttttctgccaggcgcagcagcaggacgagtctcttcagttttaaggggcgaggaagagatctgggatctgagacagaattcgctgatgatgagcatagcatttttggagacaacgagagcagaaggggttcactattcgtaccccatagaccccgggagcggcgcagcagtaacatcagtcaggccagtaggtccccgccagtgctaccggtgaacgggaagatgcacagtgcagtggactgcaatggcgtcgtgtcgcttgttgatggaccctcagccctcatgctccccaatggacagcttcttccagaggtgataatagataaggcaacttccgacgacagcggcacgactaatcagatgcgcaaaaaaaggctctctagttcttacttcttgtctgaggacatgctgaatgacccgcatctcaggcaaagggccatgagcagggcgagcatactgaccaacactgtggaagaacttgaagaatctagacaaaaatgtccaccatggtggtacagatttgctcacacatttttaatctggaattgctctccatattggataaaattcaaaaagctcatctattttattgtgatggatccttttgtagatcttgcaattaccatttgcatagttttaaacaccttatttatggctatggagcaccacccaatgactgaagaattcaaaaatgtccttgcagtggggaacttgatctttacagggatcttcgcagctgaaatggtactgaagttaatagccatggacccctatgagtatttccaagtagggtggaatatttttgacagcctaattgtgacgctgagtttgatagagcttttcctagcagatgtggaaggattatcagttctgcggtcattcagattgctccgagtcttcaagttggcaaagtcctggcccacactgaacatgctcattaagatcatcggcaactcggtgggcgcactgggcaacctgaccctggtgctggccatcatcgtcttcatttttgccgtggtcggcatgcagctgtttggaaagagctacaaggagtgtgtctgcaagatcaatgtggactgcaagctgccgcgctggcacatgaacgacttcttccactccttcctcatcgtgttccgagtgctgtgtggggagtggatagagaccatgtgggactgcatggaggtcgcgggccagaccatgtgccttattgtttacatgatggtcatggtgattgggaaccttgtggtcctgaacctgtttctggctcttttgctgagttcctttagttctgacaatcttacagcaattgaggaagacaccgatgcaaacaacctccagatcgcagtggccagaattaagaggggaatcaattacgtgaaacagaccctgcgtgaattcattctaaaatcattttccaaaaagccaaagggctccaaggacacaaaacgaacagcagatcccaacaacaagaaagaaaactatatttcaaaccgtacccttgcggagatgagcaaggatcacaatttcctcaaagaaaaggataggatcagtggttatggcagcagtctagacaaaagctttatggatgaaaatgattaccagtcctttatccataaccccagcctcacagtgacagtgccaattgcacctggggagtctgatttggagattatgaacacagaagagcttagcagtgactcagacagtgactacagcaaagagaaacggaaccgatcaagctcttctgagtgcagcactgttgacaaccctctgccaggagaagaggaggctgaagcagagcccgtaaacgcagatgagcctgaagcctgctttacagatggttgtgtgaggagatttccatgctgccaagttaatgtagactctgggaaagggaaagtttggtggaccatcaggaagacgtgctacaggatagttgaacacagctggtttgaaagcttcatcgttctcatgatcctgctcagcagtggagctctggcttttgaagatatctatattgaaaagaaaaagaccattaagattatcctggagtatgctgacaagatattcacctacatcttcattctggaaatgcttctaaaatgggtcgcatatgggtataaaacatatttcactaatgcctggtgttggctggacttcttaattgttgatgtgtctctagttactttagtagccaacactcttggctactcagaccttggccccattaaatctctacggacactgagggccctaagacccctaagagccttgtctagatttgaaggaatgagggtagtggtcaacgcactcataggagcaatcccttccatcatgaacgtgcttctcgtgtgccttatattctggctaatatttagcatcatgggagtcaatctgtttgctggcaagttctatgagtgtgtcaacaccaccgatgggtcacgatttcctacatctcaagttgcaaaccgttctgagtgttttgccctgatgaacgttagtggaaatgtgcgatggaaaaacctgaaagtaaacttcgacaacgttgggcttggttacctgtcgctgcttcaagttgcaacattcaagggctggatggatattatgtatgcagcagttgactctgttaatgtaaatgaacagccgaaatacgaatacagtctctacatgtacatttactttgtcatcttcatcatcttcggctcattcttcacgttgaacctgttcattggtgtcatcatagataatttcaaccaacagaaaaaaaagcttggaggtcaagatatctttatgacagaagaacagaagaaatactataatgcaatgaagaagcttgggtccaaaaaaccacaaaaaccaattccaaggccagggaacaaattccaaggatgtatatttgacttagtgacaaaccaagcttttgatatcaccatcatggttcttatatgcctcaacatggtaaccatgatggtagaaaaagaggggcaaactgagtacatggattatgttttacactggatcaacatggtcttcattatcctgttcactggggagtgtgtgctgaagctaatctccctcagacattactacttcactgtgggttggaacatttttgattttgtggtagtgatcctctccattgtaggaatgtttctcgctgagatgatagagaagtatttcgtgtcccctaccctgttccgagtcatccgcctggccaggattggacgaatcctacgcctgatcaaaggcgccaaggggatccgcactctgctctttgctttgatgatgtcccttcctgcgctgttcaacatcggcctcctgcttttcctggtcatgttcatctacgccatctttgggatgtccaactttgcctacgttaaaaaggaggctggaattaatgacatgttcaactttgagacttttggcaacagcatgatctgcttgttccaaatcaccacctctgccggctgggacggactgctggcccccatcctcaacagcgcacctcccgactgtgaccctaaaaaagttcacccaggaagttcagtggaaggggactgtgggaacccatccgtggggattttttactttgtcagctacatcatcatatccttcctggtggtggtgaacatgtacatcgctgtcatcctggagaacttcagcgtcgccaccgaagagagcactgagcctctgagtgaggacgactttgagatgttctacgaggtctgggagaagttcgaccctgacgccactcagttcatagagttctgcaagctctctgactttgcagctgccctggatcctcccctcctcatcgcaaagccaaacaaagtccagctcattgccatggacctgcccatggtgagtggagaccgcatccactgcctggacatcttgtttgcttttacaaagcgggtcctgggtgagggtggagagatggattctcttcgttcacagatggaagaaaggttcatgtcagccaatccttctaaagtgtcctatgaacccatcacgaccacactgaagagaaaacaagaggaggtgtccgcgactatcattcagcgtgcttacagacggtatcgcctcagacaacacgtcaagaatatatcgagtatatacataaaagatggagacagggatgatgatttgcccaataaagaagatacagtttttgataacgtgaacgagaactcaagtccggaaaagacagatgtaactgcctcaaccatctcgccaccttcctatgacagtgtcacaaagccagatcaagagaaatatgaaacagacaaaacagagaaggaagacaaagagaaagatgaaagcaggaaatagagctttggttttgatacactgttgacagcctgtgaaggttgactcactcgtgttagtaagactcttttacggaggtctatgccaaactctttttatcaaaaaattctcaaaggcagcacagccattagctctgatccaacgaggcagagggcagcatttacacatggctatgttttgctttggtaaatgattcttttaagatttgagagtgtaactctgaagggaagagccatcactgcattcaagggtgacttagacattctaaaaatcagaaaaccaagtcaaacattttctcatttgcctccatgtcttttctctaggttctaaataaatgtgcacccatgtgaatctagaaatccaggcatacatgcacacatgcacacagtcacaaatacaaacaggattggctacgatttcaaattctatgtaaatgtttcactttggtttgcaatgaaatttccttgtaaaggaaatgggattagtgacgaaggttttgtcaaaacatcttattattagggaatcagaatctttaatctaaaaagaattcagtttatatttttgaggtgctgaaacttatcctacattgcgtcaaaagcaacttataggaatctataagatgtcatggaattgaaaaacgtatgtgggctatttatttaagaaatcactttcatttgtatattagcatcattcaccttgatttatggacatcttggacattgtgtggtcacatgatgctcccacaaaattgtttagctgaaacttcaggcacacatcacagagaacagctacccagtcttacgctccaccctgttcatacaataaccacagacctttaaacattatttggaatataaatattaggtttctcaatataaacatgtgaatattaacagaaaagttaatttacagcgttttacttactaatgtctatccaatctagtttgcacaatgagacagctctcacctcttacagccagttgccacatttctcttcttacgaagcttcggtttgtcagactttatctctaagcaaattctatgtttcctttttaatgaaacgtatcctgaaaagcgattagctacttgatactttagtgcttgtttgagcagatgactggagcatggtatgtaccccatcttttaaaatacaatccttaatgtgtttggcagcttcccaagttacagggaacgccgggcttttaatatctctccgttcaccaggtgttttgtatgaatgaaatgacattcaaagagtgagtctcattggcttgctttattaccaacgactttcctaaatgaggaactaatcctctgaagcactattatatccccttgtaaataacatagatgtcacttcgttcttaatattctaatccatggtgtgacatatattttgcattgatcagtaaagtagtctgggataaccattttaagagcatatacattttgaggtaggtgaagttaatctaccaaggattagaaacctactccaagtttttaaagtacttgataaaaatgaatgaccctgacaaattctctcataattttattccagcaatgtgaaatctttcctccaacactttatccttgcagagaagaaagaaaaaacaaagataagcccatgggccatgtaaacaaaggggctttatctagaagattctgagagaacctttgaagtaaatatgtaaaacatacttcctcagtttgcctttgaaattaaaaagtaacacaaaaatatggatttaataagtcatcaaaacacattctttatttctggcccagtttaaaggaaaggattaaaaatccctatagagggggggggacagagagagaaagagggagagaagaaacaaagtactagggacaaaaagattagacagaatacgtccaggttttcacactatgggctttgtccgggatgctgtataaaagtctctttccaaatgtttgtcataaggggatcgaagaaattaagtgcaagactaaaggttgtttacagatatcattaatcattaacagtttgggaagctgcttttacatttctatggaagatgccaaggaatgctaagccagacaatacagatgcattgtgcatctgtcaagcggctaaaatatgtttgggcaacttaattagggaaaccaccccaacccttacatttctgacaattttaaatacaatttaattaaagaaatcagtacttttattatttcacattcctaaaatataactatatcgtccatttttattgatattatatgtgtggatgtttgttgtagattatctgtaatttactattaatgtttttacactgatttttgtgaaaatttaaaatatgttggcaactggttcctcaacacaatttttttagcattacaaaaaataaacaggtataaaatttctcttttttctacatcatgttgaacatatttcattctgatttacacaattttaaatgtaatattattttatatgcatatgtttatctccaaaatcactacttatgacatcatatcaattaaaaatggtatttgacactaggactgtatttagtaaaagttaaaagctttcaccctttttcatgttgattagggtttgcactaactataaaatgtcacccacggaagctactagtcactgaaattattttacctattggtggagaatggtgactggccagaaaatatgagttagcattaagtagaagacagcgtacgtgaccacaaatccatgcaggtagtttgcgtgaaaacgggagaatctcatttttctgttttgtctcttctcactgtgcaaaaaggacaagaaatctttgggctatttctaaattcgaattgtcacaatttgcaatcataaatgtttagcacgactttgtagaattttgatagttttataaaagagtgaaaaacaaatgcatatgtaaataaagcagcccatactaacggattcatcaaatgttaatatgtaaataaagcagcccatactagcagattcatcaatgttaatatgtaaatacagcagcccacatgagcagattcgtcatatgctaagggaattaattaaaaggaagcaactaaataaggatggtcagtgattgatctgggtttagaacttgtgtttggacccaccaatttttaagtatgtattctcactttattagttttctaaagaaagcaatcaagaattgctcccagaaaatgagtaagtagccatgaatatatggatgctgtttaccaaacccatagacccatgaatgctccaaacgtctgagtttgtaaaaaaaaatacattgtagttatacttgacaatttaaaatgttaatagaatctaaaataaaagtcgcttaaaagtcgacgcggccgc

SEQ ID NO: 350 - protein, 1984 aa, Rattus norvegicus
  ref <308>: DATABASE ACCESSION NUMBER: SWISS-Prot / AAB50403
  ref <309>: DATABASE ENTRY DATE: 2003-02-01
MAMLPPPGPQSFVHFTKQSLALIEQRISEEKAKEHKDEKKDDEEEGPKPSSDLEAGKQLPFIYGDIPPGMVSEPLEDLDPYYADKKTFIVLNKGKAIFRFNATPALYMLSPFSPLRRISIKILVHSLFSMLIMCTILTNCIFMTLSNPPEWTKNVEYTFTGIYTFESLIKILARGFCVGEFTFLRDPWNWLDFVVIVFAYLTEFVNLGNVSALRTFRVLRALKTISVIPGLKTIVGALIQSVKKLSDVMILTVFCLSVFALIGLQLFMGNLKHKCFRKELEENETLESIMNTAESEEELKKYFYYLEGSKDALLCGFSTDSGQCPEGYICVKAGRNPDYGYTSFDTFSWAFLALFRLMTQDYWENLYQQTLRAAGKTYMIFFVVVIFLGSFYLINLILAVVAMAYEEQNQANIEEAKQKELEFQQMLDRLKKEQEEAEAIAAAAAEFTSIGRSRIMGLSESSSETSRLSSKSAKERRNRRKKKKQKMSSGEEKGDDEKLSKSGSEESIRKKSFHLGVEGHHRTREKRLSTPNQSPLSIRGSLFSARRSSRTSLFSFKGRGRDLGSETEFADDEHSIFGDNESRRGSLFVPHRPRERRSSNISQASRSPPVLPVNGKMHSAVDCNGVVSLVDGPSALMLPNGQLLPEVIIDKATSDDSGTTNQMRKKRLSSSYFLSEDMLNDPHLRQRAMSRASILTNTVEELEESRQKCPPWWYRFAHTFLIWNCSPYWIKFKKLIYFIVMDPFVDLAITICIVLNTLFMAMEHHPMTEEFKNVLAVGNLIFTGIFAAEMVLKLIAMDPYEYFQVGWNIFDSLIVTLSLIELFLADVEGLSVLRSFRLLRVFKLAKSWPTLNMLIKIIGNSVGALGNLTLVLAIIVFIFAVVGMQLFGKSYKECVCKINVDCKLPRWHMNDFFHSFLIVFRVLCGEWIETMWDCMEVAGQTMCLIVYMMVMVIGNLVVLNLFLALLLSSFSSDNLTAIEEDTDANNLQIAVARIKRGINYVKQTLREFILKSFSKKPKGSKDTKRTADPNNKKENYISNRTLAEMSKDHNFLKEKDRISGYGSSLDKSFMDENDYQSFIHNPSLTVTVPIAPGESDLEIMNTEELSSDSDSDYSKEKRNRSSSSECSTVDNPLPGEEEAEAEPVNADEPEACFTDGCVRRFPCCQVNVDSGKGKVWWTIRKTCYRIVEHSWFESFIVLMILLSSGALAFEDIYIEKKKTIKIILEYADKIFTYIFILEMLLKWVAYGYKTYFTNAWCWLDFLIVDVSLVTLVANTLGYSDLGPIKSLRTLRALRPLRALSRFEGMRVVVNALIGAIPSIMNVLLVCLIFWLIFSIMGVNLFAGKFYECVNTTDGSRFPTSQVANRSECFALMNVSGNVRWKNLKVNFDNVGLGYLSLLQVATFKGWMDIMYAAVDSVNVNEQPKYEYSLYMYIYFVIFIIFGSFFTLNLFIGVIIDNFNQQKKKLGGQDIFMTEEQKKYYNAMKKLGSKKPQKPIPRPGNKFQGCIFDLVTNQAFDITIMVLICLNMVTMMVEKEGQTEYMDYVLHWINMVFIILFTGECVLKLISLRHYYFTVGWNIFDFVVVILSIVGMFLAEMIEKYFVSPTLFRVIRLARIGRILRLIKGAKGIRTLLFALMMSLPALFNIGLLLFLVMFIYAIFGMSNFAYVKKEAGINDMFNFETFGNSMICLFQITTSAGWDGLLAPILNSAPPDCDPKKVHPGSSVEGDCGNPSVGIFYFVSYIIISFLVVVNMYIAVILENFSVATEESTEPLSEDDFEMFYEVWEKFDPDATQFIEFCKLSDFAAALDPPLLIAKPNKVQLIAMDLPMVSGDRIHCLDILFAFTKRVLGEGGEMDSLRSQMEERFMSANPSKVSYEPITTTLKRKQEEVSATIIQRAYRRYRLRQHVKNISSIYIKDGDRDDDLPNKEDTVFDNVNENSSPEKTDVTASTISPPSYDSVTKPDQEKYETDKTEKEDKEKDESRK

SEQ ID NO: 351 - DNA, 6371 bp, Homo sapiens
  ref <308>: DATABASE ACCESSION NUMBER: EMBL / X82835
  ref <309>: DATABASE ENTRY DATE: 1995-03-31
ctcttatgtgaggagctgaagaggaattaaaatatacaggatgaaaagatggcaatgttgcctcccccaggacctcagagctttgtccatttcacaaaacagtctcttgccctcattgaacaacgcattgctgaaagaaaatcaaaggaacccaaagaagaaaagaaagatgatgatgaagaagccccaaagccaagcagtgacttggaagctggcaaacaactgcccttcatctatggggacattcctcccggcatggtgtcagagcccctggaggacttggacccctactatgcagacaaaaagactttcatagtattgaacaaagggaaaacaatcttccgtttcaatgccacacctgctttatatatgctttctcctttcagtcctctaagaagaatatctattaagattttagtacactccttattcagcatgctcatcatgtgcactattctgacaaactgcatatttatgaccatgaataacccgccggactggaccaaaaatgtcgagtacacttttactggaatatatacttttgaatcacttgtaaaaatccttgcaagaggcttctgtgtaggagaattcacttttcttcgtgacccgtggaactggctggattttgtcgtcattgtttttgcgtatttaacagaatttgtaaacctaggcaatgtttcagctcttcgaactttcagagtattgagagctttgaaaactatttctgtaatcccaggcctgaagacaattgtaggggctttgatccagtcagtgaagaagctttctgatgtcatgatcctgactgtgttctgtctgagtgtgtttgcactaattggactacagctgttcatgggaaacctgaagcataaatgttttcgaaattcacttgaaaataatgaaacattagaaagcataatgaataccctagagagtgaagaagactttagaaaatatttttattacttggaaggatccaaagatgctctcctttgtggtttcagcacagattcaggtcagtgtccagaggggtacacctgtgtgaaaattggcagaaaccctgattatggctacacgagctttgacactttcagctgggccttcttagccttgtttaggctaatgacccaagattactgggaaaacctttaccaacagacgctgcgtgctgctggcaaaacctacatgatcttctttgtcgtagtgattttcctgggctccttttatctaataaacttgatcctggctgtggttgccatggcatatgaagaacagaaccaggcaaacattgaagaagctaaacagaaagaattagaatttcaacagatgttagaccgtcttaaaaaagagcaagaagaagctgaggcaattgcagcggcagcggctgaatatacaagtattaggagaagcagaattatgggcctctcagagagttcttctgaaacatccaaactgagctctaaaagtgctaaagaaagaagaaacagaagaaagaaaaagaatcaaaagaagctctccagtggagaggaaaagggagatgctgagaaattgtcgaaatcagaatcagaggacagcatcagaagaaaaagtttccaccttggtgtcgaagggcataggcgagcacatgaaaagaggttgtctacccccaatcagtcaccactcagcattcgtggctccttgttttctgcaaggcgaagcagcagaacaagtctttttagtttcaaaggcagaggaagagatataggatctgagactgaatttgccgatgatgagcacagcatttttggagacaatgagagcagaaggggctcactgtttgtgccccacagaccccaggagcgacgcagcagtaacatcagccaagccagtaggtccccaccaatgctgccggtgaacgggaaaatgcacagtgctgtggactgcaacggtgtggtctccctggttgatggacgctcagccctcatgctccccaatggacagcttctgccagagggcacgaccaatcaaatacacaagaaaaggcgttgtagttcctatctcctttcagaggatatgctgaatgatcccaacctcagacagagagcaatgagtagagcaagcatattaacaaacactgtggaagaacttgaagagtccagacaaaaatgtccaccttggtggtacagatttgcacacaaattcttgatctggaattgctctccatattggataaaattcaaaaagtgtatctattttattgtaatggatccttttgtagatcttgcaattaccatttgcatagttttaaacacattatttatggctatggaacaccacccaatgactgaggaattcaaaaatgtacttgctataggaaatttggtctttactggaatctttgcagctgaaatggtattaaaactgattgccatggatccatatgagtatttccaagtaggctggaatatttttgacagccttattgtgactttaagtttagtggagctctttctagcagatgtggaaggattgtcagttctgcgatcattcagactgctccgagtcttcaagttggcaaaatcctggccaacattgaacatgctgattaagatcattggtaactcagtaggggctctaggtaacctcaccttagtgttggccatcatcgtcttcatttttgctgtggtcggcatgcagctctttggtaagagctacaaagaatgtgtctgcaagatcaatgatgactgtacgctcccacggtggcacatgaacgacttcttccactccttcctgattgtgttccgcgtgctgtgtggagagtggatagagaccatgtgggactgtatggaggtcgctggtcaagctatgtgccttattgtttacatgatggtcatggtcattggaaacctggtggtcctaaacctatttctggccttattattgagctcatttagttcagacaatcttacagcaattgaagaagaccctgatgcaaacaacctccagattgcagtgactagaattaaaaagggaataaattatgtgaaacaaaccttacgtgaatttattctaaaagcattttccaaaaagccaaagatttccagggagataagacaagcagaagatctgaatactaagaaggaaaactatatttctaaccatacacttgctgaaatgagcaaaggtcacaatttcctcaaggaaaaagataaaatcagtggttttggaagcagcgtggacaaacacttgatggaagacagtgatggtcaatcatttattcacaatcccagcctcacagtgacagtgccaattgcacctggggaatccgatttggaaaatatgaatgctgaggaacttagcagtgattcggatagtgaatacagcaaagtgagattaaaccggtcaagctcctcagagtgcagcacagttgataaccctttgcctggagaaggagaagaagcagaggctgaacctatgaattccgatgagccagaggcctgtttcacagatggttgtgtacggaggttctcatgctgccaagttaacatagagtcagggaaaggaaaaatctggtggaacatcaggaaaacctgctacaagattgttgaacacagttggtttgaaagcttcattgtcctcatgatcctgctcagcagtggtgccctggcttttgaagatatttatattgaaaggaaaaagaccattaagattatcctggagtatgcagacaagatcttcacttacatcttcattctggaaatgcttctaaaatggatagcatatggttataaaacatatttcaccaatgcctggtgttggctggatttcctaattgttgatgtttctttggttactttagtggcaaacactcttggctactcagatcttggccccattaaatcccttcggacactgagagctttaagacctctaagagccttatctagatttgaaggaatgagggtcgttgtgaatgcactcataggagcaattccttccatcatgaatgtgctacttgtgtgtcttatattctggctgatattcagcatcatgggagtaaatttgtttgctggcaagttctatgagtgtattaacaccacagatgggtcacggtttcctgcaagtcaagttccaaatcgttccgaatgttttgcccttatgaatgttagtcaaaatgtgcgatggaaaaacctgaaagtgaactttgataatgtcggacttggttacctatctctgcttcaagttgcaacttttaagggatggacgattattatgtatgcagcagtggattctgttaatgtagacaagcagcccaaatatgaatatagcctctacatgtatatttattttgtcgtctttatcatctttgggtcattcttcactttgaacttgttcattggtgtcatcatagataatttcaaccaacagaaaaagaagcttggaggtcaagacatctttatgacagaagaacagaagaaatactataatgcaatgaaaaagctggggtccaagaagccacaaaagccaattcctcgaccagggaacaaaatccaaggatgtatatttgacctagtgacaaatcaagcctttgatattagtatcatggttcttatctgtctcaacatggtaaccatgatggtagaaaaggagggtcaaagtcaacatatgactgaagttttatattggataaatgtggtttttataatccttttcactggagaatgtgtgctaaaactgatctccctcagacactactacttcactgtaggatggaatatttttgattttgtggttgtgattatctccattgtaggtatgtttctagctgatttgattgaaacgtattttgtgtcccctaccctgttccgagtgatccgtcttgccaggattggccgaatcctacgtctagtcaaaggagcaaaggggatccgcacgctgctctttgctttgatgatgtcccttcctgcgttgtttaacatcggcctcctgctcttcctggtcatgttcatctacgccatctttggaatgtccaactttgcctatgttaaaaaggaagatggaattaatgacatgttcaattttgagacctttggcaacagtatgatttgcctgttccaaattacaacctctgctggctgggatggattgctagcacctattcttaacagtaagccacccgactgtgacccaaaaaaagttcatcctggaagttcagttgaaggagactgtggtaacccatctgttggaatattctactttgttagttatatcatcatatccttcctggttgtggtgaacatgtacattgcagtcatactggagaattttagtgttgccactgaagaaagtactgaacctctgagtgaggatgactttgagatgttctatgaggtttgggagaagtttgatcccgatgcgacccagtttatagagttctctaaactctctgattttgcagctgccctggatcctcctcttctcatagcaaaacccaacaaagtccagctcattgccatggatctgcccatggttagtggtgaccggatccattgtcttgacatcttatttgcttttacaaagcgtgttttgggtgagagtggggagatggattctcttcgttcacagatggaagaaaggttcatgtctgcaaatccttccaaagtgtcctatgaacccatcacaaccacactaaaacggaaacaagaggatgtgtctgctactgtcattcagcgtgcttatagacgttaccgcttaaggcaaaatgtcaaaaatatatcaagtatatacataaaagatggagacagagatgatgatttactcaataaaaaagatatggcttttgataatgttaatgagaactcaagtccagaaaaaacagatgccacttcatccaccacctctccaccttcatatgatagtgtaacaaagccagacaaagagaaatatgaacaagacagaacagaaaaggaagacaaagggaaagacagcaaggaaagcaaaaaatagagcttcatttttgatatattgtttacagcctgtgaaagtgatttatttgtgttaataaaactcttttgaggaagtctatgccaaaatcctttttatcaaaatattctcgaaggcagtgcagtcactaactctgatttcctaagaaaggtgggcagcattagcagatggttatttttgcactgatgattctttaagaatcgtaagagaactctgtaggaattattgattatagcatacaaaagtgattgattcagttttttggtttttaataaatcagaagaccatgtagaaaacttttacatctgccttgtcatcttttcacaggattgtaattagtcttgtttcccatgtaaataaacaacacacgcatacagaaaaaaaaaaaaaaa

SEQ ID NO: 352 - protein, 1978 aa, Homo sapiens
  misc_feature (1)..(1978): Xaa=Unknown amino acid
MAMLPPPGPQSFVHFTKQSLALIEQRIAERKSKEPKEEKKDDDEEAPKPSSDLEAGKQLPFIYGDIPPGMVSEPLEDLDPYYADKKTFIVLNKGKTIFRFNATPALYMLSPFSPLRRISIKILVHSLFSMLIMCTILTNCIFMTMNNPPDWTKNVEYTFTGIYTFESLVKILARGFCVGEFTFLRDPWNWLDFVVIVFAYLTEFVNLGNVSALRTFRVLRALKTISVIPGLKTIVGALIQSVKKLSDVMILTVFCLSVFALIGLQLFMGNLKHKCFRNSLENNETLESIMNTLESEEDFRKYFYYLEGSKDALLCGFSTDSGQCPEGYTCVKIGRNPDYGYTSFDTFSWAFLALFRLMTQDYWENLYQQTLRAAGKTYMIFFVVVIFLGSFYLINLILAVVAMAYEEQNQANIEEAKQKELEFQQMLDRLKKEQEEAEAIAAAAAEYTSIRRSRIMGLSESSSETSKLSSKSAKERRNRRKKKNQKKLSSGEEKGDAEKLSKSESEDSIRRKSFHLGVEGHRRAHEKRLSTPNQSPLSIRGSLFSARRSSRTSLFSFKGRGRDIGSETEFADDEHSIFGDNESRRGSLFVPHRPQERRSSNISQASRSPPMLPVNGKMHSAVDCNGVVSLVDGRSALMLPNGQLLPEGTTNQIHKKRRCSSYLLSEDMLNDPNLRQRAMSRASILTNTVEELEESRQKCPPWWYRFAHKFLIWNCSPYWIKFKKCIYFIVMDPFVDLAITICIVLNTLFMAMEHHPMTEEFKNVLAIGNLVFTGIFAAEMVLKLIAMDPYEYFQVGWNIFDSLIVTLSLVELFLADVEGLSVLRSFRLLRVFKLAKSWPTLNMLIKIIGNSVGALGNLTLVLAIIVFIFAVVGMQLFGKSYKECVCKINDDCTLPRWHMNDFFHSFLIVFRVLCGEWIETMWDCMEVAGQAMCLIVYMMVMVIGNLVVLNLFLALLLSSFSSDNLTAIEEDPDANNLQIAVTRIKKGINYVKQTLREFILKAFSKKPKISREIRQAEDLNTKKENYISNHTLAEMSKGHNFLKEKDKISGFGSSVDKHLMEDSDGQSFIHNPSLTVTVPIAPGESDLENMNAEELSSDSDSEYSKVRLNRSSSSECSTVDNPLPGEGEEAEAEPMNSDEPEACFTDGCVRRFSCCQVNIESGKGKIWWNIRKTCYKIVEHSWFESFIVLMILLSSGALAFEDIYIERKKTIKIILEYADKIFTYIFILEMLLKWIAYGYKTYFTNAWCWLDFLIVDVSLVTLVANTLGYSDLGPIKSLRTLRALRPLRALSRFEGMRVVVNALIGAIPSIMNVLLVCLIFWLIFSIMGVNLFAGKFYECINTTDGSRFPASQVPNRSECFALMNVSQNVRWKNLKVNFDNVGLGYLSLLQVATFKGWTIIMYAAVDSVNVDKQPKYEYSLYMYIYFVVFIIFGSFFTLNLFIGVIIDNFNQQKKKLGGQDIFMTEEQKKYYNAMKKLGSKKPQKPIPRPGNKIQGCIFDLVTNQAFDISIMVLICLNMVTMMVEKEGQSQHMTEVLYWINVVFIILFTGECVLKLISLRHYYFTVGWNIFDFVVVIISIVGMFLADLIETYFVSPTLFRVIRLARIGRILRLVKGAKGIRTLLFALMMSLPALFNIGLLLFLVMFIYAIFGMSNFAYVKKEDGINDMFNFETFGNSMICLFQITTSAGWDGLLAPILNSKPPDCDPKKVHPGSSVEGDCGNPSVGIFYFVSYIIISFLVVVNMYIAVILENFSVATEESTEPLSEDDFEMFYEVWEKFDPDATQFIEFSKLSDFAAALDPPLLIAKPNKVQLIAMDLPMVSGDRIHCLDILFAFTKRVLGESGEMDSLRSQMEERFMSANPSKVSYEPITTTLKRKQEDVSATVIQRAYRRYRLRQNVKNISSIYIKDGDRDDDLLNKKDMAFDNVNENSSPEKTDATSSTTSPPSYDSVTKPDKEKYEQDRTEKEDKGKDSKESKKX

SEQ ID NO: 353 - DNA, 9316 bp, Rattus norvegicus; identical to SEQ ID NO: 349
  ref <308>: DATABASE ACCESSION NUMBER: EMBL / AF000368
  ref <309>: DATABASE ENTRY DATE: 1997-10-15

SEQ ID NO: 354 - protein, 1984 aa, Rattus norvegicus; identical to SEQ ID NO: 350
  ref <308>: DATABASE ACCESSION NUMBER: SWISS-Prot / AAB50403
  ref <309>: DATABASE ENTRY DATE: 2003-02-01

SEQ ID NO: 355 - DNA, 6371 bp, Homo sapiens; identical to SEQ ID NO: 351
  ref <308>: DATABASE ACCESSION NUMBER: EMBL / X82835
  ref <309>: DATABASE ENTRY DATE: 1995-03-31

SEQ ID NO: 356 - protein, 1978 aa, Homo sapiens; identical to SEQ ID NO: 352
  misc_feature (1)..(1978): Xaa=Unknown amino acid

SEQ ID NO: 357 - DNA, 2426 bp, Rattus norvegicus
  ref <308>: DATABASE ACCESSION NUMBER: EMBL / AF000423
  ref <309>: DATABASE ENTRY DATE: 2000-03-03
ggcattctctcccccaagctgcaggccttcctctgttcgattttaagtagagacgtccctggagcatctaagagaaaaacgcagctagcaaccaaggatcgtactgtcgcaggagcagtcggccatgcaccttcccctcccttgatctggaggtctacagccggggcctcggtactgatcgagatttccaaagttgtctgacctctgcaaaagtgtttctatcaacagcctctgattacaacatggctgagatcacaaatatacgccccagctttgatgtgtcaccagtagcggctggcctcatcggcgcctctgtgctggtggtgtgtgtctctgtgactgtctttgtgtggacatgctgccaccagcaggcggagaagaagcacaagaccccaccgtacaagtttattcatatgctgaaaggcattagcatctacccagagaccctcagcaacaagaaggaaatcatcaaagttcggagggacaaagatggttctcatagggaaagtggacgagggaacctgttagtaaatgcggagtctggcctcctgagccatgacagggatcccagagggcctagccctgcatcttgtatagaccagttacccatcaaaagagactatggggaagaactgaggagccccatgaccagcctgacccccggtgaaagcaagcccacctccccatcatcgccagaggaagatgtgatgctagggtcccttaccttctcggtggactacaactttcccaagaaagctctggtggtgacaatccaagaggcgcatgggctgccagtgatggatggccagacccagggctccgatccctacatcaaaatgaccattcttcctgacaagcggcatcgagtgaagacccgggtgcttcgcaagaccctggaccccgtgtttgatgagaccttcaccttctacggcattccctacagccagctacaggacctggtgctgcacttccttgtgctcagctttgatcgcttctctcgggatgacgtcatcggggaggtcatggtgcccttggctggagtggaccccagcacaggcaaggttcagctgaccagggacatcatcaagaggaacattcagaagtgcattagcagaggggaactccaggtatctctgtcataccagcccgtcgcacagagaatgacagtcgtggtcctcaaagccagacacttgccgaagatggatatcaccggtctctcaggtaatccttatgtcaaggtgaacgtctactacggcagaaaacgcattgccaagaagaaaactcatgtaaagaagtgcactttgaaccccatcttcaatgagtccttcatctatgacatccccaccgatctcctgcctgatatcagcatcgagttccttgtcattgacttcgatcgtactactaagaatgaggtggtagggaggctgatcttgggggcacacagtgtcacaaccagtggtgcagaacactggagagaggtgtgcgagagtccccgcaagcctgtagccaagtggcacagtctgagcgagtactaaccctggggccaggcggggaggcacacacggggagaggtgacagagaagctgactcaaaacctcattttagtcgtagaagatttcttacagaacaaaccacacgaagaacctcacactccacacggctgcagattggttcttagcgtgaggattgctttcttctctgcaaggcactagacgatcttttgttttttaaaatgaggggggaagagaagggaagaccccaagtctatatataacaatgtaaccttatacttgcatgtctaatacaaacaagaaattagcctaacaatatcaagttgcagattttaatccatgaaaattgtgttttgtgccgaactgtatttgctgatcccctgaaattggcctctctttatcaggcttctctgggttattccagttttccatcaccgcaggagaaaagtctgctcttgtaaagccccatgtccccatcatccagtcccttttgctgtcacctctcacatctctgctctttggctgagttacaaatcctgaggtctgtagtaagtgaggaaatgagtggggtttccaggagaaagagtggttgagaatgggatgtgtgggtagtaggcagccagtgactagagattcccctgatgagctcaggaggagtggggctggacttaggactctgatttctccagaaggagcaatggagggttcacctagagcgaggtacctgtgaacagtaccagcgcgtcctgaaagctgcttgcaggtcaggggaccaggggatgaaataagatgtccatgtggccctctgtggtgggctcttcatcagtggtcagcagtcccaggtttgtaaggttacactggcttttacttttccagaactgtgccgggcgctcaggcatctcttcattatgtagc

SEQ ID NO: 358 - protein, 430 aa, Rattus norvegicus
  ref <308>: DATABASE ACCESSION NUMBER: SWISS-Prot / O08835
  ref <309>: DATABASE ENTRY DATE: 2002-06-15
MAEITNIRPSFDVSPVAAGLIGASVLVVCVSVTVFVWTCCHQQAEKKHKTPPYKFIHMLKGISIYPETLSNKKEIIKVRRDKDGSHRESGRGNLLVNAESGLLSHDRDPRGPSPASCIDQLPIKRDYGEELRSPMTSLTPGESKPTSPSSPEEDVMLGSLTFSVDYNFPKKALVVTIQEAHGLPVMDGQTQGSDPYIKMTILPDKRHRVKTRVLRKTLDPVFDETFTFYGIPYSQLQDLVLHFLVLSFDRFSRDDVIGEVMVPLAGVDPSTGKVQLTRDIIKRNIQKCISRGELQVSLSYQPVAQRMTVVVLKARHLPKMDITGLSGNPYVKVNVYYGRKRIAKKKTHVKKCTLNPIFNESFIYDIPTDLLPDISIEFLVIDFDRTTKNEVVGRLILGAHSVTTSGAEHWREVCESPRKPVAKWHSLSEY

SEQ ID NO: 359 - DNA, 4001 bp, Homo sapiens
  ref <308>: DATABASE ACCESSION NUMBER: EMBL / D38522
  ref <309>: DATABASE ENTRY DATE: 2001-10-10
cccaggtaatccttatgtcaaggtgaacgtctactacggcagaaagcgcattgccaagaagaaaacccatgtgaagaagtgcactttgaaccccatcttcaatgaatctttcatctacgacatccccactgacctcctgcctgatatcagcatcgagttcctcgttatcgacttcgatcgcaccaccaagaatgaggtggtggggaggctgatcctgggggcacacagtgtcacagccagtggtgctgaacactggagagaggtctgcgagagcccccgcaagcctgtggccaagtggcacagtctgagcgagtactaatcctgttcttctctcctctaatccccgggggccaagctggggagggatgtggaggggaaaaagatgacagagaagtggactccaaacctcattttagttgtagaagaaaatttcttacaaaacaaattccacaaagaacaccctatatgaccacagctgcagatcagttcttagcaatgatgtttttttttctgctttgcaaggcgctagaatcttttattttactttattttttttgaggtggagtttcgctcttgttgcccgggctggagtgcaatggtgagatctcaactcactgcaacctctgccctccaggttcaagtgattctcctccctcagcctcccaagtagctgggattacaggcacccacgagcatgcccggctaattttttgtattttcagtagagatgggtttcaccatgttggccaggctggtctcgaattccagacctcaggtgatccacccgcctcggcctcccaaagtgctgggattacaggtgcgagccaccgtgcccggcctctggttttgttttgttttttttttttaatgggggacaaaagagagggaaagacccctataaatctatatataacaatgtaaccatatacttgcatgtctaatacaaactgaagaaattagcctaactgccaatatcaagttgcagattttaatccatggaaattgtgttttgtgctgaattgtatttgctgattacctgaaattggcttctttttattgggcttctctggagaatttctcccactccccacctctgcagaagaaaattttgctcttataaaacctcatgttttcatcattcccatcttttctttttattgcctcttatatctctgctctttgacctcaaggtctagaggtctgcagtaagccaagaaacaaaggtggggtggatgaggcaaggtttgcaggagaaagaggaattgagaaatggggtatttttgctatcagctcttctgctatgaagtagtaaaaggcagtctataattaactgacagacctaactgaagcacagagaatacatcagacttatgcatccaagacatcagaacttggattttatcaaacttgatgacttctctaaaaggagctttggaaacttcaaattcagctataggatagtaccaatgaacacatccagctgatcccaaaagctgttttcaggtataaggacaaggagaggagacaagtgacgacagccattcccctttgcagctatctactgtagtgacagccatttcttggttgatgggttggaagtcatcagaggtttgaagaattacactggcctttgtttttctggaaatgccgaccatggagatgctttagagtcttctcaaatagcttagatgttgtaatgaggttagctttgcttcataaaacaggggccctcagaagttctccttaaatttttcaataaaaatttagctcttaaaaaaataacagtgtgactgagtgaatgaagataagttggattctttcagagcattcttttcctcaaaacgagctgcataattcttggaatttatgtcttaccacatggtggagggatggaggaactacaggatgcaattcttcttctaccaatgggcaatagaggttgagagagattcagcatctttctgggattagaattcaagtctctttactcctacagcagctgtgtctccaacgttgagactttgcagatggcacagactccatggataataggtaaacttggggccgggcgcagtggctcacgcctgtaatcccagtattttgggaggccgaggtggaaagatcgcttgagcccaggagttcaagaccagcctgggctacatgacgaaactccatctctatcaaaaatacaaaaaattaactaggtgtggtgctgcacgcctgtggtcccagctattcaggaggctgaggtgggaggatcatttgagcccagaggtagaggctgcagtgagccatgatcatgccactgcactctgggctgggtaacagagtgagatcctgtctcaaaaattaattaattaattaattaaaataaactaggtaaacttggataggcagtagatatttttgcccacctgaggaggaactcagtcaagctgttgcttaacagcttgatccagggcgtgaaaggttagttgagactgaagtgttcacttccatagaagaacatcacttttaaccttgctttggcgaagggagtcggaaagctgagtctctatggacgggggggtgatcttgctttcagtgttccctcagcttttgtggatttaaaaccattctgctccccctaaaccttttgtttgatttcagcccatgttcttgacaatgcagagcaattctgagcagtcacaaagcctactctctgttcttgtccctgccaacccccaccccccataatctgactcacaacttcaccatcagttggggtcataccactagtctctgtcctataccccatgaaatgtaaatactgtatcataagtagaagaaaataatttttgttttctaaaaatgcattttgagatagtttaatgtaaatctgacaggagcattctgaagccccattaggaaaaaatttaaatggttcctcttcatcgccttaatgtctaaagatcagaaatcgctgagcaaacccgcttttgtttccttcccagaaacaatgcaaaacaacaggtggagatagtctggtctttgccctgctgtgtgtgcctctgtagctcctcctgacaaacgtctgggaaaacagcctcaccccactctcctctctcttccccatttccttgtagctttattccttgcatctttgggtctactgagcagtgggtgctgaggtgacaggggaggaaccagttgttctgtagcctaggaactgcctcagtgtctttgccagaaaaaggcaaagaggcggacagtgcagggctcctccctcctacctcaggcctgatccatcgtgcccttgactttgccgtctcaaagtttcttagctgactttggctttcacatttgttctttccagagctaactgataagagtggaggaggaatgccttctcctaagagtcagttgaaagaaagacaagagagtcacatcttagcttttgcacaaggcattcgtggtcaggaataggttagggaatggtcacttctgattttccaacagttgctccttctctgaagagatcttgattcctttgggaagacaagaatttttcttaataacaaaggtccctttatgagttattccttctttcagttcatctcactggagcacagccaagatggacatgtttatggacagtgctctagatgtgaaaacagatagaactggtttgtgggacaggggcagcttgctcaggagagggaataacgcaggtcccttttcttggaaggcttgtactatggccatgacagtgacattgccctcaccatgatccctctccaaagtggttgtctttctttaccttgtgtcttctcttgtaaaaatgaaactcaaaaataaaataaatgtgtcaaattttgaaaaaaaaagaaaactgaaaaagctaacatgaattgtgtgaaattgcataatgctgtaatgctaatctacaatatgtaatgctatcttgtatgttgaatttgttaatgcaccacacaagtgcaaaataaagactgattcacatt

SEQ ID NO: 360 - protein, 431 aa, Homo sapiens
  ref <308>: DATABASE ACCESSION NUMBER: SWISS-Prot / Q9BT88
  ref <309>: DATABASE ENTRY DATE: 2002-06-15
MAEITNIRPSFDVSPVVAGLIGASVLVVCVSVTVFVWSCCHQQAEKKHKNPPYKFIHMLKGISIYPETLSNKKKIIKVRRDKDGPGREGGRRNLLVDAAEAGLLSRDKDPRGPSSGSCIDQLPIKMDYGEELRSPITSLTPGESKTTSPSSPEEDVMLGSLTFSVDYNFPKKALVVTIQEAHGLPVMDDQTQGSDPYIKMTILPDKRHRVKTRVLRKTLDPVFDETFTFYGIPYSQLQDLVLHFLVLSFDRFSRDDVIGEVMVPLAGVDPSTGKVQLTRDIIKRNIQKCISRGELQVSLSYQPVAQRMTVVVLKARHLPKMDITGLSGNPYVKVNVYYGRKRIAKKKTHVKKCTLNPIFNESFIYDIPTDLLPDISIEFLVIDFDRTTKNEVVGRLILGAHSVTASGAEHWREVCESPRKPVAKWHSLSEY

SEQ ID NO: 361 - DNA, 1493 bp, Rattus norvegicus
  ref <308>: DATABASE ACCESSION NUMBER: EMBL / AF000899
  ref <309>: DATABASE ENTRY DATE: 1998-12-03
ggaaacttttgtaaaatgtttctttacatggaaatttcactttaggcaatcattggtctatattattgatttgattttacttgtagaactaagagcccctcattgagtgactattcagatttcaaagtgactcgaattgtttacatagcttctacctgaaggatttagaatctgttttctgatagcaaaactaatatatatggtggccagagtataactatgttcatactttggcctgggagataatttatcatgagcttttactatttaaaatgttacacatttgcctactattttataaatgatgttgccttcagaatttgtgggaaggtagaaaactcaaaatatctcgcatcttttgtgcaatggaaagtcttgagttttgatgtcctaaatatgattgcagaaattgttctgttgctcttaaaaaatggacctacatatgacaaaaatccatgctatctgggtaattctcccaacctgtaaggctgaggactgtggtgtgcgttgttctttagtgtcttccaccagcagtgcctcctgttaaaatgtgacagtctcccaatgttaaagaaactggacatatgctttctctgttattcttgttagacataagaaagtaatatgtttcttttcctgttgtaacattttacaaaagagctgctagtcagatctttattcttaaattaatctcaaactggatgtaaaaatttaaaaatattttttaatttatttttttaatagtagtataagaactctggctgctacttagttgttattctgttttccggatagaagctatttaaaaaagtccagtttctgtcccagggtagcaaaatgtacttcctcattttgttgttttgtgatttataaattacactaccttttgaatatacaaacctcattcttcattggacaatgtgaaggctttgggttttttgaagttaaatttgaaggtgcagtttgctttggcattccctcagctctaagatgtattaaccactgtgcttgcagaggccaggactaagattgtactatgaaacttactgagtacttttcacaaattattatcaaaggagagatttttagatttttgtattctgcttagtttaaaaaaaaaaaaagagtagtttccacgaagggttagtgcatttgatgctgttgctgccaaacaaactcagccaattctctaacatagcaggtgtgggaaggatgacacgtggctttgattttgagtgcattttccagaatactgggaaggagcttctgaagccttggatgtattgggtctgtcaaggtgcacgtgtgcctttgtaaatgttcgttctccatctcattcgtcaggtgatgggtggtgaaatgtagctgagctgaagactagaactcaataatcacttttgtgaacaagttggaattgtcatgttactgtgtaattggtttgcttttaagatgaacaataaattaaataaaataaaaaaaaaaaaaaaaaaaaa

SEQ ID NO: 362 - protein, 208 aa, Rattus norvegicus
  ref <308>: DATABASE ACCESSION NUMBER: SWISS-Prot / AAC82319
  ref <309>: DATABASE ENTRY DATE: 2000-10-01
MSSKAMLKVQEDIKALKQLLSLAASGLQRNTLNIDKLKLETAQELKNAEIALRTQKTPPGLQHENTASPDDERLQVHQFEVQLQQYRQQIEELENHLATQANNSHITPQDLSMAMQKIYQTFVALAAQLQSIHENVKVLKEQYLSYRKMFLGDAGDVFEARRTEAKKWQNAPRVTTGPTPFSTMPNAAAVAMAATLTQQQQPATGDGW

SEQ ID NO: 363 - DNA, 1493 bp, Rattus norvegicus; identical to SEQ ID NO: 361
  ref <308>: DATABASE ACCESSION NUMBER: EMBL / AF000899
  ref <309>: DATABASE ENTRY DATE: 1998-12-03

SEQ ID NO: 364 - protein, 208 aa, Rattus norvegicus; identical to SEQ ID NO: 362
  ref <308>: DATABASE ACCESSION NUMBER: SWISS-Prot / AAC82319
  ref <309>: DATABASE ENTRY DATE: 2000-10-01

SEQ ID NO: 365 - DNA, 1493 bp, Rattus norvegicus; identical to SEQ ID NO: 361
  ref <308>: DATABASE ACCESSION NUMBER: EMBL / AF000899
  ref <309>: DATABASE ENTRY DATE: 1998-12-03

SEQ ID NO: 366 - protein, 208 aa, Rattus norvegicus; identical to SEQ ID NO: 362
  ref <308>: DATABASE ACCESSION NUMBER: SWISS-Prot / AAC82319
  ref <309>: DATABASE ENTRY DATE: 2000-10-01

SEQ ID NO: 367 - DNA, 1493 bp, Rattus norvegicus; identical to SEQ ID NO: 361
  ref <308>: DATABASE ACCESSION NUMBER: EMBL / AF000899
  ref <309>: DATABASE ENTRY DATE: 1998-12-03

SEQ ID NO: 368 - protein, 208 aa, Rattus norvegicus; identical to SEQ ID NO: 362
  ref <308>: DATABASE ACCESSION NUMBER: SWISS-Prot / AAC82319
  ref <309>: DATABASE ENTRY DATE: 2000-10-01

SEQ ID NO: 369 - DNA, 528 bp, Rattus norvegicus
  ref <308>: DATABASE ACCESSION NUMBER: EMBL / AF000942
  ref <309>: DATABASE ENTRY DATE: 2001-12-11
gttcttaaactttgctctccaacctccaacatgaaggcgctgagcccggtgcgcggctgctacgaggcggtgtgctgcctgtcggaacgtagcctagccattgcgcgaggccggggtaagagcccgtcggcggaggagccgcttagcctcttggacgacatgaaccactgctactcgcgcctgcgggaactggtgccgggagtcccgcggggcactcagcttagccaggtggaaatcctgcagcgtgtcatagactacatcctcgaccttcaagtggttctggcagagcccgcgcctggacccccggatggtccgcatctcccgatccaggtacgagagggagctagaccaggctcatctgaacgtgcgggctgggatgctgcgggtcttccccaccgcgtcctcgagtaccttggctaactcgtctcttatccttctttcacagacagctgagctcactccggaacttgtgatctccaaggacaagaggagtttttgccactgacccggtcgtcctggcacctcccg

SEQ ID NO: 370 - protein, 119 aa, Rattus norvegicus
  ref <308>: DATABASE ACCESSION NUMBER: SWISS-Prot / P41138
  ref <309>: DATABASE ENTRY DATE: 2001-10-16
MKALSPVRGCYEAVCCLSERSLAIARGRGKSPSAEEPLSLLDDMNHCYSRLRELVPGVPRGTQLSQVEILQRVIDYILDLQVVLAEPAPGPPDGPHLPIQTAELTPELVISKDKRSFCH

SEQ ID NO: 371 - DNA, 982 bp, Homo sapiens
  ref <308>: DATABASE ACCESSION NUMBER: EMBL / X66924
  ref <309>: DATABASE ENTRY DATE: 1993-11-18
agacaattttcagcaggaagaagtagaaaggataaaatggatcctgcaccacgggaacctcacagcacctcacttcttttggttttctttctctttggggcacctctggactcactccccagcatgaaggcgctgagcccggtgcgcggctgctacgaggcggtgtgctgcctgtcggaacgcagtctggccatcgcccggggccgagggaagggcccggcagctgaggagccgctgagcttgctggacgacatgaaccactgctactcccgcctgcgggaactggtacccggagtcccgagaggcactcagcttagccaggtggaaatcctacagcgcgtcatcgactacattctcgacctgcaggtagtcctggccgagccagcccctggaccccctgatggcccccaccttcccatccagacagccgagctcgctccggaacttgtcatctccaacgacaaaaggagcttttgccactgactcggccgtgtcctgacacctccagaacgcaggtgctggcgcccgttctgcctgggaccccgggaacctctcctgccggaagccggacggcagggatgggccccaacttcgccctgcccacttgacttcaccaaatcccttcctggagactgaacctggtgctcaggagcgaaggactgtgaacttgtggcctgaagagccagagctagctctggccaccagctgggcgacgtcaccctgctcccaccccaccccaagttctaaggtcttttcagagcgtggaggtgtggaaggagtggctgctctccaaactatgccaaggcggcggcagagctggtcttctggtctccttggagaaaggttctgttgccctgatttatgaactctataatagagtatataggttttgtaccttttttacaggaaggtgactttctgtaacaatgcgatgtatattaaactttttataaaagttaacattttgcataataaacgattt

SEQ ID NO: 372 - protein, 119 aa, Homo sapiens
  ref <308>: DATABASE ACCESSION NUMBER: SWISS-Prot / Q02535
  ref <309>: DATABASE ENTRY DATE: 2002-06-15
MKALSPVRGCYEAVCCLSERSLAIARGRGKGPAAEEPLSLLDDMNHCYSRLRELVPGVPRGTQLSQVEILQRVIDYILDLQVVLAEPAPGPPDGPHLPIQTAELAPELVISNDKRSFCH

SEQ ID NO: 373 - DNA, 1356 bp, Rattus norvegicus
  ref <308>: DATABASE ACCESSION NUMBER: EMBL / AF001417
  ref <309>: DATABASE ENTRY DATE: 2000-03-03
ggagactgtcttttccaacccgacatggatgtgctcccaatgtgtagcatcttccaggaactacagattgtgcacgaaacgggctacttctcggctctgccgtccctggaggaatattggcaacagacctgcctggagttggaacgctatcttcagagtgagccctgctacgtgtcagcctctgagataaaatttgacaaccaggaagacctgtggaccaaaatcattctagcacgggagaggaaggaggaatcagaactgaagatttcttctagtcccccagaggactctctgatcagctccggctttaattataacttagagaccaatagcctgaactctgatgtcagcagcgaatcttcagacagttcggaggaactttcgcccacgaccaagtttacctctgaccccattggtgaagtcttagtcaattcaggaaatctgagttcctcggtcatttccacacctccttcttctcccgaagtaaatagggaatcttctcaactatggggctgtgggccaggagacctgccctcacctgggaaggttcgaagtgggacctcggggaagtctggcgacaagggtagtggcgacgcctccccagatggcagaagaagggtacatcggtgccattttaacggctgcaggaaagtttacactaaaagctcccacttgaaagcacatcagcgcactcacacaggagaaaagccttacagatgctcttgggaaggttgtgagtggcgttttgcaagaagtgatgagttgaccagacacttccgaaagcatactggtgccaagccctttaaatgctctcactgtgacaggtgtttctccaggtctgaccacctggccctgcacatgaagaggcatctctgagggagcagaggatgaatcctgtaggctaaaagaggcttccaggctaagaggcggccatggaaggagggatacctgtaccagccaaagcatgccattgcttcctacccagttacctccagaggcctctctttggaaggtcttttgagggctacaaaagtcatgtcagaagcggcatagcacccacggtgcatggtgtttgggtgaccccggactcaccactggtttctaaccttctgagaggctctaagcttttcgccgtgagcatgcgcactgagaatgttaatgggtgggaatgactgactgtatgttgaggatctattactgactgtatggcgaggcagactttttttttccccccttgtggtagcaaatacctgcaagagacagaaaaaaaaagcagtttgaatgttttgtgtgtgaggagtattccaagggatgagttgaccaccaatcatttcctgaagggtgtctgcaccttag

SEQ ID NO: 374 - protein, 283 aa, Rattus norvegicus
  ref <308>: DATABASE ACCESSION NUMBER: SWISS-Prot / O35819
  ref <309>: DATABASE ENTRY DATE: 2002-06-15
MDVLPMCSIFQELQIVHETGYFSALPSLEEYWQQTCLELERYLQSEPCYVSASEIKFDNQEDLWTKIILARERKEESELKISSSPPEDSLISSGFNYNLETNSLNSDVSSESSDSSEELSPTTKFTSDPIGEVLVNSGNLSSSVISTPPSSPEVNRESSQLWGCGPGDLPSPGKVRSGTSGKSGDKGSGDASPDGRRRVHRCHFNGCRKVYTKSSHLKAHQRTHTGEKPYRCSWEGCEWRFARSDELTRHFRKHTGAKPFKCSHCDRCFSRSDHLALHMKRHL

SEQ ID NO: 375 - DNA, 1350 bp, Homo sapiens
  ref <308>: DATABASE ACCESSION NUMBER: EMBL / U44975
  ref <309>: DATABASE ENTRY DATE: 2000-03-04
gggcgggcaacccggcccgacatggacgtgctccccatgtgcagcatcttccaggagctccagatcgtgcacgagaccggctacttctcggcgctgccgtctctggaggagtactggcaacagacctgcctagagctggaacgttacctccagagcgagccctgctatgtttcagcctcagaaatcaaatttgacagccaggaagatctgtggaccaaaatcattctggctcgggagaaaaaggaggaatccgaactgaagatatcttccagtcctccagaggacactctcatcagcccgagcttttgttacaacttagagaccaacagcctgaactcagatgtcagcagcgaatcctctgacagctccgaggaactttctcccacggccaagtttacctccgaccccattggcgaagttttggtcagctcgggaaaattgagctcctctgtcacctccacgcctccatcttctccggaactgagcagggaaccttctcaactgtggggttgcgtgcccggggagctgccctcgccagggaaggtgcgcagcgggacttcggggaagccaggtgacaagggaaatggcgatgcctcccccgacggcaggaggagggtgcaccggtgccactttaacggctgcaggaaagtttacaccaaaagctcccacttgaaagcacaccagcggacgcacacaggagaaaagccttacagatgctcatgggaagggtgtgagtggcgttttgcaagaagtgatgagttaaccaggcacttccgaaagcacaccggggccaagccttttaaatgctcccactgtgacaggtgtttttccaggtctgaccacctggccctgcacatgaagaggcacctctgagggagcagagaggtggatcctgtaggctaaaaggcttccaggctgagagccggccgtggaaggagggatgcgtggttccagccaaagcatgccgttgtgcaccctacccagttgcctccagggcctctccttggaaggtcttttgagggctaaaaaggtcctgtaagaagaggcatagcacccgtggtggcaatggttatgtgggtgaccctggactcgccactggtacccgcccttccgagcggcggcctaagcctttgccgtgagatgcacactgagaatgctaatggttgggttgattgtatgttgaggatctattactgaccgtatgatgaggccaactttttttccttgtggttagcaagactgcaaagagatggaaaaaaagtagtttgaatgttttgtgtgtaaggagtataccatgagatgagatgaccaccaatcatttccttggggggagggggtgtctgccccccc

SEQ ID NO: 376 - protein, 283 aa, Homo sapiens
  ref <308>: DATABASE ACCESSION NUMBER: SWISS-Prot / Q99612
  ref <309>: DATABASE ENTRY DATE: 2002-06-15
MDVLPMCSIFQELQIVHETGYFSALPSLEEYWQQTCLELERYLQSEPCYVSASEIKFDSQEDLWTKIILAREKKEESELKISSSPPEDTLISPSFCYNLETNSLNSDVSSESSDSSEELSPTAKFTSDPIGEVLVSSGKLSSSVTSTPPSSPELSREPSQLWGCVPGELPSPGKVRSGTSGKPGDKGNGDASPDGRRRVHRCHFNGCRKVYTKSSHLKAHQRTHTGEKPYRCSWEGCEWRFARSDELTRHFRKHTGAKPFKCSHCDRCFSRSDHLALHMKRHL

SEQ ID NO: 377 - DNA, 1059 bp, Rattus norvegicus
  ref <308>: DATABASE ACCESSION NUMBER: EMBL / AF001953
  ref <309>: DATABASE ENTRY DATE: 2000-03-03
atggcaaccgatgggctgcacgagaacgagacgctggcgtcgctgaagagcgaggccgagagcctcaagggcaagctagaggaggagcgggcgaagctgcatgacgtggagcttcaccaggtggccgagcgggtggaggccctgggccagtttgtcatgaagaccagaaggaccctcaaaggacacgggaacaaagtcctgtgcatggattggtgcaaagacaagcggaggatcgtgagctcctcacaggatgggaaggtgattgtctgggattccttcactactaacaaggagcacgcggtcaccatgccttgcacctgggtgatggcgtgtgcttatgccccatcaggatgtgccattgcttgtggtggtctggataataagtgttccgtgtacccactgacatttgacaagaacgagaacatggctgccaagaagaagtctgtcgctatgcacaccaactacctgtctgcctgcagcttcaccaactcagacatgcagatcctgacagccagcggtgatggcacttgcgccctgtgggatgtggaaagtggacagctgttgcagagcttccatggccatggggctgacgtcctctgcttggacctggccccctcagaaactggaaacaccttcgtgtctgggggttgtgacaagaaggccatggtgtgggacatgcgctctggccagtgtgtgcaagcctttgaaactcatgaatctgatgtcaacagtgtccgatactaccccagtggagatgcttttgcttccggatcagatgatgccacgtgtcgcctctatgacctgagggcagatagagaggttgccatttactccaaggagagtattatatttggagcatcaagcgtggatttctccctcagtggccgcctgctctttgctgggtacaatgactataccatcaatgtctgggatgttctcaagggctcccgggtctccatcctgtttggacatgaaaaccgtgttagcactctgcgagtgtctcctgatgggacagcattctgctcagggtcgtgggatcacaccctaagagtttgggca

SEQ ID NO: 378 - protein, 353 aa, Rattus norvegicus
  ref <308>: DATABASE ACCESSION NUMBER: SWISS-Prot / AAB59974
  ref <309>: DATABASE ENTRY DATE: 2002-06-15
MATDGLHENETLASLKSEAESLKGKLEEERAKLHDVELHQVAERVEALGQFVMKTRRTLKGHGNKVLCMDWCKDKRRIVSSSQDGKVIVWDSFTTNKEHAVTMPCTWVMACAYAPSGCAIACGGLDNKCSVYPLTFDKNENMAAKKKSVAMHTNYLSACSFTNSDMQILTASGDGTCALWDVESGQLLQSFHGHGADVLCLDLAPSETGNTFVSGGCDKKAMVWDMRSGQCVQAFETHESDVNSVRYYPSGDAFASGSDDATCRLYDLRADREVAIYSKESIIFGASSVDFSLSGRLLFAGYNDYTINVWDVLKGSRVSILFGHENRVSTLRVSPDGTAFCSGSWDHTLRVWA

SEQ ID NO: 379 - DNA, 1188 bp, Homo sapiens
  ref <308>: DATABASE ACCESSION NUMBER: EMBL / AF300650
  ref <309>: DATABASE ENTRY DATE: 2000-10-04
atgtgtgatcagacctttctcgttaatgtatttggctcatgtgacaaatgtttcaaacaacgagctctgagaccagttttcaagaagtctcaacaactcagctactgttcaacatgtgcagaaattatggcaaccgaggggctgcacgagaacgagacgctggcgtcgctgaagagcgaggccgagagcctcaagggcaagctggaggaggagcgagccaagctgcacgatgtggagctgcaccaggtggcggagcgggtggaggccctggggcagtttgtcatgaagaccagaaggaccctcaaaggccacgggaacaaagtcctgtgcatggactggtgcaaagataagaggaggatcgtgagctcgtcacaggatgggaaggtgatcgtgtgggattccttcaccacaaacaaggagcacgcggtcaccatgccctgcacgtgggtgatggcatgtgcttatgccccatcgggatgtgccattgcttgtggtggtttggataataagtgttctgtgtaccccttgacgtttgacaaaaatgaaaacatggctgccaaaaagaagtctgttgctatgcacaccaactacctgtcggcctgcagcttcaccaactctgacatgcagatcctgacagcgagcggcgatggcacatgtgccctgtgggacgtggagagcgggcagctgctgcagagcttccacggacatggggctgacgtcctctgcttggacctggccccctcagaaactggaaacaccttcgtgtctgggggatgtgacaagaaagccatggtgtgggacatgcgctccggccagtgcgtgcaggcctttgaaacacatgaatctgacatcaacagtgtccggtactaccccagtggagatgcctttgcttcagggtcagatgacgctacgtgtcgcctctatgacctgcgggcagatagggaggttgccatctattccaaagaaagcatcatatttggagcatccagcgtggacttctccctcagtggtcgcctgctgtttgctggatacaatgattacactatcaacgtctgggatgttctcaaagggtcccgggtctccatcctgtttggacatgaaaaccgcgttagcactctacgagtttcccccgatgggactgctttctgctctggatcatgggatcataccctcagagtctgggcctaa

SEQ ID NO: 380 - protein, 353 aa, Homo sapiens
  ref <308>: DATABASE ACCESSION NUMBER: SWISS-Prot / O14775
  ref <309>: DATABASE ENTRY DATE: 2002-06-15
MATEGLHENETLASLKSEAESLKGKLEEERAKLHDVELHQVAERVEALGQFVMKTRRTLKGHGNKVLCMDWCKDKRRIVSSSQDGKVIVWDSFTTNKEHAVTMPCTWVMACAYAPSGCAIACGGLDNKCSVYPLTFDKNENMAAKKKSVAMHTNYLSACSFTNSDMQILTASGDGTCALWDVESGQLLQSFHGHGADVLCLDLAPSETGNTFVSGGCDKKAMVWDMRSGQCVQAFETHESDINSVRYYPSGDAFASGSDDATCRLYDLRADREVAIYSKESIIFGASSVDFSLSGRLLFAGYNDYTINVWDVLKGSRVSILFGHENRVSTLRVSPDGTAFCSGSWDHTLRVWA

SEQ ID NO: 381 - DNA, 1059 bp, Rattus norvegicus; identical to SEQ ID NO: 377
  ref <308>: DATABASE ACCESSION NUMBER: EMBL / AF001953
  ref <309>: DATABASE ENTRY DATE: 2000-03-03

SEQ ID NO: 382 - protein, 353 aa, Rattus norvegicus; identical to SEQ ID NO: 378
  ref <308>: DATABASE ACCESSION NUMBER: SWISS-Prot / AAB59974
  ref <309>: DATABASE ENTRY DATE: 2002-06-15

SEQ ID NO: 383 - DNA, 1188 bp, Homo sapiens; identical to SEQ ID NO: 379
  ref <308>: DATABASE ACCESSION NUMBER: EMBL / AF300650
  ref <309>: DATABASE ENTRY DATE: 2000-10-04

SEQ ID NO: 384 - protein, 353 aa, Homo sapiens; identical to SEQ ID NO: 380
  ref <308>: DATABASE ACCESSION NUMBER: SWISS-Prot / O14775
  ref <309>: DATABASE ENTRY DATE: 2002-06-15

SEQ ID NO: 385 - DNA, 3471 bp, Rattus norvegicus
  ref <308>: DATABASE ACCESSION NUMBER: EMBL / AF002251
  ref <309>: DATABASE ENTRY DATE: 1997-10-03
gcctctccgtgggctccgccccgccccgccccgcccgcgggctgcgggccctttaaaagcgcgctcggccggagccgccccttctgttggtcaggctctggagctgctgccgcctgcgggccttggccatggcgtccccggccattgggcagcgtccctacccgctgctgctagaccccgagccgccgcggtatctgcagagcctgggtggcaccgagccgccaccgcccgcccggccgcgtcgctgtatccccacggccctgatctccgcgtccggggcgtcagagggtcgcggtagcaggaggaatgcccggggggacccggagcccacgccccgggactgccgacacgctcgccctgtccggcccggtctgcagcagagactgcggcggcgacctgggtcgcaccgaccccgcgacgtgaggagcatcttcgagcaaccgcaggatccccgcgtcttagccgagagaggagagggacaccgtttcgcggaattggcgctccggggtggcccgggctggtgtgacctgtgcggacgagaggtgctgcggcaggcgctgcgctgcgctaattgtaaattcacctgccacccagagtgccgcagcctgatccagctggactgcagacagaaggagggccctgccctggacagacagtctccagaaagcaccctcaccccaaccttcaacaagaatgtctgtaaggctgtggaggagacacagcacccgcccaccatacaggagatcaagcagaagattgacagctataacagccgggagaagcactgcctgggcatgaagttgagtgaagatggcacctacacaggtttcatcaaagtgcatttgaaactccgccggccagtgacggtgcctgctgggattcggccccagtccatctatgatgccattaaggaagtgaaccctgcagctaccacagacaagcggacatccttctacctgccacttgacgccatcaagcagctacacattagcagcagcaccactgtcagtgaggtcatccaggggctgctcaagaaattcatggttgtggacaacccacagaagtttgccctttttaagcggatacacaaagatggacaagtgctcttccagaaactctccatcgctgactgccctctctaccttcgtctgctcgctggtcctgacaccgacgtgctcagctttgtgctcaaggagaatgaaaccggagacgtagagtgggatgccttttccattcctgaactccagaacttcttaactatcctggaaaaagaggagcaggacaagatccatcaactgcagaagaagtacaacaaattccggcagaaactggaggaggccttacgagagtcccaagggaagcctgggtaaccagcttacttcctgtcctctcagtgccctccaatttattttgttaattattttgcaatgaacagttattctcaaggcacctctgatgtgtccacctgtgcctgcccagcagttaacagatgtggcacaaagtctcttccacgaagtgtctgtgcagggtttgattcctgctaacccaccacaccatggctctggagattttccgtctgggatcagaactcctgtggaatgaccagtatttcccctgttcaatctgctggcttttcggaaaccaaatggttgcctctctgctcaccaaactccaaccaatcaccagctggcaaaaaggaatgaaaggttttagagcctgggttttttctctggatttagttctgttcctttttcttttttctgccacacagagtatatttatgggtcaaatgtggcatattcattttagctaagtccttgaaagcaggaaaatgctcgtgaaaggactgtcgtccttgcccccaaggtgcctcctcttctcttgtgctagaccctcggtcagcctgagattccagaagcgacatctctcactgcccagcaggccgcatgctgcaaacacagacacacacacacacatctgtgtgggacttcggcatgtctcttccagtgttgctatgctgaaatcttaacttaatgttgccattcttatgggtttctaccaaagagaaaccagccattgacttatcaattttagtttcctgctgagtcgccagaagtattacagcaaagcacatccaagccgctcgtggcctgtgcctgcagtgggggcctctccttggccttcagttccacctccgtcctccaacttgggctttagggtctccagctgttgcctgagtagtagctttgattacagtggtaaggtcctccaacttgggagtcctttctggtgggaagcatggtctgctcacacagcatgggcaaacctgtgggcctgactttcctggtgacttcagtgcctttttgttttcagagaaaagagcagggcatgtttgcttgtagctctcctgctggcttgccccagcaggaagtaggtgctatagagcaaggacaggaggtttctcagagcacagggcgacgatcacacacctctttcccatcaagcttcctgatcaggctttgactttgaagattcgaaattattagactgcactgacagcatcagattaggactccaactcttgactaattcaaacttaaaacaaattagccagactataccacccagtagccaggacacaaagacgctcaatacggagggagaaaaacttgtccttttagaagaaggccagtgttccaatcgagcctccagaggagaccgctctcatgttgtgcttgcctttccacacccctcgggttgttttaagcccaagcttctctgtgtagcctaaaaagttccctcccagcccaggctgaggccacattgctcctgtcccagaagaatgccaaatccctgtcattccaagttttcagagctgcaaaagcaccatgagctagcgactctgaggctgtgcatgccatagcccctggctccctgccgcctcaggctcagccttacactcccctcccttgagaagtcccctttctgctgtgtattacagggacatacggaaactcattcccttcatcctgcatgtgtgtagcattaggagaaggcatggctcctgctgcaaacactgtgaatgctgctcagacctccctccatggatggctattttatttttgaacaagaaaaaaaattcatgtatatataaaatgtatatacatatatatgtatatacacatagaggcatatagctatatataaagaaaaggtgtttattcagaaagggatgatcagattcagactttaaagcacagttagacccgggacctctactgaggttgagccgctggaaacgtggagttccttaagtctcagaggggtctaactgctggtagtgccttctatggttgtatggctctgtggttggttgttttgagaatattttctttctaaatgtttttcttatacatggtttttttgatatcaagcttatcgataccgtcgacctcgaggggggcccgtacc

SEQ ID NO: 386 - protein, 413 aa, Rattus norvegicus
  ref <308>: DATABASE ACCESSION NUMBER: SWISS-Prot / AAB71821
  ref <309>: DATABASE ENTRY DATE: 2003-02-01
MASPAIGQRPYPLLLDPEPPRYLQSLGGTEPPPPARPRRCIPTALISASGASEGRGSRRNARGDPEPTPRDCRHARPVRPGLQQRLRRRPGSHRPRDVRSIFEQPQDPRVLAERGEGHRFAELALRGGPGWCDLCGREVLRQALRCANCKFTCHPECRSLIQLDCRQKEGPALDRQSPESTLTPTFNKNVCKAVEETQHPPTIQEIKQKIDSYNSREKHCLGMKLSEDGTYTGFIKVHLKLRRPVTVPAGIRPQSIYDAIKEVNPAATTDKRTSFYLPLDAIKQLHISSSTTVSEVIQGLLKKFMVVDNPQKFALFKRIHKDGQVLFQKLSIADCPLYLRLLAGPDTDVLSFVLKENETGDVEWDAFSIPELQNFLTILEKEEQDKIHQLQKKYNKFRQKLEEALRESQGKPG

SEQ ID NO: 387 - DNA, 3278 bp, Homo sapiens
  ref <308>: DATABASE ACCESSION NUMBER: EMBL / AK056568
  ref <309>: DATABASE ENTRY DATE: 2002-08-06
ccatctatgatgccatcaaggaggtgaacctggcggctaccacggacaagcggacatccttctacctgcccctagatgccatcaagcagctgcacatcagcagcaccaccaccgtcagtgaggtcatccaggggctgctcaagaagttcatggttgtggacaatccccagaagtttgcactttttaagcggatacacaaggacggacaaggtaggagaaagagtgaacccaaccagaccgttcccttcctacctgtgtccaagcccacccactaaaactcctgccggccttgggtgggagctgtgggcttctcctgagcaccaggggtccagctgcccatgtggtgttcagatctgtggaatccgggcagggaggcaagagcagagtccctgactctgcatgtgacttcaggaaaaccacaccctaggctcccatttcctgatctgtgcaatgggaggaatctgccccaccattcctaatctttcaggagatgatgtgaatggaatcatgctttaaactctgagcagacacccaagataaaaggttattgccctgttcattactgtcatgttcatttcattaaaaggcccgtgtctacttccagttgtacgtaccccacctctgcatttccaatcctttcccgcaagcctgggccccgcccttcttttctgggaagagctcccagcaccctctcttggtttgcagtgctcttccagaaactctccattgctgaccgccccctctacctgcgcctgcttgctgggcctgacacggaggtcctcagctttgtgctaaaggagaatgaaactggagaggtagagtgggatgccttctccatccctgaacttcagaacttcctaacaatcctggaaaaagaggagcaggacaaaatccaacaagtgcaaaagaagtatgacaagtttaggcagaaactggaggaggccttaagagaatcccagggcaaacctgggtaaccggtcctgcttcctctcctcctggtgcattcagatttatttgtattattaattattattttgcaacagacactttttctcaggacatctctggcaggtgcatttgtgcctgcccagcagttccagctgtggcaaaagtctcttccatggacaagtgtttgcacgggggttcagctgtgcccgcccccaggctgtgccccaccacagattctgccaaggatcagaactcatgtgaaacaaacagctgacgtcctctctcgatctgcaagcctttcaccaaccaaatagttgcctctctcgtcaccaaactggaacctcacaccagccggcaaaggaaggaagaaaggttttagagctgtgtgttctttctctggctttgattcttctttgagttctcttacttgccacgtacaggaccattatttatgagtgaaaagttgtagcacattccttttgcaggtctgagctaagcccctgaaagcagggtaatgctcataaaaggactgttcccgcggccccaaggtgcctgttgttcacacttaagggaagtttataaagctactggccccagatgctcagggtaaggagcaccaaagctgaggctggctcagagatctccagagaagctgcagcctgccctggccctggctctggccctggcccacattgcacatggaaacccaaaggcatatatctgcgtatgtgtggtacttagtcacatctttgtcaacaacctgttcgtttttaagttacaaatttgaatttaatgttgtcatcatcgtcatgtgtttccccaaagggaagccagtcattgaccatttaaaaagtctcctgctaagtatggaaatcagacagtaagagaaagccaaaaagcaatgcagagaaaggtgtccaagctgtcttcagccttccccagctaaagagcagaggagggcctgggctacttgggttccccatcggcctccagcactgcctccctcctcccactgcgactctgggatctccaggtgctgcccaaggagttgccttgattacagagaggggagcctccaattcggccaacttggagtcctttctgttttgaagcatgggccagacccggcactgcgctcggagagccggtgggcctggcctccccgtcgacctcagtgcctttttgttttcagagagaaataggagtagggcgagtttgcctgaagctctgctgctggcttctcctgccaggaagtgaacaatggcggcggtgtgggagacaaggccaggagagcccgcgttcagtatgggttgagggtcacagacctccctcccatctgggggcctgagttttgactccaatcagtgataccagaccacattgacagggaggatcaaattcctgacttacatttgcactggcttcttgtttaggctgaatcctaaaataaattagtcaaaaaattccaacaagtagccaggactgcagagacactccagtgcagagggagaaggacttgtaattttcaaagcagggctggttttccaacccagcctctgagaaaccatttctttgctatcctctgccttcccaagtccctcttgggtcggttcaagcccaagcttgttcgtgtagcttcagaagttccctctccgacccaggctgagtccatactgcccctgatcccagaaggaatgctgacccctcgtcgtatgaactgtgcatagtctccagagcttcaaaggcaacacaagctcgcaactctaagatttttttaaaccacaaaaaccctggttagccatctcatgctcagccttatcacttccctccctttagaaactctctccctgctgtatattaaagggagcaggtggagagtcattttccttcgtcctgcatgtctctaacattaatagaaggcatggctcctgctgcaaccgctgtgaatgctgctgagaacctccctctatggggatggctattttatttttgagaaggaaaaaaaagtcatgtatatatacacataaaggcatatagctatatataaagagataagggtgtttatgaaatgagaaaattattggacaattcagactttactaaagcacagttagacccaaggcctatgctgaggtctaaacctctgaaaaaagtatagtatcgagtacccgttccctcccagaggtgggagtaactgctggtagtgccttctttggttgtgttgctcagtgtgtaagtgtttgtttccaggatattttctttttaaatgtctttcttatatgggttttaaaaaaaagtaataaaagcctgttgcaaaaatgactcatgtt

SEQ ID NO: 388 - protein, 390 aa, Homo sapiens
  ref <308>: DATABASE ACCESSION NUMBER: Refseq / NP_113625
  ref <309>: DATABASE ENTRY DATE: 2002-11-05
MASPAIGQRPYPLLLDPEPPRYLQSLSGPELPPPPPDRSSRLCVPAPLSTAPGAREGRSARRAARGNLEPPPRASRPARPLRPGLQQRLRRRPGAPRPRDVRSIFEQPQDPRVPAERGEGHCFAELVLPGGPGWCDLCGREVLRQALRCTNCKFTCHPECRSLIQLDCSQQEGLSRDRPSPESTLTVTFSQNVCKPVEETQRPPTLQEIKQKIDSYNTREKNCLGMKLSEDGTYTGFIKVHLKLRRPVTVPAGIRPQSIYDAIKEVNLAATTDKRTSFYLPLDAIKQLHISSTTTVSEVIQGLLKKFMVVDNPQKFALFKRIHKDGQVLFQKLSIADRPLYLRLLAGPDTEVLSFVLKENETGEVEWDAFSIPELQNFLSSWCIQIYLYY

SEQ ID NO: 389 - DNA, 1586 bp, Rattus norvegicus
  ref <308>: DATABASE ACCESSION NUMBER: EMBL / AF002281
  ref <309>: DATABASE ENTRY DATE: 1998-05-21
gatcccccgggctgcagggaactaagtgggttgtccgggttccgagactagcgctctgcagagacaccagatcgctggaccctctcacaggaaggcgtcatgccccaaaacgtagttctcccgggccctgcgtcctgggggttcagactctcaggaggcatagacttcaaccagcctttggtcatcaccaggatcactccgggaagcaaggcagaagccgccaacctgtgccctggcgacatgatactggctatcgatggctttggtacggagtccatgactcatgctgatgctcaggacaggatcaaagcagcatcttaccagttgtgtctcaagattgacagggcagaaactcgcttatgtcccgcagtgtcggaagatgggaaagcgcatccctttaaaatcaacctagaggctgaaccgcaggatgtgaactactttgaacacaagcacaatattcggcccaaacctttcataattccaggccgaaccagtggctgcagcactccttccggtattgactgtggcagtggacgtagcaccccttcttccgtcagtaccgttagtacgatctgcccaggtgacttgaaagttgctgctaagatggcccctaacattcctttggaaatggaacttccgggcgtgaagattgtacatgctcagtttaacactcctatgcagttgtactcagatgacaatattatggaaacacttcagggtcaggtttccacagctctaggggagacaccctccatgagtgaacccacagcttcagttccccctcagtcggacgtgtaccgaatgctgcacgacaatcgggatgaaccagctgctcctcgccagtcaggctccttcagggtcctgcaggagctggtgaacgacgggtctgatgaccgtcctgctggaactcgaagtgtgaggccggttactaaagtccatggcggggctggcggtgcccagaggatgccactctgtgacaagtgtggcagtggtattgtaggtgctgtggtcaaggcccgggataagtaccggcaccccgagtgctttgtgtgtgctgactgtaacctcaacctcaagcagaaaggttacttcttcgtggagggggagctgtattgtgagatgcacgcaagagcccgggcgaggcccccagaaggctacgacaccgtcactctgtaccccaaagcttaaattctttacagacgagaacactcattcacgcatgcgcacacacgaacaccggcggatgataaggaggacttcaagcaggaggagtgcgaaggtcacctcccaatcgaaagcgaggcttttagtcatttatcttactgtgtagtgagggaaagacatggggagcagaggcctgcctactgacaaaagtattatctgtgggttgtaattctttatctttggggacagcaatggtgacatttaaagcaataacgttgtaataccatgctctacggtttccatctgttacacgcccatccgatgcgtgaacacctggatatgtagggggggtccacttgtctttccttccaagttgcttttggtaattgtagtaacgccaaattacagctttgtactggaac

SEQ ID NO: 390 - protein, 362 aa, Rattus norvegicus
  ref <308>: DATABASE ACCESSION NUMBER: SWISS-Prot / AAC16671
  ref <309>: DATABASE ENTRY DATE: 2003-02-01
MPQNVVLPGPASWGFRLSGGIDFNQPLVITRITPGSKAEAANLCPGDMILAIDGFGTESMTHADAQDRIKAASYQLCLKIDRAETRLCPAVSEDGKAHPFKINLEAEPQDVNYFEHKHNIRPKPFIIPGRTSGCSTPSGIDCGSGRSTPSSVSTVSTICPGDLKVAAKMAPNIPLEMELPGVKIVHAQFNTPMQLYSDDNIMETLQGQVSTALGETPSMSEPTASVPPQSDVYRMLHDNRDEPAAPRQSGSFRVLQELVNDGSDDRPAGTRSVRPVTKVHGGAGGAQRMPLCDKCGSGIVGAVVKARDKYRHPECFVCADCNLNLKQKGYFFVEGELYCEMHARARARPPEGYDTVTLYPKA

SEQ ID NO: 391 - DNA, 1722 bp, Homo sapiens
  ref <308>: DATABASE ACCESSION NUMBER: EMBL / AF039018
  ref <309>: DATABASE ENTRY DATE: 1999-03-15
gcggccggtcgaccggagtggctgccctgcgcggggacactcagagcccggtgggcgggaggaaggcggcatgccccagacggtgatcctcccgggccctgcgccctggggcttcaggctctcagggggcatagacttcaaccagcctttggtcatcaccaggattacaccaggaagcaaggcggcagctgccaacctgtgtcctggagatgtcatcctggctattgacggctttgggacagagtccatgactcatgctgatgcgcaggacaggattaaagcagcagctcaccagctgtgtctcaaaattgacaggggagaaactcacttatggtctccacaagtatctgaagatgggaaagcccatcctttcaaaatcaacttagaatcagaaccacaggacgggaactactttgaacacaagcataatattcggcccaaacctttcgtgatcccgggccgaagcagtggatgcagcactccctccgggattgactgtggcagtggacgcagcaccccttcttctgtcagtactgttagtaccatttgcccaggtgacttgaaagttgcggctaagctggcccctaacattcctttggaaatggaacttcctggtgtgaagattgtacatgctcagtttaatacacctatgcagttgtactcagatgacaatattatggaaacactccagggtcaggtttcaacagccctaggggaaacacctttgatgaacgagcccacagcctcggtgccccccgagtcggacgtgtaccggatgctccacgacaatcggaatgagcccacacagcctcgccagtcgggctccttcagagtgctccagggaatggtggacgatggctctgatgaccgtccggctggaacgcggagtgtgagagctccggtgacgaaagtccatggcggttcaggcggggcacagaggatgccgctctgtgacaaatgtgggagtggcatagttggtgctgtggtgaaggcgcgggataagtaccggcaccctgagtgcttcgtgtgtgccgactgcaacctcaacctcaagcaaaagggctacttcttcatagaaggggagctgtactgcgaaacccacgcaagagcccgcacaaagcccccagagggctatgacacggtcactctgtatcccaaagcttaagtctctgcaggcgtggcacgcacgcacgcacccacccacgcgcacttacacgagaagacattcatggctttgggcagaaggattgtgcagattgtcaactccaaatctaaagtcaaggctttagacctttatcctattgtttattgaggaaaaggaatgggaggcaaatgcctgctatgtgaaaaaaacatacacttagctatgttttgcaactctttttggggctagcaataatgatatttaaagcaataattttttgtatgtcatactccacaatttacatgtatattacagccatcaaacacataaacatcaagatatttgaaggactctaattgtctttccttgacaagttgattttgcaattgtggtaaatagcaaataacaatcttgtattctaacataatctgcagttgtctgtatgtgttttaactattacagtgcatgttagggagaaattccctgaatttctttagttttgtattcaaacaattatgccactcgatgcaacaaacataataaatacataaaggatttaaaaaaaaaaaaaaaaaaaa

SEQ ID NO: 392 - protein, 365 aa, Homo sapiens
  misc_feature (1)..(365): Xaa=Unknown amino acid
MPQTVILPGPAPWGFRLSGGIDFNQPLVITRITPGSKAAAANLCPGDVILAIDGFGTESMTHADAQDRIKAAAHQLCLKIDRGETHLWSPQVSEDGKAHPFKINLESEPQDGNYFEHKHNIRPKPFVIPGRSSGCSTPSGIDCGSGRSTPSSVSTVSTICPGDLKVAAKLAPNIPLEMELPGVKIVHAQFNTPMQLYSDDNIMETLQGQVSTALGETPLMNEPTASVPPESDVYRMLHDNRNEPTQPRQSGSFRVLQGMVDDGSDDRPAGTRSVRAPVTKVHGGSGGAQRMPLCDKCGSGIVGAVVKARDKYRHPECFVCADCNLNLKQKGYFFIEGELYCETHARARTKPPEGYDTVTLYPKAX

SEQ ID NO: 393 - DNA, 2002 bp, Rattus norvegicus
  ref <308>: DATABASE ACCESSION NUMBER: EMBL / AF003825
  ref <309>: DATABASE ENTRY DATE: 2001-11-30
gaattcggcacgaggaaagacacgcaagcacaggcacaccggctctggaattccattagaaaaaagtgagccgagcaagggttagcgggagaagatttttttttttttgaatctttttcttcgtcttggtgccaaagaagcgactctggtctcccgtcctagaagctcctactggattgctcctattccgtcggtggatttctttcctattcgcatttattctgaacccctccctcgctgcttccttccagcccttcactttcagatcgcctcgccccacctctccagtcccctcctgggaagtgcaggggaattggacccacggggactcacgccttcccggacgcgcgagcaaagggctgggctgacctcaggaccaggctgttggcttagaaggcagccagacacatagctacgtgtgtgttgatttcagtggcaaggggggacgtcgagaggcagcccaccggcccggcctcctaaccctccccctccaaccagcagtgagaatcccaggactcgggatcttcaaccggcggccgcccggcgggatctccgcattggatttgggggtcgttattgctcggctgttattattatcgttattttatttttattttttaaacctaagggagaaagacacatacacacaaaactgtgggatttatttaacatgatcttggcaaacgccttctgcctcttcttctttttagacgaaaccctccgctctttggccagcccttcctccctgcagggctctgagctccacggctggcgcccccaagtggactgtgtccgggccaatgagctgtgtgcggctgaatccaactgcagctccaggtaccgcacccttcggcagtgcctggcaggccgggatcgcaataccatgctggccaataaggagtgccaggcagccctggaggtcttgcaggaaagcccactgtatgactgccgctgcaagcggggcatgaagaaggagctgcagtgtctgcagatctactggagcatccatctggggctgacagagggtgaggagttctatgaagcttccccctatgagcctgtgacctcgcgcctctcggacatcttcaggctcgcttcaatcttctcagggacagggacagacccggcggtcagtaccaaaagcaaccactgcctggatgccgccaaggcctgcaacctgaatgacaactgcaagaagcttcgctcctcttatatctccatctgcaaccgtgagatctctcccaccgaacgctgcaaccgccgcaagtgccacaaggctctgcgccagttctttgaccgtgtgcccagcgagtatacctaccgcatgctcttctgctcctgtcaggaccaggcatgtgctgagcgtcgccggcaaaccatcctgcccagttgctcctatgaggacaaggagaagcccaactgcctggacctgcgcagcctgtgtcgtacagaccacctgtgccggtcccgactggcagatttccacgccaactgtcgagcctcctaccggacaatcaccagctgtcctgcggacaactaccaggcatgtctgggctcctatgctggcatgattgggtttgatatgacacccaactatgtggactccaaccccacgggcatcgtggtgtctccctggtgcaattgtcgtggcagtgggaacatggaagaagagtgtgagaagttcctcagggacttcacggaaaacccatgcctccggaatgccattcaggcctttggtaatggcacagatgtgaacatgtctcccaaaggcccctcactcccagctacccaggcccctcgggtggagaagactccttcactgccagatgacctcagtgacagcaccagcctggggaccagtgtcatcaccacctgcacatctatccaggagcaagggctgaaggccaacaactccaaagagttaagcatgtgcttcacagagctcacgacaaacatcagtccagggagtaaaaaggtgatcaaacttaactcaggctccagc

SEQ ID NO: 394 - protein, 464 aa, Rattus norvegicus
  ref <308>: DATABASE ACCESSION NUMBER: SWISS-Prot / AAD09310
  ref <309>: DATABASE ENTRY DATE: 2002-10-01
MILANAFCLFFFLDETLRSLASPSSLQGSELHGWRPQVDCVRANELCAAESNCSSRYRTLRQCLAGRDRNTMLANKECQAALEVLQESPLYDCRCKRGMKKELQCLQIYWSIHLGLTEGEEFYEASPYEPVTSRLSDIFRLASIFSGTGTDPAVSTKSNHCLDAAKACNLNDNCKKLRSSYISICNREISPTERCNRRKCHKALRQFFDRVPSEYTYRMLFCSCQDQACAERRRQTILPSCSYEDKEKPNCLDLRSLCRTDHLCRSRLADFHANCRASYRTITSCPADNYQACLGSYAGMIGFDMTPNYVDSNPTGIVVSPWCNCRGSGNMEEECEKFLRDFTENPCLRNAIQAFGNGTDVNMSPKGPSLPATQAPRVEKTPSLPDDLSDSTSLGTSVITTCTSIQEQGLKANNSKELSMCFTELTTNISPGSKKVIKLNSGSSRARLSAALTALPLLMLTLAL

SEQ ID NO: 395 - DNA, 1395 bp, Homo sapiens
  ref <308>: DATABASE ACCESSION NUMBER: EMBL / U93703
  ref <309>: DATABASE ENTRY DATE: 2001-11-30
atgatcttggcaaacgccttctgcctcttcttctttctagacgagaccctccgctctttggccagcccttcctccctgcagggccccgagctccacggctggcgccccccagtggactgtgtccgggccaatgagctgtgtgccgccgaatccaactgcagctctcgctaccgcactctgcggcagtgcctggcaggccgcgaccgcaacaccatgctggccaacaaggagtgccaggcggccttggaggtcttgcaggagagcccgctgtacgactgccgctgcaagcggggcatgaagaaggagctgcagtgtctgcagatctactggagcatccacctggggctgaccgagggtgaggagttctacgaagcctccccctatgagccggtgacctcccgcctctcggacatcttcaggcttgcttcaatcttctcagggacaggggcagacccggtggtcagcgccaagagcaaccattgcctggatgctgccaaggcctgcaacctgaatgacaactgcaagaagctgcgctcctcctacatctccatctgcaaccgcgagatctcgcccaccgagcgctgcaaccgccgcaagtgccacaaggccctgcgccagttcttcgaccgggtgcccagcgagtacacctaccgcatgctcttctgctcctgccaagaccaggcgtgcgctgagcgccgccggcaaaccatcctgcccagctgctcctatgaggacaaggagaagcccaactgcctggacctgcgtggcgtgtgccggactgaccacctgtgtcggtcccggctggccgacttccatgccaattgtcgagcctcctaccagacggtcaccagctgccctgcggacaattaccaggcgtgtctgggctcttatgctggcatgattgggtttgacatgacacctaactatgtggactccagccccactggcatcgtggtgtccccctggtgcagctgtcgtggcagcgggaacatggaggaggagtgtgagaagttcctcagggacttcaccgagaacccatgcctccggaacgccatccaggcctttggcaacggcacggacgtgaacgtgtccccaaaaggcccctcgttccaggccacccaggcccctcgggtggagaagacgccttctttgccagatgacctcagtgacagtaccagcttggggaccagtgtcatcaccacctgcacgtctgtccaggagcaggggctgaaggccaacaactccaaagagttaagcatgtgcttcacagagctcacgacaaatatcatcccagggagtaacaaggtgatcaaacctaactcaggccccagcagagccagaccgtcggctgccttgaccgtgctgtctgtcctgatgctgaaacaggccttgtag

SEQ ID NO: 396 - protein, 464 aa, Homo sapiens
  ref <308>: DATABASE ACCESSION NUMBER: SWISS-Prot / O00451
  ref <309>: DATABASE ENTRY DATE: 2002-06-15
MILANVFCLFFFLDETLRSLASPSSLQGPELHGWRPPVDCVRANELCAAESNCSSRYRTLRQCLAGRDRNTMLANKECQAALEVLQESPLYDCRCKRGMKKELQCLQIYWSIHLGLTEGEEFYEASPYEPVTSRLSDIFRLASIFSGTGADPVVSAKSNHCLDAAKACNLNDNCKKLRSSYISICNREISPTERCNRRKCHKALRQFFDRVPSEYTYRMLFCSCQDQACAERRRQTILPSCSYEDKEKPNCLDLRGVCRTDHLCRSRLADFHANCRASYQTVTSCPADNYQACLGSYAGMIGFDMTPNYVDSSPTGIVVSPWCSCRGSGNMEEECEKFLRDFTENPCLRNAIQAFGNGTDVNVSPKGPSFQATQAPRVEKTPSLPDDLSDSTSLGTSVITTCTSVQEQGLKANNSKELSMCFTELTTNIIPGSNKVIKPNSGPSRARPSAALTVLSVLMLKQAL

SEQ ID NO: 397 - DNA, 1182 bp, Rattus norvegicus
  ref <308>: DATABASE ACCESSION NUMBER: EMBL / AF003835
  ref <309>: DATABASE ENTRY DATE: 2000-03-03
ggaagcttccccaccgcaaagcagctagacgtgcgggcagtctcagctgtccactgggagtcgccaacaccatctcttgggctccagggtcgcaatcactaccggggatctccagcaagtcttccggacccacgcgtagaggaggtggtgccaccgcgcgcaaacctggcgcggtcgtgacgtcaggactacgctagattggcaattggctggaggcatgtggcgcggacgggcactggcaggagtgattggatcagctcttaaggggcggggtctggaggcggagcatgctgccgagagcgttgaagtacggcgctccgcacagcttctcgacactcctgtctggaatcgctgtgttctaggtcagatcagacattctgtcacaatgcctgaaatcaatgccagcaatcttgatgaaaaacaggttcagcttctagcagagatgtgtattcttattgatgaaaatgacaataaaattggggctgacaccaagaaaaattgtcacctgaatgaaaacattgacaaaggactaatacatcgagctttcagtgtcttcttgtttaatactgaaaacaagctcctgttacagcagagatcggatgctaaaattacctttccaggttgtttcaccaatagttgctgtagtcatccattaaataaccccggggagctggaagaaaatgatgccatgggtgtcaaacgagcagcacagaagcgcttaaaggcggagctggggatacccttggaagaggttgatctaaatgaaatgaattatctaacaagaatttactacaaggcccaatctgatggtatctggggtgaacatgaaattgattacattttgtttctgaggaagaatgtaaccctgaatccggatcccaacgagattaaaagctattgctatgtatcaaaggaagaactcaaagaaattttgaagaaggaagccaggggcgaaattaagtttactccatggtttaagattattgcagacgcttttctctttaaatggtgggataacttaaaccatttgagtccttttgttgaccatgagaaaatacatagaatgtgaatgtgtaaatgatttgagatttttttctacctactaagaatggtttgattttgttttaaattgggctcccttgtatgacacatagatattttacaaccagaatttgttttgag

SEQ ID NO: 398 - protein, 227 aa, Rattus norvegicus
  ref <308>: DATABASE ACCESSION NUMBER: SWISS-Prot / O35760
  ref <309>: DATABASE ENTRY DATE: 2001-10-16
MPEINASNLDEKQVQLLAEMCILIDENDNKIGADTKKNCHLNENIDKGLIHRAFSVFLFNTENKLLLQQRSDAKITFPGCFTNSCCSHPLNNPGELEENDAMGVKRAAQKRLKAELGIPLEEVDLNEMNYLTRIYYKAQSDGIWGEHEIDYILFLRKNVTLNPDPNEIKSYCYVSKEELKEILKKEARGEIKFTPWFKIIADAFLFKWWDNLNHLSPFVDHEKIHRM

SEQ ID NO: 399 - DNA, 918 bp, Homo sapiens
  ref <308>: DATABASE ACCESSION NUMBER: Refseq / NM_018470
  ref <309>: DATABASE ENTRY DATE: 2001-12-10
tggttgaacggactcaccaggaaacgtgactttcgtgtccgacctctgctgtatcaggattcgattcttggtgttaaacaagacaacgctgaaggctcggtgcagcagccctgcaaaggagtggagccccaacccacgcagggcgtgtcttcatggcttttcctggccaatctgataccaagatgcagtggccagaagtacctgcacttccactcctgtcaagtctctgcatggctatggtgaggaagagctctgcactgggcaaggaagttggccgtcgaagtgaaggaaatggtgatgctggtggcccctttccggcagtcaagttccctatcaaggacattcagttctcggaaagtggtgaaggcacacgcttcctgcatggtgcccgcctctctccactctctagaaatattaaggctaggctgctgctgtatgtcagggctagtcccctcttctatgaatccagaataactctgaagaagccgagtaacaggcatgaagtgaagagaaatcgctgtaacaggaagacagcaaagcagatgctaatgaccacactatttaacgaactggaaccaacgagaaaatacggtattactgaagactgcacttccttgaacagagtgctcttctcagcaaatcggaaatgcctacacaaatcgctttacaagaaagactgtttcaaagcagcacctttctcaatgttctcgttcaggtgacaattcttcttggtctcagctccaattttattgtcattttcatcaataaggatacacatctctgccaggagttgaacctgttgcttgtcgaggtggttagtgtttatttcaggcatcattacaaaatgtctgatctgttctagaaccctaatattaaaggaaaagagaaagaaaaaaaaaaaaaaaaaaaaaaaaaaaa

SEQ ID NO: 400 - protein, 228 aa, Homo sapiens
  ref <308>: DATABASE ACCESSION NUMBER: Refseq / NP_004499
  ref <309>: DATABASE ENTRY DATE: 2001-12-18
MMPEINTNHLDKQQVQLLAEMCILIDENDNKIGAETKKNCHLNENIEKGLLHRAFSVFLFNTENKLLLQQRSDAKITFPGCFTNTCCSHPLSNPAELEESDALGVRRAAQRRLKAELGIPLEEVPPEEINYLTRIHYKAQSDGIWGEHEIDYILLVRKNVTLNPDPNEIKSYCYVSKEELKELLKKAASGEIKITPWFKIIAATFLFKWWDNLNHLNQFVDHEKIYRM

SEQ ID NO: 401 - DNA, 3449 bp, Rattus norvegicus
  ref <308>: DATABASE ACCESSION NUMBER: EMBL / AF004017
  ref <309>: DATABASE ENTRY DATE: 1998-02-20
gctttgatctgttcagataaaggatgtccactgaaaatgtggaagggaagcccaataatcttggggagagaggaagagcccgaagctccactttcctcagggttttccagccaatgtttaaccacagtattttcacttctgcagtctccccggccgcagaacgtatccgattcatcttgggagaggaagatgacagcccagcacctcctcagctcttcacggaactcgatgagctgctggctgtggatggacaggagatggaatggaaggagacagccaggtggattaagtttgaagagaaagtggaacagggtggggagcgatggagcaaaccccatgtggccaccttgtccctgcacagcttgtttgagctgaggacatgtatggagaaaggatccatcatgcttgaccgggaggcctcctctctcccacagctggtggagatgattgcagaccaccagatcgagacaggcctcttgaagcccgacctcaaggataaggtcacctatacgctgctgcggaaacaccgacatcaaaccaagaaatccaaccttcggtccctggctgacattgggaagacagtctccagtgcaagtaggatgttcagcaaccctgataacggtagcccagccatgacccacaggaatctgacatcctccagtctcaatgacatttctgataaaccagagaaggaccagctgaagaataaattcatgaaaaaactgccccgtgatgcagaagcttccaacgtgctcgttggggaggttgacttcttggacactcccttcattgcctttgttcgtctacagcaggctgtcatgctgggtgccctgactgaggtgcctgtgcccacaaggttcttgttcattctcttaggtccaaaggggaaagccaagtcctaccatgagatcggaagagccatcgccaccttgatgtctgacgaggtgttccacgatatcgcttacaaagcgaaagatagacacgacctgattgctggcattgacgagttcttagatgaagtcattgtcctgccacctggggaatgggacccggcaatcagaatagaacctccaaagagcctcccatcatctgacaaaaggaagaatatgtactcaggtggagagaacgttcagatgaatggggacacacctcatgatggaggccacggaggaggaggccacggtgactgtgaagaactacagagaactggccggttctgtggtggattaattaaggacataaagaggaaagcaccattttttgccagtgacttttatgacgctttaaatattcaggctctctcggcaattctcttcatctatctggcgacggtaaccaacgccatcactttcggaggcctgctcggggatgccactgacaacatgcagggtgtgttggagagtttcctgggcactgctgtctctggcgccatcttttgcctttttgcgggtcaaccgctcaccatcttgagtagcacgggacctgttctggtgtttgagaggcttctttttaacttcagcaaggaccatagttttgactacttggagtttcgtctttggattggcctgtggtcagccttcatgtgtctcatcctggtggccactgatgccagcttcctggttcagtacttcacccgtttcacggaagaaggattctcctctctgatcagcttcatcttcatctatgatgctttcaagaagatgatcaagctggcagattactatcccatcaactctgacttcagagtgggctacaacactcacttctcctgtgcttgcctgccacctgacccagttaatctctcagtatctaatgataccacactagccccagaggacctgccaaccgtttcttctactgacatgtaccacaatgctacctttgactgggcctacttgtcaaagaaagagtgtgtgaaatttggaggaaagctcgtgggaaacaactgtgacttcgtgcctgacatcacactcatgtccttcatcctcttcctgggcacttacacctcttctatggccatgaagaaattcaaaaccagccgctattttccaaccacagcaagaaaactgatcagcgattttgccatcatcctgtccattctcatattctgtgtaatagacgccctcgtcggtgtggatactccgaagctaattgtgccaagtgagttcaagccaacaagccctcaccggggttggtttgtcccaccctttggaggaaacccctggtgggtgtgccttgctgctgctatcccggctttgctagtcaccatcctgattttcatggaccagcaaatcacggccgtgattgtgaacaggaaagaacataagctcaagaagggagctggctatcacctggacctgttttgggtcgccatcctcatggtggtgtgctccttcatggctcttccctggtatgtggctgctactgtcatctccatcgctcacatcgacagtctgaagatggagacagagacttctgcgcctggagaacaaccaaagtttctgggagtgagagaacaacgagtcactggaacccttgtgtttattctgactggcctgtcagtctttatggctcccatcttgaagtttatccccatgcctgttctgtatggcgtgttcttgtatatgggggtggcctcactgaacggtgtgcagttcatggaccgtcttaagctgcttctcatgcccctgaagcatcaacctgacttcatctacctgcgccacgtccccctgcgccgagtccacctgttcacctccctgcaggtgttgtgcctggctctgctctggatcctcaagtccacagtggctgcgattatttttccagtcatgatcctggccctggtagctgtcagaaaaggtatggactacctcttctcccagcacgacctcagcttccttgatgatgtcattccagagaaggacaagaaaaagaaggaggatgagaagaagaagaaaaagaagaaaggaagtctggatagcgacaacgacgattctgactgcccatactcagaaaaggtccccagtattaaaattccaatggacatcacggaacagcaacctttcctaagtgataacaaacccttggacagagaaagatcctcaacattccttgaacgccacacatcatgctgataaaattcctttccttgagtcactgggtttacccagtcctccaagatctccagtgaaagtcgtgcctcaaattagaatagaacttgagtctgaagacaacgattatctttggaggaacaagggaacagaaaccacgttgtaacctgttagtcattctcaaaactgacagttctattgttaactgttctaatttttttttgtctatgtattttaaaaacttttgtttggtcactgactgaataatacagtcactctctctgcttctctcttgcataggtaaaaatcaagacaatagtgtcccttttctttaaaaaaaaa

SEQ ID NO: 402 - protein, 1035 aa, Rattus norvegicus
  ref <308>: DATABASE ACCESSION NUMBER: SWISS-Prot / AAC40034
  ref <309>: DATABASE ENTRY DATE: 2003-02-01
MSTENVEGKPNNLGERGRARSSTFLRVFQPMFNHSIFTSAVSPAAERIRFILGEEDDSPAPPQLFTELDELLAVDGQEMEWKETARWIKFEEKVEQGGERWSKPHVATLSLHSLFELRTCMEKGSIMLDREASSLPQLVEMIADHQIETGLLKPDLKDKVTYTLLRKHRHQTKKSNLRSLADIGKTVSSASRMFSNPDNGSPAMTHRNLTSSSLNDISDKPEKDQLKNKFMKKLPRDAEASNVLVGEVDFLDTPFIAFVRLQQAVMLGALTEVPVPTRFLFILLGPKGKAKSYHEIGRAIATLMSDEVFHDIAYKAKDRHDLIAGIDEFLDEVIVLPPGEWDPAIRIEPPKSLPSSDKRKNMYSGGENVQMNGDTPHDGGHGGGGHGDCEELQRTGRFCGGLIKDIKRKAPFFASDFYDALNIQALSAILFIYLATVTNAITFGGLLGDATDNMQGVLESFLGTAVSGAIFCLFAGQPLTILSSTGPVLVFERLLFNFSKDHSFDYLEFRLWIGLWSAFMCLILVATDASFLVQYFTRFTEEGFSSLISFIFIYDAFKKMIKLADYYPINSDFRVGYNTHFSCACLPPDPVNLSVSNDTTLAPEDLPTVSSTDMYHNATFDWAYLSKKECVKFGGKLVGNNCDFVPDITLMSFILFLGTYTSSMAMKKFKTSRYFPTTARKLISDFAIILSILIFCVIDALVGVDTPKLIVPSEFKPTSPHRGWFVPPFGGNPWWVCLAAAIPALLVTILIFMDQQITAVIVNRKEHKLKKGAGYHLDLFWVAILMVVCSFMALPWYVAATVISIAHIDSLKMETETSAPGEQPKFLGVREQRVTGTLVFILTGLSVFMAPILKFIPMPVLYGVFLYMGVASLNGVQFMDRLKLLLMPLKHQPDFIYLRHVPLRRVHLFTSLQVLCLALLWILKSTVAAIIFPVMILALVAVRKGMDYLFSQHDLSFLDDVIPEKDKKKKEDEKKKKKKKGSLDSDNDDSDCPYSEKVPSIKIPMDITEQQPFLSDNKPLDRERSSTFLERHTSC

SEQ ID NO: 403 - DNA, 3240 bp, Homo sapiens
  ref <308>: DATABASE ACCESSION NUMBER: EMBL / AF053753
  ref <309>: DATABASE ENTRY DATE: 2000-01-02
atggaggatgaagctgtcctggacagaggggcttccttcctcaagcatgtgtgtgatgaagaagaagtagaaggccaccataccatttacatcggagtccatgtgccgaagagttacaggagaaggagacgtcacaagagaaagacagggcacaaagaaaagaaggaaaaggagagaatctctgagaactactctgacaaatcagatattgaaaatgctgatgaatccagcggcagcatcctaaaacctctcatctctcctgctgcagaacgcatccgattcatcttgggagaggaggatgacagcccagctccccctcagctcttcacggaactggatgagctgctggccgtggatgggcaggagatggagtggaaggaaacagccaggtggatcaagtttgaagaaaaagtggaacagggtggggaaagatggagcaagccccatgtggccacattgtcccttcatagtttatttgagctgaggacatgtatggagaaaggatccatcatgcttgatcgggaggcttcttctctcccacagttggtggagatgattgttgaccatcagattgagacaggcctattgaaacctgaacttaaggataaggtgacctatactttgctccggaagcaccggcatcaaaccaagaaatccaaccttcggtccctggctgacattgggaagacagtctccagtgcaagtaggatgtttaccaaccctgataatggtagcccagccatgacccataggaatctgacttcctccagtctgaatgacatttctgagaaaccggagaaggaccagctgaagaataagttcatgaaaaaattgccacgtgatgcagaagcttccaacgtgcttgttggggaggttgactttttggatactcctttcattgcctttgttaggctacagcaggctgtcatgctgggtgccctgactgaagttcctgtgcccacaaggttcttgttcattctcttaggtcctaaggggaaagccaagtcctaccacgagattggcagagccattgccaccctgatgtctgatgaggtgttccatgacattgcttataaagcaaaagacaggcacgacctgattgctggtattgatgagttcctagatgaagtcatcgtccttccacctggggaatgggatccagcaattaggatagagcctcctaagagtcttccatcctctgacaaaagaaagaatatgtactcaggtggagagaatgttcagatgaatggggatacgccccatgatggaggtcacggaggaggaggacatggggattgtgaagaattgcagcgaactggacggttctgtggtggactaattaaagacataaagaggaaagcgccattttttgccagtgatttttatgatgctttaaatattcaagctctttcggcaattctcttcatttatctggcaactgtaactaatgctatcacttttggaggactgcttggggatgccactgacaacatgcagggcgtgttggagagtttcctgggcactgctgtctctggagccatcttttgcctttttgctggtcaaccactcactattctgagcagcaccggacctgtcctagtttttgagaggcttctatttaatttcagcaaggacaataattttgactatttggagtttcgcctttggattggcctgtggtccgccttcctatgtctcattttggtagccactgatgccagcttcttggttcaatacttcacacgtttcacggaggagggcttttcctctctgattagcttcatctttatctatgatgctttcaagaagatggtcaagcttgcagattactaccccatcaactccaacttcaaagtgggctacaacactctcttttcctgtacctgtgtgccacctgacccagctaatatctcaatatctaatgacaccacactggccccagagtatttgccaactatgccttctactgacatgtaccataatactacctttgactgggcatttttgtcgaagaaggagtgttcaaaatacggaggaaacctcgtcgggaacaactgtaattttgttcctgatatcacactcatgtcttttatcctcttcttgggaacctacacctcttccatggctctgaaaaaattcaaaactagtccttattttccaaccacagcaagaaaactgatcagtgattttgccattatcttgtccattctcatcttttgtgtaatagatgccctagtaggcgtggacaccccaaaactaattgtgccaagtgagttcaagccaacaagtccaaaccgaggttggttcgttccaccgtttggagaaaacccctggtgggtgtgccttgctgctgctatcccggctttgttggtcactatactgattttcatggaccaacaaattacagctgtgattgtaaacaggaaagaacataaactcaagaaaggagcagggtatcacttggatctcttttgggtggccatcctcatggttatatgctccctcatggctcttccgtggtatgtagctgctacggtcatctccattgctcacatcgacagtttgaagatggagacagagacttctgcacctggagaacaaccaaagtttctaggagtgagggaacaaagagtcactggaacccttgtgtttattctgactggtctgtcagtctttatggctcccatcttgaagtttatacccatgcctgtactctatggtgtgttcctgtataggggagtagcatcccttaatggtgtgcagttcatggatcgtctgaagctgcttctgatgcctctgaagcatcagcctgacttcgtctacctgcgtcatgttcctctgcgcagagtccacctgttcactttcctgcaggtgttgtgtctggccctgctttggatcctcaagtcaacggtggctgctatcatttttccagtaatgatcttggcacttgtagctgtcagaaaaggcatggactacctcttctcccagcatgacctcagcttcctggatgatgtcattccagaaaaggacaagaaaaagaaggaggatgagaagaaaaagaaaaagaagaagggaagtctggacagtgacaatgatgattctgactgcccatactcagaaaaagttccaagtattaaaattccaatggacatcatggaacagcaacctttcctaagcgatagcaaaccttctgacagagaaagatcaccaacattccttgaacgccacacatcatgctaa

SEQ ID NO: 404 - protein, 1079 aa, Homo sapiens [sequence omitted]

SEQ ID NO: 405 - DNA, 3449 bp, Rattus norvegicus; identical to SEQ ID NO: 401
  ref <308>: DATABASE ACCESSION NUMBER: EMBL / AF004017
  ref <309>: DATABASE ENTRY DATE: 1998-02-20

SEQ ID NO: 406 - protein, 1035 aa, Rattus norvegicus; identical to SEQ ID NO: 402
  ref <308>: DATABASE ACCESSION NUMBER: SWISS-Prot / AAC40034
  ref <309>: DATABASE ENTRY DATE: 2003-02-01

SEQ ID NO: 407 - DNA, 3240 bp, Homo sapiens; identical to SEQ ID NO: 403
  ref <308>: DATABASE ACCESSION NUMBER: EMBL / AF053753
  ref <309>: DATABASE ENTRY DATE: 2000-01-02

SEQ ID NO: 408 - protein, 1079 aa, Homo sapiens [sequence omitted]

SEQ ID NO: 409 - DNA, 1590 bp, Rattus norvegicus
  ref <308>: DATABASE ACCESSION NUMBER: EMBL / AF004218
  ref <309>: DATABASE ENTRY DATE: 2001-08-18
acgcgtccgacgttggtggtaccaggctgcccgctgggatgccgtgggctgtgggccggcggtgggcatggatcaccctgtttctgactattgtggcggtgctgatccaggcggtctggctgtggctgggtactcagagcttcgtcttccagagagaagagatagctcagcttgctcgacagtacgcagggctggaccatgagctggccttctctcggctgatcgtggagctgcggaggctgcacccaggccacgtgctgccggatgaggagctgcagtgggtgtttgtgaacgcgggcggctggatgggcgccatgtgtcttttgcacgcctcgctgtctgagtacgtgctgctcttcggcaccgccctgggctcccatggccattcgggacgatactgggctgagatttcagataccatcatctctggcactttccaccagtggagagagggcaccacaaaaagtgaggtctattacccaggagagacggttgtccatggacctggagaggcaacagatgtggagtggggaccaaacacgtggatggtggagtatggccggggtgttattccgtctaccctggcatttgcacttagtgacactattttcagcacccaggacttcctcaccctcttctatacccttcgcgcctatgcccggggcctccggcttgagctcaccacctacctctttggccaagacccctgaccagacaggctgaaggaagacctgcgagtggacaggagcgggcaggaccacatccatttctctactcgctgggactcatgttcactgacagcagcatataccatgcagataattaagttcctgctgtgtgaggaaggacatacatacacatacatccagacacagctcttggggagcaatgagacgcagagatgctaagacttgtatgtactgtaagatcatgcactcacctccatccagagagggtccccgacgtatactccaggggggcgcccagtcatgtttgaacacataccacgagcttgactcacctgactcaggcttttccagagcctcctgctggcattcggggctctgagatagaggattggggtagatgacacagtctgcctcgccctcgctctgatgccgcattccagtagtgatctctggtgaaggaaaagaggagctgcccttcggaggtcccgttcgcctgcagctgtgatgcccttccctccatccctttcctcaccatatgccttatctccattccagtcccctgctatgcaagtgtccctgtggcttgtcctccatgcccccagcgaccagctgggaaagcagaggaatgtagaggaagctgaaggactgaaggaaggaggttctccaccatggagaccctcagggttacaatgggaaagctggctgatgcctggggccagttcccaaagagaggacctggggaagtgagcctggctccgagaagccaccccattccaaaagaagcctttagtgtatgtgtgcacaccttgtcggtctccagacatttctgttgcattctctgtcttcctgtctctctctgttaataaaaacagatcaaacagtaaaaaaaaaaaaaaaaaaa

SEQ ID NO: 410 - protein, 223 aa, Rattus norvegicus
  ref <308>: DATABASE ACCESSION NUMBER: SWISS-Prot / AAD01198
  ref <309>: DATABASE ENTRY DATE: 2003-02-01
MPWAVGRRWAWITLFLTIVAVLIQAVWLWLGTQSFVFQREEIAQLARQYAGLDHELAFSRLIVELRRLHPGHVLPDEELQWVFVNAGGWMGAMCLLHASLSEYVLLFGTALGSHGHSGRYWAEISDTIISGTFHQWREGTTKSEVYYPGETVVHGPGEATDVEWGPNTWMVEYGRGVIPSTLAFALSDTIFSTQDFLTLFYTLRAYARGLRLELTTYLFGQDP

SEQ ID NO: 411 - DNA, 1641 bp, Homo sapiens
  ref <308>: DATABASE ACCESSION NUMBER: EMBL / U75283
  ref <309>: DATABASE ENTRY DATE: 1999-07-02
ggccccggctccctcctgagctgcgccgtgccaggccgcccgccgggatgcagtgggccgtgggccggcggtgggcgtgggccgcgctgctcctggctgtcgcagcggtgctgacccaggtcgtctggctctggctgggtacgcagagcttcgtcttccagcgcgaagagatagcgcagttggcgcggcagtacgctgggctggaccacgagctggccttctctcgtctgatcgtggagctgcggcggctgcacccaggccacgtgctgcccgacgaggagctgcagtgggtgttcgtgaatgcgggtggctggatgggcgccatgtgccttctgcacgcctcgctgtccgagtatgtgctgctcttcggcaccgccttgggctcccgcggccactcggggcgctactgggctgagatctcggataccatcatctctggcaccttccaccagtggagagagggcaccaccaaaagtgaggtcttctacccaggggagacggtagtacacgggcctggtgaggcaacagctgtggagtgggggccaaacacatggatggtggagtacggccggggcgtcatcccatccaccctggccttcgcgctggccgacactgtcttcagcacccaggacttcctcaccctcttctatactcttcgctcctatgctcggggcctccggcttgagctcaccacctacctctttggccaggacccttgaccagccaggcctgaaggaagacctgcggatggacaggagcgggcaggcccgcacatatccacttgctggagcccatgtttacagacagggacatacaccatgcagatcctgagttcctgctgtatgagcagggatatccatgcttatgtatccaaacacagagacccatgggaacaaatgagacacatatagatactgagacctgtgtgtacagtaggaccatgcactcacacccatctggagagggagcccccggtataccaagggagccagttgtgttcagacacacacatcacagcttgactcactaactgaggcctttccatagctccacagcttcccacctcctccccaccaaaccggggttctagagttaaggatgggggagggtattatactgcctcagtctgactcctcaacccagcagcaatttgaggggatgagggggaagaggagctgccttttggaggcccccttcacctgcagctatgatgcccttccccttctcccctgtcctcaccatatgccttatccccattctactcccctgctatgcaagtgcccctgtggcttgtccccaaccccctcagcaacaaagctcagctggggaacgagagtaatttgaagaatgcttgaagtcagcgtcttccattccagaaagacccccattcttcctttgggggtatgatgtggaagctggtttcagcccaggacccaccactgaggagaggatctagacaggtgggcctaattccaaggggcccttcctggcctggagaaggccttttacacacacacaacacatacacacacacacacacacacatatcacagttttcacacagcccctgctgcattctctgtccatctgtctgtttctattaataaagatttgttgatctgttaaaaaaaaaaaaaaaaa

SEQ ID NO: 412 - protein, 223 aa, Homo sapiens
  ref <308>: DATABASE ACCESSION NUMBER: Refseq / NP_005857
  ref <309>: DATABASE ENTRY DATE: 2002-11-05
MQWAVGRRWAWAALLLAVAAVLTQVVWLWLGTQSFVFQREEIAQLARQYAGLDHELAFSRLIVELRRLHPGHVLPDEELQWVFVNAGGWMGAMCLLHASLSEYVLLFGTALGSRGHSGRYWAEISDTIISGTFHQWREGTTKSEVFYPGETVVHGPGEATAVEWGPNTWMVEYGRGVIPSTLAFALADTVFSTQDFLTLFYTLRSYARGLRLELTTYLFGQDP

SEQ ID NO: 413 - DNA, 2099 bp, Rattus norvegicus
  ref <308>: DATABASE ACCESSION NUMBER: EMBL / AF004811
  ref <309>: DATABASE ENTRY DATE: 2001-05-01
gcacccggttctcccgagtccttgccgaagtgtactgcgcgctcagagcagcccgacagtttccagccaaacttcagcaactcctcccttgccgcaccatgccgaagacgatcagtgttcgtgtaaccaccatggatgcagagctggagtttgccattcagcccaacaccactggcaagcagctgtttgaccaggtggtgaaaactattggtttgagagaagtttggttctttggtctgcagtaccaggacacaaaagctttctctacttggctgaaactcaataagaaggtgactgcacaggatgtccggaaggaaagtccgttgctcttcaagttccgggccaagttctatccagaggatgtgtctgaagaactgattcaggatatcacccagcgcctgttctttctgcaagtgaaggagggcattctcaatgatgacatttattgtccacctgaaaccgctgtgctcttggcgtcctatgccgtccagtctaagtatggtgacttcaacaaggaagtgcacaagtctggctacctggctggagataagttgcttccccaaagagtcttggagcagcacaaactcaacaaggaccagtgggaagagcggatccaggtatggcatgaggaacaccggggcatgctcagggaggatgctgtcctggaatatctcaagattgctcaggacctggagatgtatggtgtgaactatttcagcatcaagaacaagaaaggctcagagctgtggctgggtgtggatgccttgggtctcaacatctatgagcagaatgacagattgactcctaagattggcttcccttggagtgaaatcaggaacatctctttcaatgataagaaatttgtcatcaagcctattgacaaaaaggccccggactttgtgttctatgctcctcggcttcggattaacaaaaggatcttggccctgtgcatggggaatcatgagctgtacatgcgtcggcgaaagcctgacaccattgaggtgcagcagatgaaggcccaggctcgagaagagaagcaccagaagcagatggagcgtgctctactggaaaatgagaagaagaagcgtgagctggctgaaaaagagaaggagaagattgaacgggagaaggaagagctgatggagaagctgaagcagattgaggagcagaccaagaaggctcagcaagaactggaagaacagacccgcagggccctagaacttgagcaggaacggaagcgtgcccagagtgaggctgaaaagctggccaaggagcgtcaagaagctgaagaagccaaggaggccctgctgcaggcttctcgggaccagaagaagactcaggaacagctggcttcagaaatggcagagctgacagcacgggtctcccagttggaaatggctcgaaagaagaaggagagtgaggctgaggaatgccaccaaaaggcccagatggtccaggaagacttggagaagactcgcgctgagctgaagacagccatgagtacccctcatgtggcagagcctgctgagaatgaacatgatgagcaggatgagaatggagccgaggccagtgctgagctgcgggctgatgctatggccaaggaccgcagtgaggaagaacgtaccactgaggcagagaagaatgagcgtgtgcagaagcatcttaaggcccttacttcagagctggccaatgcccgagatgagtccaagaagactaccaatgacatgatccatgctgagaacatgcgactgggacgagacaaatacaagaccctgcgccagatccggcagggcaataccaaacagcgcattgatgaatttgagtccatgtagtgggcgcgcagccgttagggacccctcctccttcttccttgtcccccacactcctatagttttgcctaactaacaccctgctggagccactaactagaaaagccttggagccataccaaacattcagtatgaccatgggaccaaatttagtttccctattcatatccttgggcaaacaaatggcccacctgtgtagccaatggaacctcctcttccttctttgtcacactcattcaacatagctctctagaatagaccatttccccc

SEQ ID NO: 414 - protein, 160 aa, Rattus norvegicus
  ref <308>: DATABASE ACCESSION NUMBER: SWISS-Prot / P31977
  ref <309>: DATABASE ENTRY DATE: 2001-10-16
KIALLEEARRRKEDEVEEWQHRAKEAQDDLVKTKEELHLVMTAPPPPPPPVYEPVNYHVQEGLQDEGAEPMGYSAELSSEGILDDRNEEKRITEAEKNERVQRQPLTLSNELSQARDENKRTHNDIIHNENMRQGRDKYKTLRQIRQGNTKQRIDEFEAM

SEQ ID NO: 415 - DNA, 3879 bp, Homo sapiens
  ref <308>: DATABASE ACCESSION NUMBER: EMBL / M69066
  ref <309>: DATABASE ENTRY DATE: 2000-03-04
ggcacgaggccagccgaatccaagccgtgtgtactgcgtgctcagcactgcccgacagtcctagctaaacttcgccaactccgctgcctttgccgccaccatgcccaaaacgatcagtgtgcgtgtgaccaccatggatgcagagctggagtttgccatccagcccaacaccaccgggaagcagctatttgaccaggtggtgaaaactattggcttgagggaagtttggttctttggtctgcagtaccaggacactaaaggtttctccacctggctgaaactcaataagaaggtgactgcccaggatgtgcggaaggaaagccccctgctctttaagttccgtgccaagttctaccctgaggatgtgtccgaggaattgattcaggacatcactcagcgcctgttctttctgcaagtgaaagagggcattctcaatgatgatatttactgcccgcctgagaccgctgtgctgctggcctcgtatgctgtccagtctaagtatggcgacttcaataaggaagtgcataagtctggctacctggccggagacaagttgctcccgcagagagtcctggaacagcacaaactcaacaaggaccagtgggaggagcggatccaggtgtggcatgaggaacaccgtggcatgctcagggaggatgctgtcctggaatatctgaagattgctcaagatctggagatgtatggtgtgaactacttcagcatcaagaacaagaaaggctcagagctgtggctgggggtggatgccctgggtctcaacatctatgagcagaatgacagactaactcccaagataggcttcccctggagtgaaatcaggaacatctctttcaatgataagaaatttgtcatcaagcccattgacaaaaaagccccggacttcgtcttctatgctccccggctgcggattaacaagcggatcttggccttgtgcatggggaaccatgaactatacatgcgccgtcgcaagcctgataccattgaggtgcagcagatgaaggcacaggcccgggaggagaagcaccagaagcagatggagcgtgctatgctggaaaatgagaagaagaagcgtgaaatggcagagaaggagaaagagaagattgaacgggagaaggaggagctgatggagaggctgaagcagatcgaggaacagactaagaaggctcagcaagaactggaagaacagacccgtagggctctggaacttgagcaggaacggaagcgtgcccagagcgaggctgaaaagctggccaaggagcgtcaagaagctgaagaggccaaggaggccttgctgcaggcctcccgggaccagaaaaagactcaggaacagctggccttggaaatggcagagctgacagctcgaatctcccagctggagatggcccgacagaagaaggagagtgaggctgtggagtggcagcagaaggcccagatggtacaggaagacttggagaagacccgtgctgagctgaagactgccatgagtacacctcatgtggcagagcctgctgagaatgagcaggatgagcaggatgagaatggggcagaggctagtgctgacctacgggctgatgctatggccaaggaccgcagtgaggaggaacgtaccactgaggcagagaagaatgagcgtgtgcagaagcacctgaaggccctcacttcggagctggccaatgccagagatgagtccaagaagactgccaatgacatgatccatgctgagaacatgcgactgggccgagacaaatacaagaccctgcgccagatccggcagggcaacaccaagcagcgcattgacgaatttgagtctatgtaatgggcacccagcctctagggacccctcctccctttttccttgtccccacactcctacacctaactcacctaactcatactgtgctggagccactaactagagcagccctggagtcatgccaagcatttaatgtagccatgggaccaaacctagccccttagcccccacccacttccctgggcaaatgaatggctcactatggtgccaatggaacctcctttctcttctctgttccattgaatctgtatggctagaatatcctacttctccagcctagaggtactttccacttgattttgcaaatgcccttacacttactgttgtcctatgggagtcaagtgtggagtaggttggaagctagctcccctcctctcccctccactgtcttcttcaggtcctgagattacacggtggagtgtatgcggtctaggaatgagacaggacctagatatcttctccagggatgtcaactgacctaaaatttgccctcccatcccgtttagagttatttaggctttgtaacgattgggggaataaaaagatgttcagtcatttttgtttctacctcccagatcggatctgttgcaaactcagcctcaataagccttgtcgttgactttagggactcaatttctccccagggtggatgggggaaatggtgccttcaagaccttcaccaaacatactagaagggcattggccattctattgtggcaaggctgagtagaagatcctaccccaattccttgtaggagtataggccggtctaaagtgagctctatgggcagatctaccccttacttattattccagatctgcagtcacttcgtgggatctgcccctccctgcttcaatacccaaatcctctccagctataacagtagggatgagtacccaaaagctcagccagccccatcaggactcttgtgaaaagagaggatatgttcacacctagcgtcagtattttccctgctaggggttttaggtctcttcccctctcagagctacttgggccatagctcctgctccacagccatcccagccttggcatctagagcttgatgccagtaggctcaactagggagtgagtgcaaaaagctgagtatggtgagagaagcctgtgccctgatccaagtttactcaaccctctcaggtgaccaaaatccccttctcatcactcccctcaaagaggtgactgggccctgcctctgtttgacaaacctctaacccaggtcttgacaccagctgttctgtcccttggagctgtaaaccagagagctgctgggggattctggcctagtcccttccacacccccaccccttgctctcaacccaggagcatccacctccttctctgtctcatgtgtgctcttcttctttctacagtattatgtactctactgatatctaaatattgatttctgccttccttgctaatgcaccattagaagatattagtcttggggcaggatgattttggcctcattactttaccacccccacacctggaaagcatatactatattacaaaatgacattttgccaaaattattaatataagaagctttcagtattagtgatgtcatctgtcactataggtcatacaatccattcttaaagtacttgttatttgtttttattattactgtttgtcttctccccagggttcagtccctcaaggggccatcctgtcccaccatgcagtgccccctagcttagagcctccctcaattccccctggccaccaccccccactctgtgcctgaccttgaggagtcttgtgtgcattgctgtgaattagctcacttggtgatatgtcctatattggctaaattgaaacctggaattgtggggcaatctattaatagctgccttaaagtcagtaacttacccttagggaggctgggggaaaaggttagattttgtattcaggggttttttgtgtactttttgggtttttaaaaaattgtttttggaggggtttatgctcaatccatgttctatttcagtgccaataaaatttaggtgacttcaaaaaaaaaaaa

SEQ ID NO: 416 - protein, 576 aa, Homo sapiens
  ref <308>: DATABASE ACCESSION NUMBER: SWISS-Prot / P26038
  ref <309>: DATABASE ENTRY DATE: 2002-06-15
PKTISVRVTTMDAELEFAIQPNTTGKQLFDQVVKTIGLREVWFFGLQYQDTKGFSTWLKLNKKVTAQDVRKESPLLFKFRAKFYPEDVSEELIQDITQRLFFLQVKEGILNDDIYCPPETAVLLASYAVQSKYGDFNKEVHKSGYLAGDKLLPQRVLEQHKLNKDQWEERIQVWHEEHRGMLREDAVLEYLKIAQDLEMYGVNYFSIKNKKGSELWLGVDALGLNIYEQNDRLTPKIGFPWSEIRNISFNDKKFVIKPIDKKAPDFVFYAPRLRINKRILALCMGNHELYMRRRKPDTIEVQQMKAQAREEKHQKQMERAMLENEKKKREMAEKEKEKIEREKEELMERLKQIEEQTKKAQQELEEQTRRALELEQERKRAQSEAEKLAKERQEAEEAKEALLQASRDQKKTQEQLALEMAELTARISQLEMARQKKESEAVEWQQKAQMVQEDLEKTRAELKTAMSTPHVAEPAENEQDEQDENGAEASADLRADAMAKDRSEEERTTEAEKNERVQKHLKALTSELANARDESKKTANDMIHAENMRLGRDKYKTLRQIRQGNTKQRIDEFESM

SEQ ID NO: 417 - DNA, 1342 bp, Rattus norvegicus
  ref <308>: DATABASE ACCESSION NUMBER: EMBL / AF006664
  ref <309>: DATABASE ENTRY DATE: 2002-06-27
ggacagcgggcaccatgcgggaaggctatccccgggggtgggcagtgccactctctgccacccacctggcgctgtgagaccggcgtcgccaccatgttccccagccctgcgctcacacacacgcccttctcagtcaaagacatcctgaacctggagcagcagcagcgcagcctggcggctggggacctgtctgcgcgcctcgaggccaccctggcgcccgcctcctgcatgctggccgccttcaagccggacggctactcaggccccgaggcggcagcgcccggcctggcagagctgcgcgcggagctgggccccgcgccttcgccccccaagtgctctcctgctttcccaaccgcccctacattttatccgcgagcctacggtgaccctgaccccgccaaggaccctcgggcggataagaaagagctgtgcgcgctgcagaaggcggtggagctggacaaagccgagacagacggcgccgagaggcgacgaccacggcggcgacggaagccacgcgtgctcttctcgcaggcgcaggtctatgagctggagcggcgcttcaagcaacagcggtacctgtcgcccgctgagcgcgaccaactggccagcgtgctgaagctcacgtccacgcaggtcaagatctggttccagaaccgccgctacaagtgtaagcgacagcggcaggaccagactctggagctgctggggccgccgccgccgcccgcgcgcaggatcgcggtgccggtgttggtgcgcgacgggaagccctgcctgggggactcggcggcctacgctcccgcctacggcctgggtctcaacgcctacggctacaacgcctacccctatcccggctacggtggcgcggcctgcagtcccgcctacagctgcgccgcgtaccccgccgcgccccccgccgcgcacgccccagccgccagcgccaacagcaacttcgtgaactttggcgtcggggacttgaacacggtgcagagtcccgggatgccacagggcaattcgggcgtctccacgctgcacggcatccgagcctggtagggaaagggcccgtctggggaaccccggaccgactcccacctttaggagaagggcgatgactccggggatggaaaggctcccactgtgtcctgtccctcggatttcacacccacacttgcgcaggcctgggacctttctccgatccatccccttttgttgacctaacctgatgcctcggtcctgggaaagcccttcagggccaaaggcaccctccacggattccatatcaggacccggagcctgggccgggcgcccgggccctgggtgccttgccggcgcccaccggccgggg

SEQ ID NO: 418 - protein, 318 aa, Rattus norvegicus
  ref <308>: DATABASE ACCESSION NUMBER: SWISS-Prot / O35767
  ref <309>: DATABASE ENTRY DATE: 2002-06-15
MFPSPALTHTPFSVKDILNLEQQQRSLAAGDLSARLEATLAPASCMLAAFKPDGYSGPEAAAPGLAELRAELGPAPSPPKCSPAFPTAPTFYPRAYGDPDPAKDPRADKKELCALQKAVELDKAETDGAERRRPRRRRKPRVLFSQAQVYELERRFKQQRYLSPAERDQLASVLKLTSTQVKIWFQNRRYKCKRQRQDQTLELLGPPPPPARRIAVPVLVRDGKPCLGDSAAYAPAYGLGLNAYGYNAYPYPGYGGAACSPAYSCAAYPAAPPAAHAPAASANSNFVNFGVGDLNTVQSPGMPQGNSGVSTLHGIRAW

SEQ ID NO: 419 - DNA, 1585 bp, Homo sapiens
  ref <308>: DATABASE ACCESSION NUMBER: EMBL / U34962
  ref <309>: DATABASE ENTRY DATE: 2000-03-04
gcctggtcccgcctctcctgccccttgtgctcagcgctacctgctgcccggacacatccagagctggccgacgggtgcgcgggcgggcggcggcaccatgcagggaagctgccaggggccgtgggcagcgccgctttctgccgcccacctggcgctgtgagactggcgctgccaccatgttccccagccctgctctcacgcccacgcccttctcagtcaaagacatcctaaacctggaacagcagcagcgcagcctggctgccgccggagagctctctgcccgcctggaggcgaccctggcgccctcctcctgcatgctggccgccttcaagccagaggcctacgctgggcccgaggcggctgcgccgggcctcccagagctgcgcgcagagctgggccgcgcgccttcaccggccaagtgtgcgtctgcctttcccgccgcccccgccttctatccacgtgcctacagcgaccccgacccagccaaggaccctagagccgaaaagaaagagctgtgcgcgctgcagaaggcggtggagctggagaagacagaggcggacaacgcggagcggccccgggcgcgacggcggaggaagccgcgcgtgctcttctcgcaggcgcaggtctatgagctggagcggcgcttcaagcagcagcggtacctgtcggcccccgaacgcgaccagctggccagcgtgctgaaactcacgtccacgcaggtcaagatctggttccagaaccggcgctacaagtgcaagcggcagcggcaggaccagactctggagctggtggggctgcccccgccgccgccgccgcctgcccgcaggatcgcggtgccagtgctggtgcgcgatggcaagccatgcctaggggactcggcgccctacgcgcctgcctacggcgtgggcctcaatccctacggttataacgcctaccccgcctatccgggttacggcggcgcggcctgcagccctggctacagctgcactgccgcttaccccgccgggccttccccagcgcagccggccactgccgccgccaacaacaacttcgtgaacttcggcgtcggggacttgaatgcggttcagagccccgggattccgcagagcaactcgggagtgtccacgctgcatggtatccgagcctggtagggaagggacccgcgtggcgcgaccctgaccgatcccacctcaacagctccctgactctcgtggggagaaggggctcccaacatgaccctgagtcccctggattttgcattcactcctgcggagacctaggaactttttctgtcccacgcgcgtttgttcttgcgcacgggagagtttgtggcggcgattatgcagcgtgcaatgagtgatcctgcagcctggtgtcttagctgtccccccaggagtgccctccgagagtccatgggcacccccggttggaactgggactgagctcgggcacgcagggcctgagatctggccgcccattccgcgagccagggccgggcgcccgggcctttgctatctcgccgtcgcccgcccacgcacccacccgtatttatgtttttacctattgctgtaagaaatgacgatcc

SEQ ID NO: 420 - protein, 324 aa, Homo sapiens
  ref <308>: DATABASE ACCESSION NUMBER: SWISS-Prot / P52952
  ref <309>: DATABASE ENTRY DATE: 2002-06-15
MFPSPALTPTPFSVKDILNLEQQQRSLAAAGELSARLEATLAPSSCMLAAFKPEAYAGPEAAAPGLPELRAELGRAPSPAKCASAFPAAPAFYPRAYSDPDPAKDPRAEKKELCALQKAVELEKTEADNAERPRARRRRKPRVLFSQAQVYELERRFKQQRYLSAPERDQLASVLKLTSTQVKIWFQNRRYKCKRQRQDQTLELVGLPPPPPPPARRIAVPVLVRDGKPCLGDSAPYAPAYGVGLNPYGYNAYPAYPGYGGAACSPGYSCTAAYPAGPSPAQPATAAANNNFVNFGVGDLNAVQSPGIPQSNSGVSTLHGIRAW

SEQ ID NO: 421 - DNA, 1342 bp, Rattus norvegicus; identical to SEQ ID NO: 417
  ref <308>: DATABASE ACCESSION NUMBER: EMBL / AF006664
  ref <309>: DATABASE ENTRY DATE: 2002-06-27

SEQ ID NO: 422 - protein, 318 aa, Rattus norvegicus; identical to SEQ ID NO: 418
  ref <308>: DATABASE ACCESSION NUMBER: SWISS-Prot / O35767
  ref <309>: DATABASE ENTRY DATE: 2002-06-15

SEQ ID NO: 423 - DNA, 1585 bp, Homo sapiens; identical to SEQ ID NO: 419
  ref <308>: DATABASE ACCESSION NUMBER: EMBL / U34962
  ref <309>: DATABASE ENTRY DATE: 2000-03-04

SEQ ID NO: 424 - protein, 324 aa, Homo sapiens; identical to SEQ ID NO: 420
  ref <308>: DATABASE ACCESSION NUMBER: SWISS-Prot / P52952
  ref <309>: DATABASE ENTRY DATE: 2002-06-15

SEQ ID NO: 425 - DNA, 447 bp, Rattus norvegicus
  ref <308>: DATABASE ACCESSION NUMBER: EMBL / AF007554
  ref <309>: DATABASE ENTRY DATE: 2000-08-23
gcagtgtgccagtgccgccgaaagagctatgggcagctggacctctttccaacccgggacacctaccatcctatgagtgaatatcctacctaccacactcacggacgctatgtgccccctgccactaccaaacgtagcccctatgaagaggtttcgacaggcaatggcagtagcggtctctcttacaccaacccggctgtggcaaccacttcggccaacttgtaggagcaagtcaccctacccactcgggcagtggcagttggctccagcagtccactccctcagtggtcgctgccagacccctgcactctgatctgggctggtgagccaggactcctgataggctgatcacagccttcctcagaggctttgtcaccacgttagcctggtgaagcccagccctgccctgagggacactggggtagtggtggctctcagaaagactga

SEQ ID NO: 426 - DNA, 2238 bp, Homo sapiens
  ref <308>: DATABASE ACCESSION NUMBER: EMBL / X52228
  ref <309>: DATABASE ENTRY DATE: 1995-08-14
gaattccctggctgcttgaatctgttctgccccctccccacccatttcaccaccaccatgacaccgggcacccagtctcctttcttcctgctgctgctcctcacagtgcttacagttgttacaggttctggtcatgcaagctctaccccaggtggagaaaaggagacttcggctacccagagaagttcagtgcccagctctactgagaagaatgctgtgagtatgaccagcagcgtactctccagccacagccccggttcaggctcctccaccactcagggacaggatgtcactctggccccggccacggaaccagcttcaggttcagctgccacctggggacaggatgtcacctcggtcccagtcaccaggccagccctgggctccaccaccccgccagcccacgatgtcacctcagccccggacaacaagccagccccgggctccaccgcccccccagcccacggtgtcacctcggccccggacaccaggccgcccccgggctccaccgcccccccagcccacggtgtcacctcggccccggacaccaggccgcccccgggctccaccgcgcccgcagcccacggtgtcacctcggccccggacaccaggccggccccgggctccaccgcccccccagcccatggtgtcacctcggccccggacaacaggcccgccttgggctccaccgcccctccagtccacaatgtcacctcggcctcaggctctgcatcaggctcagcttctactctggtgcacaacggcacctctgccagggctaccacaaccccagccagcaagagcactccattctcaattcccagccaccactctgatactcctaccacccttgccagccatagcaccaagactgatgccagtagcactcaccatagcacggtacctcctctcacctcctccaatcacagcacttctccccagttgtctactggggtctctttctttttcctgtcttttcacatttcaaacctccagtttaattcctctctggaagatcccagcaccgactactaccaagagctgcagagagacatttctgaaatggtgagtatcggcctttccttccccatgctcccctgaagcagccatcagaactgtccacaccctttgcatcaagcctgagtcctttccctctcaccccagtttttgcagatttataaacaagggggttttctgggcctctccaatattaagttcaggtacagttctgggtgtggacccagtgtggtggttggagggttgggtggtggtcatgaccgtaggagggactggtcgcacttaaggttgggggaagagtcgtgagccagagctgggacccgtggctgaagtgcccatttccctgtgaccaggccaggatctgtggtggtacaattgactctggccttccgagaaggtaccatcaatgtccacgacgtggagacacagttcaatcagtataaaacggaagcagcctctcgatataacctgacgatctcagacgtcagcggtgaggctacttccctggctgcagcccagcaccatgccggggccctctccttccagtgcctgggtccccgctctttccttagtgctggcagcgggaggggcgcctcctctgggagactgccctgaccactgcttttccttttagtgagtgatgtgccatttcctttctctgcccagtctggggctggggtgccaggctggggcatcgcgctgctggtgctggtctgtgttctggttgcgctggccattgtctatctcattgccttggtgagtgcagtccctggccctgatcagagccccccggtagaaggcactccatggcctgccataacctcctatctccccaggctgtctgtcagtgccgccgaaagaactacgggcagctggacatctttccagcccgggatacctaccatcctatgagcgagtaccccacctaccacacccatgggcgctatgtgccccctagcagtaccgatcgtagcccctatgagaaggtgagattggccccacaggccaggggaagcagagggtttggctgggcaaggattctgaagggggtacttggaaaacccaaagagcttggaagaggtgagaagtggcgtgaagtgagcaggggagggcctggaaaggatgaggggcagaggtcagaggagttttgggggacaggcctgggaggagactatggaagaaaggggccctcaaaagggagtggccccactgccagaattc

SEQ ID NO: 427 - protein, 1255 aa, Homo sapiens
  ref <308>: DATABASE ACCESSION NUMBER: SWISS-Prot / Q16615
  ref <309>: DATABASE ENTRY DATE: 2002-06-15
MTPGTQSPFFLLLLLTVLTVVTGSGHASSTPGGEKETSATQRSSVPSSTEKNAVSMTSSVLSSHSPGSGSSTTQGQDVTLAPATEPASGSAATWGQDVTSVPVTRPALGSTTPPAHDVTSAPDNKPAPGSTAPPAHGVTSAPDTRPAPGSTAPPAHGVTSAPDTRPAPGSTAPPAHGVTSAPDTRPAPGSTAPPAHGVTSAPDTRPAPGSTAPPAHGVTSAPDTRPAPGSTAPPAHGVTSAPDTRPAPGSTAPPAHGVTSAPDTRPAPGSTAPPAHGVTSAPDTRPAPGSTAPPAHGVTSAPDTRPAPGSTAPPAHGVTSAPDTRPAPGSTAPPAHGVTSAPDTRPAPGSTAPPAHGVTSAPDTRPAPGSTAPPAHGVTSAPDTRPAPGSTAPPAHGVTSAPDTRPAPGSTAPPAHGVTSAPDTRPAPGSTAPPAHGVTSAPDTRPAPGSTAPPAHGVTSAPDTRPAPGSTAPPAHGVTSAPDTRPAPGSTAPPAHGVTSAPDTRPAPGSTAPPAHGVTSAPDTRPAPGSTAPPAHGVTSAPDTRPAPGSTAPPAHGVTSAPDTRPAPGSTAPPAHGVTSAPDTRPAPGSTAPPAHGVTSAPDTRPAPGSTAPPAHGVTSAPDTRPAPGSTAPPAHGVTSAPDTRPAPGSTAPPAHGVTSAPDTRPAPGSTAPPAHGVTSAPDTRPAPGSTAPPAHGVTSAPDTRPAPGSTAPPAHGVTSAPDTRPAPGSTAPPAHGVTSAPDTRPAPGSTAPPAHGVTSAPDTRPAPGSTAPPAHGVTSAPDTRPAPGSTAPPAHGVTSAPDTRPAPGSTAPPAHGVTSAPDTRPAPGSTAPPAHGVTSAPDTRPAPGSTAPPAHGVTSAPDTRPAPGSTAPPAHGVTSAPDTRPAPGSTAPPAHGVTSAPDTRPAPGSTAPPAHGVTSAPDTRPAPGSTAPPAHGVTSAPDNRPALGSTAPPVHNVTSASGSASGSASTLVHNGTSARATTTPASKSTPFSIPSHHSDTPTTLASHSTKTDASSTHHSSVPPLTSSNHSTSPQLSTGVSFFFLSFHISNLQFNSSLEDPSTDYYQELQRDISEMFLQIYKQGGFLGLSNIKFRPGSVVVQLTLAFREGTINVHDVETQFNQYKTEAASRYNLTISDVSVSDVPFPFSAQSGAGVPGWGIALLVLVCVLVALAIVYLIALAVCQCRRKNYGQLDIFPARDTYHPMSEYPTYHTHGRYVPPSSTDRSPYEKVSAGNGGSSLSYTNPAVAAASANL

SEQ ID NO: 428 - DNA, 2742 bp, Rattus norvegicus
  misc_feature (1)..(2742): n=a, c, g or t
  ref <308>: DATABASE ACCESSION NUMBER: EMBL / AF007583
  ref <309>: DATABASE ENTRY DATE: 2001-06-13
cagcagccttgccctctgacttgatatttaccagacccggccagcatggctgtcctgaatccaatgactttgggaatttatctccaactcttcttctgctccatcgtgtcgcagccaactttcatcaacagtgtcctcccaatctcagcagcccttcctggcctggatcagaagaaacgaggcaaccacaaagcatgctgcctactgatgcccccgccacccccactcttcccaccgccattcttcagaggcagccgaagcccgcttctctccccagacatgaagaatcttctggaacttgaggcctccccatcaccctgcatgcaaggctctctaggctctcctggcccccctgggccccagggtccacctgggcttcctggcaaggcaggaccaaagggagaaaagggggatcttggccgcccaggaaggaagggtagacctggacccccaggtgttcctggcgagcccgggcccgttggctggccaggccctgaaggacccaggggcgaaaaaggcgacgtgggtatgatgggtctgccagggtcaagaggaccgatgggctctaagggcttccctggatccagaggggaaaagggatccagaggtgaaagaggggacttgggtcccaaaggagaaaagggtttccctggatttcctggaatgctggggcagaaaggtgaaatgggtccaaagggagaatctgggatagcaggacatcggggccccacaggaagaccagggaaacgaggcaagcagggtcagaagggagacagtggaattatgggcccaccaggcaaacctgggccttctggtcaacctggccgtcaaggtcctcccgggcccccaggacccccatctgcaggacaacttgtaatgggactcaaaggggaaagaggatttccagggcccccgggaagatgcctttgcggaccccctgcgaatgtgaataacccctcctatggggaccccatgtatgggcgcggctcccctcgagttcctgcgatttttgtggtcaacaaccaggaggagcttgagaagctgaacactcaaaatgccattgcctttcgaagagaccagcgatctctgtacttcaaagatagccttggctggctccccatccagctaacccctttctacccagtgggtttacaccataaagcagcatggcacctgtgtggggatggggtcctgcagcctggggaggaatgtgacgatggtaacccggatgtgagtgacggctgcattgactgtcatcgggcctactgtggagacggttatcggcaccggggcgtggaggactgtgacggctctgactttggctacctgaagtgcgagacctatctccctggatcatacggagaacttcggtgcacccagtattgctccatcgactccacaccctgccgatacttcacgtgagaggctgcagggacaggtgggctgtggcccatggacccgttggctgtttctctacccttcacatcaagctggccttgccctctcctgggacagtgccctttgaccttcatgtgacaaaacaaggatatattcttgctgctacgacatgcttttgactccgtatgactggaagttttggaccactgaatcctgtcttaattctaagaaccagaatccttctataccccaccctggaaacttccccatcccctccaatctggctaaacagctggctgtaatgcctgatctcttctggaaagatgctggctgaagcgtggatttggcttagcactgttaagcatacaggcatctacaggcctggcgtggttcgttctggtctaccaggtttaggggtgctcgtgaacaggcttctgcacctccaagcacatctgttccgaccccaaagcgagccagctgctgggtctctcaagatttaagaaccacatcataggaggtgagaaattctcttggtgcagctcccagcttcagacctgctgaggggacccttcagctggctggagcctggatcaacttcatgttgatcagtcaggggtacgagagagccacaaggcccaagcttggtcccaggaagagggtgaaggctcagctgagtcactgccatgtgacccctaccagaacagaaaccttcttccttcccgaagttctctgaggcaccatctgaccttgtgcttctctctgcaccttgacctctgtcttgacagtgccctcttgcaacgtgcctgtgtgaaagtctcacccctcatgccctcccatggcccgtgctgctgtttcctcatgctggcttccctggcttgggctccactgccaagtccttggctgcaggacgcgccggtgactctcttccatgcccatcttgcataccccttgttccctcactgtgtgcccaacctcttcctttatcctgggattctttttcctaagccctgcatttctgagaactgccttcccatatttcatgaatggggtttggctctatttggggaaacatcgctttttgtccccctccccaatgcgcgcacctgccttgccccactacccaggctgcctctgggctgtgcaaagctcttcagtgagcccaagccttgggaattcagcaggtggcaccttctcacccagcaagtccgagctgtgaatggtatttcctgagagaaatcagcctgaggnnnncttcaggggcagacagctatctatttactattctgggacttctgggtgggcaaacaagaaataaaggtgattcttggctgtgaaaaaaaaaaa

SEQ ID NO: 429 - protein, 458 aa, Rattus norvegicus
  ref <308>: DATABASE ACCESSION NUMBER: SWISS-Prot / O35167
  ref <309>: DATABASE ENTRY DATE: 2002-06-15
MAVLNPMTLGIYLQLFFCSIVSQPTFINSVLPISAALPGLDQKKRGNHKACCLLMPPPPPLFPPPFFRGSRSPLLSPDMKNLLELEASPSPCMQGSLGSPGPPGPQGPPGLPGKAGPKGEKGDLGRPGRKGRPGPPGVPGEPGPVGWPGPEGPRGEKGDVGMMGLPGSRGPMGSKGFPGSRGEKGSRGERGDLGPKGEKGFPGFPGMLGQKGEMGPKGESGIAGHRGPTGRPGKRGKQGQKGDSGIMGPPGKPGPSGQPGRQGPPGPPGPPSAGQLVMGLKGERGFPGPPGRCLCGPPANVNNPSYGDPMYGRGSPRVPAIFVVNNQEELEKLNTQNAIAFRRDQRSLYFKDSLGWLPIQLTPFYPVGLHHKAAWHLCGDGVLQPGEECDDGNPDVSDGCIDCHRAYCGDGYRHRGVEDCDGSDFGYLKCETYLPGSYGELRCTQYCSIDSTPCRYFT

SEQ ID NO: 430 - DNA, 2909 bp, Homo sapiens
  ref <308>: DATABASE ACCESSION NUMBER: Refseq / NM_080539
  ref <309>: DATABASE ENTRY DATE: 2002-11-05
cacacgcacacacacacacacaaacacacgcgcacgcaaacagcagtgaggaagagaaaagcagagataagcaaggctccgcagcagcctcctttctaacttgaccctcgccagaccctggccagcatggttgtcctgaatccaatgactttgggaatttatcttcagcttttcttcctctctatcgtgtctcagccgactttcatcaacagcgttcttttcttcagaggtggccgaagtccgcttctctccccagacatgaagaatctcatgctggaactggagacctcgcagtccccgtgcatgcaaggctcgctaggctcccctgggcctcccggcccccagggtccaccggggcttcctggcaagacaggaccaaagggagaaaagggggagcttggccgaccaggaaggaagggtagacctggccccccaggtgttcctggcatgcctgggcccatcggttggccaggccctgaaggacccaggggtgaaaaaggtgacctgggtatgatgggcttgccagggtcaagaggaccaatgggctccaagggctaccctggatccagaggggaaaagggatccagaggtgaaaagggtgacctgggtcccaaaggagaaaagggtttcccaggatttcctggaatgttggggcagaaaggtgaaatgggtccaaaaggtgaacctgggatagcaggacaccgaggacccacaggaagaccaggaaaacgaggcaagcagggacagaaaggggatagtggagttatgggcccaccaggcaagcctgggccttctggtcaacctggccgtccggggcccccaggccccccacctgcaggacaacttataatgggacccaaaggggaaagaggatttcccgggcctccaggaagatgtctttgtggacccactatgaatgtgaataacccttcctacggggaatctgtgtatgggcccagttccccgcgagttcctgtgatttttgtggtcaacaaccaggaggagcttgagaggctgaacacccaaaacgccattgccttccgcagagaccagagatctctgtacttcaaggacagccttggctggctccccatccagctgacccctttctaccctgtggattacactgcagaccagcacggcacctgtggggatgggctcctgcagcctggggaggagtgtgacgacggtaacagcgatgtgggtgacgactgcatccgctgtcaccgtgcctactgtggagatggtcaccggcatgagggtgtggaggactgtgacggctctgactttggctacctgacatgcgagacctatctccctgggtcatatggagacctgcaatgcacccagtactgctacatcgactccacgccctgccgctacttcacctgagggccgtgaggagaaggtgggctgcgccccacagaactggcagcagcttctccactgtcatcaaactggccatgtcctggccccgtctccaccaacctttgtgtgacaaaaacaaggacaaattcctgctactaagacatgctgttaactcagtctgactggaagaatttaggaccactgcatcctgtcttaatccaaggtactggaaaaccttccacatgcccaacctgagacctgttccccatcgctaccatttggccaaacaaccggctacaatgctcttcctcttctggaatgttgctgacccaggccgtggacttggctgagcactgttagacacacatagacctgcaggctgttttagtatgttttgatctctttggggaatctggagtacaggcctctccgcccctgaccaccgaaacgtgcaggcattctcactcacactgggcagcccgctgtcgggtctctctaggcctatgaaccacaaagcagggaagtgggcacgttctctcggggtggctcacagctttgaacctgccaaaggacccctcgactggccacagcccagcccagcctgacgtggatgtggctgcccaggaaaagacttaactgtgaaaaagtactgagaacccacctgacccaggcttgccccaagcagaggctagagaagaggctcctcttctcagtgtttcccaaaggggcggctcttgtggtttcaaaatctctggcaccatcttgacctcttggctctctctgcactttgccccctgtctcaaaaatgtccctcatgtccatttcctgtccaggagactcatgaggactgtgtgacctgcacaagcccacacctgggcaggctgttggtgtctccttggtccttaggcagatactcccctgagtccccgatctagggccagctgcagagggctctctctaggcagagcgttcctggccagagctctacctctttgcctcctgctgacccctgacagcgtcccgtggcatttctttcatgtctgcatattgcatagccttgtcctcctgtgtgcctgagctcctcccttttcaataagattattagtcgtgcatgtctgtgagctgcctttcatcaccatttttcctgagtagggcttagttttattctggaaagacatctccaaggtgaggtccacccccacagcagacctcaagtagaaattgcccaatttttaccagctggagggacacccttgggtttttgtacgaagctatttaatgagcctgtgtcttggggactcagcaggctggagcttggggcctggtggaccatcacctggtgtctgtaggtggacccggtctcccacaggtgacatcaacctgagggtggcgtctttagagacaggcacatgggcagctctgttcccttcgcctctactgcgaggcctggggagatgttgttttcatgctgcttccaccatcacactggggtttctggatgggaaataaaaaaataaaggcagttcatttccccaaaaaaa

SEQ ID NO: 431 - protein, 456 aa, Homo sapiens
  ref <308>: DATABASE ACCESSION NUMBER: SWISS-Prot / Q9NP24
  ref <309>: DATABASE ENTRY DATE: 2001-10-16
MVVLNPMTLGIYLQLFFLSIVSQPTFINSVLPISAALPSLDQKKRGGHKACCLLTPPPPPLFPPPFFRGGRSPLLSPDMKNLMLELETSQSPCMQGSLGSPGPPGPQGPPGLPGKTGPKGEKGELGRPGRKGRPGPPGVPGMPGPIGWPGPEGPRGEKGDLGMMGLPGSRGPMGSKGYPGSRGEKGSRGEKGDLGPKGEKGFPGFPGMLGQKGEMGPKGEPGIAGHRGPTGRPGKRGKQGQKGDSGVMGPPGKPGPSGQPGRPGPPGPPPAGQLIMGPKGERGFPGPPGRCLCGPTMNVNNPSYGESVYGPSSPRVPVIFVVNNQEELERLNTQNAIAFRRDQRSLYFKDSLGWLPIQLTPFYPVDYTADQHGTCGDGLLQPGEECDDGNSDVGDDCIRDCHRAYCGDGHRHEGVEDCDGSDFGYLTCETYLPGSYGDLQCTQYCYIDSTPCRYFT

SEQ ID NO: 432 - DNA, 1018 bp, Rattus norvegicus
  ref <308>: DATABASE ACCESSION NUMBER: EMBL / AF007758
  ref <309>: DATABASE ENTRY DATE: 1999-12-23
gtgtggagcaaagatacatctttagccatggatgtgttcatgaaaggactttcaaaggccaaggagggagttgtggctgctgctgagaaaaccaagcagggtgtggcagaggcagctgggaagacaaaagagggcgtcctctatgtaggttccaaaactaaggagggagtcgttcatggagtgacaacagtggctgagaagaccaaagagcaagtgacaaatgttggaggggcagtggtgactggtgtgacagcagtcgctcagaagacagtggagggagctgggaacattgctgctgccactggttttgtcaagaaggaccagatgggcaagggtgaagaagggtacccacaagagggaatcctggaagacatgcctgtggaccctagcagtgaggcttatgaaatgccttcagaggaaggctaccaagactatgagcctgaagcctaagaatgtcgttgcacctactgtcctaagatctgcccaggtgttcttccatggcgtacaagtgctcagttccaacgtgcccagtcatgaccttttctcaaagctgtacagtgtatttcaaagtcttccatcagcagtgatcggagtcctgtacctgcccctcagcatcccggtgctcccctctcactacagtgaatacatggtagcaggctcttgtgtgctgtggatattgttgtggcttcaaacctaaaatgttagaagaaacttaaaacacctaagtgactaccacttatttccaactcttcaccgtttttggttgctgttctcaagaagttgtgatttgctataagacttttagatgtccttaatgattctttctgtctaagaagaatgatgtgctgtgaaatttgttaatatatattttaaaatatgtgagcatgagactacgcacctataaatattaatttatgaattttacagttttgtgacgtgttttattaacttgtgtttgtatataaatggtggaaattaaaataaaataaaaacattatctcattgcaaaaaaaaaaaa

SEQ ID NO: 433 - protein, 140 aa, Rattus norvegicus
  ref <308>: DATABASE ACCESSION NUMBER: SWISS-Prot / P37377
  ref <309>: DATABASE ENTRY DATE: 2001-10-16
MDVFMKGLSKAKEGVVAAAEKTKQGVAEAAGKTKEGVLYVGSKTKEGVVHGVTTVAEKTKEQVTNVGGAVVTGVTAVAQKTVEGAGNIAAATGFVKKDQMGKGEEGYPQEGILEDMPVDPSSEAYEMPSEEGYQDYEPEA

SEQ ID NO: 434 - DNA, 411 bp, Homo sapiens
  ref <308>: DATABASE ACCESSION NUMBER: EMBL / L36674
  ref <309>: DATABASE ENTRY DATE: 1999-07-02
taaaggaattcattagccatggatgtattcatgaaaggactttcaaaggccaaggagggagttgtggctgctgctgagaaaaccaaacagggtgtggcagaagcagcaggaaagacaaaagagggtgttctctatgtagtggctgagaagaccaaagagcaagtgacaaatgttggaggagcagtggtgacgggtgtgacagcagtagcccagaagacagtggagggagcagggagcattgcagcagccactggctttgtcaaaaaggaccagttgggcaagaatgaagaaggagccccacaggaaggaattctggaagatatgcctgtggatcctgacaatgaggcttatgaaatgccttctgaggaagggtatcaagactacgaacctgaagcctaagaaatatctttg

SEQ ID NO: 435 - protein, 140 aa, Homo sapiens
  ref <308>: DATABASE ACCESSION NUMBER: SWISS-Prot / P37840
  ref <309>: DATABASE ENTRY DATE: 2001-10-16
MDVFMKGLSKAKEGVVAAAEKTKQGVAEAAGKTKEGVLYVGSKTKEGVVHGVATVAEKTKEQVTNVGGAVVTGVTAVAQKTVEGAGSIAAATGFVKKDQLGKNEEGAPQEGILEDMPVDPDNEAYEMPSEEGYQDYEPEA

SEQ ID NO: 436 - DNA, 1018 bp, Rattus norvegicus; identical to SEQ ID NO: 432
  ref <308>: DATABASE ACCESSION NUMBER: EMBL / AF007758
  ref <309>: DATABASE ENTRY DATE: 1999-12-23

SEQ ID NO: 437 - protein, 140 aa, Rattus norvegicus; identical to SEQ ID NO: 433
  ref <308>: DATABASE ACCESSION NUMBER: SWISS-Prot / P37377
  ref <309>: DATABASE ENTRY DATE: 2001-10-16

SEQ ID NO: 438 - DNA, 411 bp, Homo sapiens; identical to SEQ ID NO: 434
  ref <308>: DATABASE ACCESSION NUMBER: EMBL / L36674
  ref <309>: DATABASE ENTRY DATE: 1999-07-02

SEQ ID NO: 439 - protein, 140 aa, Homo sapiens; identical to SEQ ID NO: 435
  ref <308>: DATABASE ACCESSION NUMBER: SWISS-Prot / P37840
  ref <309>: DATABASE ENTRY DATE: 2001-10-16

SEQ ID NO: 440 - DNA, 5655 bp, Rattus norvegicus
  ref <308>: DATABASE ACCESSION NUMBER: EMBL / AF007836
  ref <309>: DATABASE ENTRY DATE: 1997-08-25
cgggcggccccggcccggccccgcccccggcccgccagcgcagcccgcgcccggccgcgctccggagctcagcgccagccctcgccccctcgccgtgcctccgcctgcccgcccccgccggccaaggctgggctgcgggaggccgccgggcggccccgagcctcgccagggcgacccaaacaaaggcagcatccgggctcggcgggaggcagagcatcatgagagactgggtcctcgctgtccccggctccgctgctgctgccgctgccgccgccgccgccgccgccgctgccgctgccgccgccaggagggcttcgctgtgagcgttggaaagcaggggcgcagctgcggggcgtgaatccgaaaggtgagagccagagccagcgagccgagggggcgggcaggccacgaaaaatgtcctcggccgtggggccccgaggtcctcgcccacccacggtgcctccccctatgcaagaactgcccgacctgagccacctgaccgaggaggagaggaacattatcatggcagtgatggaccggcagaaggaagaggaggaaaaagaagaggccatgctcaagtgtgttgtcagggacatggcgaagcctgctgcctgcaaaacaccaagaaatgctgaaagccagccccatcaaccaccactgaacattttcagatgtgtctgtgttcccagaaagccaagcagcgaagagggaggcccagaaagagactggagattgcatcaacagtttgaaagctacaaggagcaagtgagaaaaatcggagaggaagcgaggcgttaccagggcgagcacaaggatgatgccccgacgtgtggaatctgtcataagacaaagtttgctgatggatgtggccatctctgctcctattgtcgcaccaagttctgtgcacgctgcggaggccgtgtgtctctgcgatcgaacaatgaggacaaagtggttatgtgggtatgcaatttatgtcgaaagcaacaagaaatcttaacgaaatctggagcgtggttctttggaagtggccctcagcagcctagtcaagatgggactctgagtgacacggccacaggtgctggatctgaggtgccaagagaaaagaaagcaaggctccaagagcgatcaaggtctcagacgcccttgagtacagcagctgtctcttcccaagacactgctacccccggtgcaccgttgcacaggaacaaaggggctgagccctcacagcaagccttgggtcctgaacagaagcaggcatcaagatcaagaagcgagccaccgagggaaaggaagaaggctccagggctttcagagcagaatggcaagggaggccagaagagcgagcgcaaacgtgtccccaagtctgtggtgcaacccggggaagggatcgcggatgagagggagaggaaagagaggcgggaaacccgcaggttggagaaagggcgctcccaggactactcagaccggcctgagaaacgcgacaatggcagggtggcggaagaccagaagcagaggaaggaggaggagtaccagactaggtaccgcagcgaccctaacctggctcgctacccggtgaaggcgccgccagaggagcagcagatgcgcatgcacgcccgggtgtcccgagcgaggcacgagcggcgccacagcgacgtggcgctcccgcacaccgaggcagctgccgccgcgccggctgaggccacggcgggcaagcgcgcgccggccaccgccagggtctctcccccggagtccccgcgcgcacgcgcggcggccgcccagcctcccaccgagcacgggccaccgccgccgcggccagccccgggtcccgcagagccacccgagccgcgcgtccccgagccgctccgtaagcagggccgcctggacccgggctcggccgtgcttctgcgcaaggccaagcgcgagaaggcggagagcatgctgcggaacgactcgctgagctccgatcagtccgagtccgtgcggccatccccgcccaagcctcaccggcccaagcggggaggcaagagacgtcagatgtcggtgagcagctcggaggaggagggcgtgtccacaccggagtacacgagctgcgaggacgtggagctggagagcgagagcgtgagcgagaaaggtgacttggattactactggttggatcccgccacgtggcacagcagggaaacgtcgcctatcagttcgcatcctgtaacgtggcagccgtctaaagagggagatcgactaatcggccgtgttattcttaacaaaagaacaaccatgcccaaagaatcaggtgcattattgggtctgaaggtggttggaggaaaaatgacggacttagggcgccttggtgctttcatcaccaaagtaaagaagggcagcctggcagacgtcgtcggacacctaagagcaggggacgaagtcctagagtggaatggtaaacccctgccgggagcaacaaacgaagaagtttacaacattatcttagaatcaaaatcagaacctcaagttgagattattgtttcaaggcctattggtgacatccccaggatccctgagagttcccatcctcccctggagtccagttcaagttcctttgaatctcagaaaatggaaaggccttctatttctgttatttctccaaccagccctggagctctgaaagatgccccacaagtcttaccagggcaactctcagtgaagctatggtatgataaagtggggcaccagctgattgtaaatgttctacaagcaacagatctaccccctagagtagatggccgtcccaggaatccctatgtaaaaatgtattttcttccagatagaagcgacaaaagtaaaaggagaaccaaaacagtaaagaaacttctagagccaaaatggaaccagacatttgtctactcacacgtacatcgtagagattttcgagagcgaatgttagagattaccgtgtgggaccagccgagagtacaggacgaagagagtgaatttcttggagagatcctcatagagttggaaacagcgcttttagatgatgagccccattggtataaactccagacacatgacgaatcttcactacctctgcctcagccatcaccgttcatgcccaggcggcatattcatggagagagctccagcaaaaagctacaaagatctcagcgaatcagtgatagtgacatctcagattatgaggttgatgatggtattggagtagtgcctccagtgggttatagagctagtgctagagagagtaaagcaaccacgttaacagtgccagagcaacaaagaactacacatcaccgctcacgttccgtgtctcctcatcgcggcgatgatcagggaaggcctcgttcacgtttaccaaatgtgccattacagaggagcttagatgaaattcatccaacacgaaggtcacgttctccaacccgacaccatgatgcctcccgaagcccggccgatcacagatccagacatgtggaaagtcaatattcgtcagagccagacagtgagcttctcatgctgcccagagcaaaacgaggacgaagtgcagaaagcctacacatgaccagtgaactgcagccctctcttgacagggctaggagtgctagtaccaactgcttgagaccagatactagtttgcattcaccagaacgagaaaggcactccagaaagtctgaaagatgtagcatccaaaaacagtctaggaaaggcacagcctctgatgcagacagaacgcaccgacaaggaagcccaacccagtctcctccagcagacacatccttcggcagtcgccgtggaagacagctcccacaggtgccagttcgaagcggcagtatagaacaagcaagcttagtagtggaggagcgaacgagacagatgaaagtgaaagttcaccgatttaagcagacaacagggtctgggtctagtcaagaacttgaccacgagcaatactccaagtacaacatacataaagatcagtacagaagctgtgataacgcgtctgccaagtcttcagatagtgatgtcagtgatgtgtccgccatttccagagccagcagtacctcacgcctcagcagcacaagctttatgtcagagcagtctgagcgccccaggggtaggatcagttcatttacccccaaaatgcaaggcagacggatggggacttcaggaagagccatcatcaagagcaccagtgtaagtggagagatatatacactggaacgtaatgacggtagccagtcggacacggccgtaggtaccgtcggagccggtggaaagaaacgaagatccagcctgagcgccaaagtggtagccattgtgtctcgaagaagcaggagcacgtcacagctcagccagacagagtcgggccacaagaagttgaaaagcaccatccagaggagtacggaaacaggaatggcagctgaaatgcggaagatggtgagacagccgagccgggagtccacggatggcagcatcaacagttatagctcggaaggaaacttgatatttcctggagttcgagtaggacccgacagtcagttcagtgatttccttgatgggttgggaccagcgcagctcgttggccgtcagacgctcgccaccccggccatgggcgatatccaaatcgggatggaggataagaagggtcagttggaggttgaggttatcagagcccggagccttacacaaaaacctggttccaaatctacacccgctccctatgtgaaagtatatcttttggaaaatggagcctgtattgccaaaaagaagacaagaattgcacggaaaactctcgatcctttgtatcagcagtccctggtttttgatgaaagtccacagggtaaagttcttcaggtgattgtctggggtgactatggaagaatggaccacaaatgctttatgggtgtggctcaaatcttgttggaagaacttgatctatccagcatggtgattggatggtataaattgttccctccgtcctcactggtggatcccactctcgctcccctgacccgccgggcttcccaatcatctctggaaagttcgtccgggcctccctgcatccggtcatagtaaactcctatccttccagccaaactctacatttcaggataattatcagaaccagattatttcatgatcaagagcattgttggagacagacaatcaacttgtgttttgcctgtagtagtttttcgataatatgtcccaattgttgtttaaaatatggcttcatatgacagaacaaagcaagtcagtcaaaattgcagtaagaacggacatgctagtgagagccacttcacacttcttgcaaataggaaaaacaaaagaggaaacctcaaattcacacacacacacacatacacaccaaattgaacaaactggaaattctcactctgtgaaaaggtgtacttcacatgtttctgcacagaccacaagcagtgttgtttccctagtgtttgagattcttcagttctgtgtgctttcgttgtttgtgtgctgtttgctgattctttttgccccgttgcctctctttctctgtcttcattgtatttattatttccgctagctttttttttttcatttttttttgtctttgtctttctttgctttgccatgacaggattaggtggtgttaacagagactgcttc

SEQ ID NO: 441 - protein, 1553 aa, Rattus norvegicus
  ref <308>: DATABASE ACCESSION NUMBER: SWISS-Prot / AAB66703
  ref <309>: DATABASE ENTRY DATE: 2003-02-01
MSSAVGPRGPRPPTVPPPMQELPDLSHLTEEERNIIMAVMDRQKEEEEKEEAMLKCVVRDMAKPAACKTPRNAESQPHQPPLNIFRCVCVPRKPSSEEGGPERDWRLHQQFESYKEQVRKIGEEARRYQGEHKDDAPTCGICHKTKFADGCGHLCSYCRTKFCARCGGRVSLRSNNEDKVVMWVCNLCRKQQEILTKSGAWFFGSGPQQPSQDGTLSDTATGAGSEVPREKKARLQERSRSQTPLSTAAVSSQDTATPGAPLHRNKGAEPSQQALGPEQKQASRSRSEPPRERKKAPGLSEQNGKGGQKSERKRVPKSVVQPGEGIADERERKERRETRRLEKGRSQDYSDRPEKRDNGRVAEDQKQRKEEEYQTRYRSDPNLARYPVKAPPEEQQMRMHARVSRARHERRHSDVALPHTEAAAAAPAEATAGKRAPATARVSPPESPRARAAAAQPPTEHGPPPPRPAPGPAEPPEPRVPEPLRKQGRLDPGSAVLLRKAKREKAESMLRNDSLSSDQSESVRPSPPKPHRPKRGGKRRQMSVSSSEEEGVSTPEYTSCEDVELESESVSEKGDLDYYWLDPATWHSRETSPISSHPVTWQPSKEGDRLIGRVILNKRTTMPKESGALLGLKVVGGKMTDLGRLGAFITKVKKGSLADVVGHLRAGDEVLEWNGKPLPGATNEEVYNIILESKSEPQVEIIVSRPIGDIPRIPESSHPPLESSSSSFESQKMERPSISVISPTSPGALKDAPQVLPGQLSVKLWYDKVGHQLIVNVLQATDLPPRVDGRPRNPYVKMYFLPDRSDKSKRRTKTVKKLLEPKWNQTFVYSHVHRRDFRERMLEITVWDQPRVQDEESEFLGEILIELETALLDDEPHWYKLQTHDESSLPLPQPSPFMPRRHIHGESSSKKLQRSQRISDSDISDYEVDDGIGVVPPVGYRASARESKATTLTVPEQQRTTHHRSRSVSPHRGDDQGRPRSRLPNVPLQRSLDEIHPTRRSRSPTRHHDASRSPADHRSRHVESQYSSEPDSELLMLPRAKRGRSAESLHMTSELQPSLDRARSASTNCLRPDTSLHSPERERHSRKSERCSIQKQSRKGTASDADRTHRQGSPTQSPPADTSFGSRRGRQLPQVPVRSGSIEQASLVVEERTRQMKVKVHRFKQTTGSGSSQELDHEQYSKYNIHKDQYRSCDNASAKSSDSDVSDVSAISRASSTSRLSSTSFMSEQSERPRGRISSFTPKMQGRRMGTSGRAIIKSTSVSGEIYTLERNDGSQSDTAVGTVGAGGKKRRSSLSAKVVAIVSRRSRSTSQLSQTESGHKKLKSTIQRSTETGMAAEMRKMVRQPSRESTDGSINSYSSEGNLIFPGVRVGPDSQFSDFLDGLGPAQLVGRQTLATPAMGDIQIGMEDKKGQLEVEVIRARSLTQKPGSKSTPAPYVKVYLLENGACIAKKKTRIARKTLDPLYQQSLVFDESPQGKVLQVIVWGDYGRMDHKCFMGVAQILLEELDLSSMVIGWYKLFPPSSLVDPTLAPLTRRASQSSLESSSGPPCIRS

SEQ ID NO: 442 - DNA, 6395 bp, Homo sapiens
  ref <308>: DATABASE ACCESSION NUMBER: EMBL / AB002338
  ref <309>: DATABASE ENTRY DATE: 2001-10-10
caggggcgcagctgctgggcgtgcatccgaaaggtgagagccagagagcgagcagagggggcgggcaggccacgaaaatgtcctcggccgtggggccccgcggtcctcgcccacccacggtgcctccccccatgcaagagctgcccgacctgagccacctgaccgaagaggagaggaacattatcatggcagtgatggaccggcagaaggaagaggaggaaaaagaagaagccatgctcaagtgtgttgtcagggacatggcgaagcctgctgcctgcaaaacaccaagaaatgctgaaaaccagccccaccaaccttcaccgagattgcatcaacagtttgaaagctataaggaacaagtgagaaaaataggggaagaagcgcggcgttaccagggcgagcacaaagacgatgctccgacttgtggaatctgtcataaaacaaagtttgctgatgggtgcggtcatctctgctcctattgtcgcactaagttctgtgcgcgctgcggaggccgcgtgtctctacggtcaaacaacgaggacaaagtggttatgtgggtatgcaatttatgtcgaaagcaacaagaaatcttaaccaaatctggggcatggttctttggaagtggccctcagcagacaagtcaggatggaaccctgagtgatacagctacaggtgctggctctgaggtaccaagagaaaagaaagcacgactccaagagcgatcgcggtctcagacacccctgagcacagcagctgcctcctcccaggatgctgctcctcccagcgcaccaccagacaggagcaaaggggctgagccctcgcagcaagccttggggcctgaacagaagcaggcttcatccaggtctagaagtgaacctcctagagagagaaagaagaccccagggctttccgagcagaatggcaaaggagccctgaagagcgagcggaaacgcgtgccaaagacctcagcgcagcccgtggagggggccgtcgaagaacgggagcgcaaagaaaggcgggaaagccgaaggcttgagaaagggcgatcacaggattacccagacacgccggaaaaacgggatgagggcaaagcggcggatgaggaaaagcaaagaaaagaggaggattatcagaccaggtaccgcagcgacccgaacctggctcggtacccggtgaaaccgccgcctgaggagcagcagatgcgcatgcacgcccgggtgtcccgcgccaggcacgagcggcgccacagcgacgtggcgctcccgcgcaccgaggcgggcgcggcgctgccggagggcaaggccggcaaacgcgcgccggcggcagccagggcctcgccgccggactcgccgcgggcttactcggctgagagaactgcggagaccagggcgccgggcgccaagcagctaacgaaccacagcccgccggcgcccagacatgggccggttcccgcagaagccccggagctcaaagcccaggagcccctcaggaagcagagccgcctggaccccagctcggcggtcctcatgctgcggaacgactctttgagctcagaccagtccgagtcggtgcggccgtccccgcccaagccgcaccggtccaagagaggcggcaagaagcggcagatgtcggtgagcagctctgaggaggagggcgtgtcgacgcccgagtacaccagctgcgaggacgtggagctggagagcgagagcgtcagcgagaaaggtgatttggattattactggttggatcctgccacgtggcacagccgggagacatcacctattagttcgcatcctgtaacgtggcaaccatctaaagagggggaccgattaattggacgtgttattcttaacaagagaacaaccatgcccaaagactcaggtgcattgctgggtctgaaagttgttggaggaaaaatgactgacttaggacgacttggtgctttcatcaccaaagtaaagaagggtagcctagcagatgtagttggacacctaagagcaggggatgaagttctagaatggaatggtaaacccctgccgggagctacaaatgaagaagtttacaacattattttagaatcaaaatcagaacctcaagttgaaattattgtttcaaggcctattggtgacattccccggattcctgagagctcccaccctccactggagtccagttcaagttcctttgaatctcagaagatggaaaggccttccatttctgttatttctccaacaagtcctggagctctaaaagatgccccacaagtcttaccagggcaactttctgtgaagttgtggtatgataaagtgggacaccagctgattgtaaatgttctgcaagcaacagatctacctgctagagtagatggacgtcctcgaaatccctatgtaaaaatgtattttcttccagatagaagtgataaaagtaaaaggaggaccaaaacagtaaagaaaatactagaaccaaaatggaatcaaacttttgtctattcacatgtacatcgtagagattttagagaacgaatgttagaaataactgtgtgggaccaaccaagagtgcaagaagaagaaagtgaatttcttggagagatcctcatagaattggagacagcgcttttagatgatgaaccgcattggtataaacttcagacacatgatgagtcttcactacctctgcctcagccatcacctttcatgccaaggcgacatattcatggagaaagctctagcaaaaagctacaaagatctcagcgaatcagtgatagtgacatctcagattatgaggttgatgatggtattggcgtagttcctccagtaggctataggtctagtgctagagaaagtaaatctacaacattaactgtgccagaacagcaaagaacaactcatcaccgctcacgttcagtatctcctcatcgcggcaatgatcagggaaagccgcgttcacgtttaccaaatgtgccattacagaggagtttagatgaaattcatccaacaagaaggtcacgttctccaaccagacaccatgatgcctcccgaagtccagttgatcatagaaccagagatgtggatagtcagtatttatcagaacaagacagtgagcttcttatgctgcccagagcaaaacgaggacgaagtgcagaatgcctacatactaccaggtaaatacagggatttggtaatggtgactgtgtgtgatgactctctttccattctattattcttccgtctctcccttagtggtattattacaagcaagtcaaataaatttcccaagtatttgaaatttgttttgttttatattgaggttatggaaaaggttccaaatatatttcagttccgattcaggctgactgctttgccatctgtagattcaaaaatccagagactagtgggcctctctgggactgtttgcgttcctaaaactgaggaaccagtttctgcaattaaaattctaaatgctcactgtgagtgcccccaactttcccacacatattcctgtctagtcacaagaggtctaatctgtgtatggcagtgtcattgtttcataattgtaagtttgctctgttttagccttttttaatttccttttagaatttattgttgtttatattctgtttgcttttgataaaatctttaacagttcacttttaatggctgagcttcagcttctttcttgatgaaaagtgaagatattcaacctgatcttaactatcctagcccaccagttgtcagaaatgctgcagtacaaactttcccacaaaggcatataacagtatgaatgcctctttagaagcgacaaaagatataatttttgcttctaaattggagcttagagcctgatgctttatgttaatctcattacatctttaatttcatatccaagtaaaacttcttacagattactcatggaacatattctataaatacttaatgtatatttgaaatgaatatagaagttaaggaagtagtaagtcagtgaaacaaactaacacaaaataatcgaactcaaatattttagccaataaaaagcaagaggaaagagaaagaaagaggtattaccgcagtacttgggatgcaaagacaaatgcatgatttattatgtctgtgtgtaatatgtagttctgcccaataatgcaaacaaaattgggctaataaaaattgtttgaactttttacagtctgaagttatactactcataactactgccatgtttgcttggagtgccacaggaaaaaatcgaggaaatattagttctgcttgctgagaaaaaaatgtaaaatcatgcatattgtaaaaacctactgaaggtcaaagcatgaactatccaggtttattattacttgttcttgacaaacagtttcttaaaataatggtttatttactaattctgaaagttttctcacactcctcttgatgtgactaaagcttcaaaagaaataaaaaacatgcacacaaaacaaacacaaaaaaaatccttatattttaagctacttagtgtgtgcctggcactcagtgtgtgaatatttctaggatactcacaccagtggtctaaatataataactaaaaatatttttctttcccttattttgtacttgtaaaatattatatacttatataatattatataatagttgcatcattttatataatcttatacttaagattggtgctttgctaataattctgagctccacaagtcctatttaatagtctctgtatgttgactttgcatttcctgatttaagcaaataatcatatttgtatgtatacaatttaaaaataaatgagtattcagcgaggcagataacatcctgtggacaggtactacgacaataagatagggagtggaaggaagctgagctagccaaatgtgtcagtgcgaaacatatgtcaccagtgtcttttctccttcctgtctttcattctctaatgtgtaatgctaaaagtatggagatagagacaacatgagttcaaaaatacgtgcatgtatgtatatataatctcttctgtgtttatattcatgtatttataaaaacattaatttatatctgtataaaaatgaatgtcaaaatgtgtacatataaataaccacaactttatatggatatatcaataatatagtttggtttcatataaactatggacacttattatttctataactatccatggctaaaatctaaagctttcaaaatacatcataccatgttcacttaggacttataaaaataaaatctgaggatttactagtctctagtaaacataaggaaaataacatttatttaataacaagcacagtgttaaatatttaatgtactttgtcaatttcctgacaataattatatgttatgaatattattatcctgattttagagatgaggaaaaaagctacgaaagtttattttacgactaatagagtaaggattcaaaatcagatctatttgatatcttctgtttaactagtttttccaaaaatatgaaaacttgtcctatgagatgtttcaccaataagagtttttgtgagtcaaatacattttggaaactttgcaactgaaagtgtctaccttgaaatttaatacacacagcatattaaagtcatgttctaaagaaatctgtatgtttagtttcttttctcccaaattgtttaatttcccaacctttttttagtaaaacgtgtctcgaggaagtggtagtatagagaaaatgctatagttgccttactgtatcctactgtgtcctaaatattgtgtacatgttaccacacacccctgttaagtggaagttatttcccacattttgtggatgtagaaacaggcttggagacttaatcgaattacccaggtcacagccaataagtggcaaagccaaggcaggaacttgaacattcagactataaattttgtgctattttctagctgtttcccattctatgttgatcccattcttgaaaaaaaaatcacttttgaagcaatgcttagaaaagttttatagcaacctattactaaagatatttgcctgaggttaggagttgaaaagaagagtcgactgtctagaaaggaggctaaatccttagtttcagtaaaatttgtcctcaacttgtacttaataaggaggaagctgaagcgggcagatcacttgaggtcaggagtttgagaccagtgtggccaacatggtgaaaccccgtctctactaaaacacacacacacacacacacacacacacacacacacacaaattaggtgggcatggtggcaggtgcttgtaatcccagctacttgggaggctgagagaggagatttgcttgaacccaggaggcagaggttgcagtgagccaagatcacaccattgcactccagcctagataacaagagtgagactctgtctcaaaaaag

SEQ ID NO: 443 - protein, 1053 aa, Homo sapiens
  ref <308>: DATABASE ACCESSION NUMBER: SWISS-Prot / BAA20798
  ref <309>: DATABASE ENTRY DATE: 2003-02-01
GAQLLGVHPKGESQRASRGGGQATKMSSAVGPRGPRPPTVPPPMQELPDLSHLTEEERNIIMAVMDRQKEEEEKEEAMLKCVVRDMAKPAACKTPRNAENQPHQPSPRLHQQFESYKEQVRKIGEEARRYQGEHKDDAPTCGICHKTKFADGCGHLCSYCRTKFCARCGGRVSLRSNNEDKVVMWVCNLCRKQQEILTKSGAWFFGSGPQQTSQDGTLSDTATGAGSEVPREKKARLQERSRSQTPLSTAAASSQDAAPPSAPPDRSKGAEPSQQALGPEQKQASSRSRSEPPRERKKTPGLSEQNGKGALKSERKRVPKTSAQPVEGAVEERERKERRESRRLEKGRSQDYPDTPEKRDEGKAADEEKQRKEEDYQTRYRSDPNLARYPVKPPPEEQQMRMHARVSRARHERRHSDVALPRTEAGAALPEGKAGKRAPAAARASPPDSPRAYSAERTAETRAPGAKQLTNHSPPAPRHGPVPAEAPELKAQEPLRKQSRLDPSSAVLMLRNDSLSSDQSESVRPSPPKPHRSKRGGKKRQMSVSSSEEEGVSTPEYTSCEDVELESESVSEKGDLDYYWLDPATWHSRETSPISSHPVTWQPSKEGDRLIGRVILNKRTTMPKDSGALLGLKVVGGKMTDLGRLGAFITKVKKGSLADVVGHLRAGDEVLEWNGKPLPGATNEEVYNIILESKSEPQVEIIVSRPIGDIPRIPESSHPPLESSSSSFESQKMERPSISVISPTSPGALKDAPQVLPGQLSVKLWYDKVGHQLIVNVLQATDLPARVDGRPRNPYVKMYFLPDRSDKSKRRTKTVKKILEPKWNQTFVYSHVHRRDFRERMLEITVWDQPRVQEEESEFLGEILIELETALLDDEPHWYKLQTHDESSLPLPQPSPFMPRRHIHGESSSKKLQRSQRISDSDISDYEVDDGIGVVPPVGYRSSARESKSTTLTVPEQQRTTHHRSRSVSPHRGNDQGKPRSRLPNVPLQRSLDEIHPTRRSRSPTRHHDASRSPVDHRTRDVDSQYLSEQDSELLMLPRAKRGRSAECLHTTR

SEQ ID NO: 444 - DNA, 808 bp, Rattus norvegicus
  ref <308>: DATABASE ACCESSION NUMBER: EMBL / AF007890
  ref <309>: DATABASE ENTRY DATE: 1998-06-15
aactgaatgtctgcccgtcgccctgttgtaggtggtaacttcaagtgcaatggtgatttcgccttcatcaagactcacaccgaggtcttgaagacgatcccaaagaacaatgttgaagtttacgttgctccttctgcaatccacttgaaaactcttgccgacaaccttaagggtactcacatcgaggttgctgctcagaacgtttactatgagaagcctggcgcatggactggtgagttgaacgttgaaatgctgcttgattgcggcctgaagactgtcatcattggtcactctgagagacgtcgtatcatgggtgaaactaacgaacaatctgctaaaaaggctgctcgtgctatctcccttggcatgactgttgctttctgcattggtgagactcttgaggaaagaaacgctggcaaagttgacgaggttaacttcgctcagctcgaggctcttcgtgccgttctgaaagaagctgactggaagaacgtcatcattgcttatgaacctgtttggtctatcggtactggtgtcgttgcctcacctgaacaagctcaggaggttcacgcttccatcagaaagtggctcggtgagaaggtttccaaggctgttgctgatgccacccgtatccaatatggtggttccgtcaacgctgctaactgcgccgctcttggcaagtgcccagatatcgatggtttccttgttggtggtgcttccctcaagccagagttcgtccagatcgtcactactctcggtgatgtcaagaaatgagcttgtaacgttcaaaaaaaaaaaaaaaaaaaaaaaa

SEQ ID NO: 445 - protein, 254 aa, Rattus norvegicus
  ref <308>: DATABASE ACCESSION NUMBER: SWISS-Prot / AAC23442
  ref <309>: DATABASE ENTRY DATE: 2002-10-01
MSARRPVVGGNFKCNGDFAFIKTHTEVLKTIPKNNVEVYVAPSAIHLKTLADNLKGTHIEVAAQNVYYEKPGAWTGELNVEMLLDCGLKTVIIGHSERRRIMGETNEQSAKKAARAISLGMTVAFCIGETLEERNAGKVDEVNFAQLEALRAVLKEADWKNVIIAYEPVWSIGTGVVASPEQAQEVHASIRKWLGEKVSKAVADATRIQYGGSVNAANCAALGKCPDIDGFLVGGASLKPEFVQIVTTLGDVKK

SEQ ID NO: 446 - DNA, 1774 bp, Homo sapiens
  ref <308>: DATABASE ACCESSION NUMBER: Refseq / NM_000365
  ref <309>: DATABASE ENTRY DATE: 2002-12-04
ggcacgagggagaactagtctcagtttttttttttttttttttaggtgagaaagccagctgactttattgctctgggggcagggggctcaggagctcttggtggggcgggtccgcttcctcttcaccatcacaggcttctggctgcgcaggatggcgctggccctgcggatggctgccatgcgcaggtcggggcggtacttgttcttgcggatcatgtgtctgatgctgctgagcgtggcgcgagcattcttgttgatggtggtccgcacataggaggtggcaggcttccgctggccggatctccgcttaatgaccaccacgacacctttgccgtcggctgccggctccacgcccacagtcttgcggtgaatcagtccgttgtagcggaaggaattgcgggccttcaagttattgggctcagtgctgtaggtctgcttattcctcttgatcaggaaactggagcagttccgcacgaccatccattgcagatgcgcagacatggcggcggctcccttcgcagcggcgacctgaccttcagcgcctcggctccagcgccatggcgccctccaggaagttcttcgttgggggaaactggaagatgaacgggcggaagcagagtctgggggagctcatcggcactctgaacgcggccaaggtgccggccgacaccgaggtggtttgtgctccccctactgcctatatcgacttcgcccggcagaagctagatcccaagattgctgtggctgcgcagaactgctacaaagtgactaatggggcttttactggggagatcagccctggcatgatcaaagactgcggagccacgtgggtggtcctggggcactcagagagaaggcatgtctttggggagtcagatgagctgattgggcagaaagtggcccatgctctggcagagggactcggagtaatcgcctgcattggggagaagctagatgaaagggaagctggcatcactgagaaggttgttttcgagcagacaaaggtcatcgcagataacgtgaaggactggagcaaggtcgtcctggcctatgagcctgtgtgggccattggtactggcaagactgcaacaccccaacaggcccaggaagtacacgagaagctccgaggatggctgaagtccaacgtctctgatgcggtggctcagagcacccgtatcatttatggaggctctgtgactggggcaacctgcaaggagctggccagccagcctgatgtggatggcttccttgtgggtggtgcttccctcaagcccgaattcgtggacatcatcaatgccaaacaatgagccccatccatcttccctacccttcctgccaagccagggactaagcagcccagaagcccagtaactgccctttccctgcatatgcttctgatggtgtcatctgctccttcctgtggcctcatccaaactgtatcttcctttactgtttatatcttcaccctgtaatggttgggaccaggccaatcccttctccacttactataatggttggaactaaacgtcaccaaggtggcttctccttggctgagagatggaaggcgtggtgggatttgctcctgggttccctaggccctagtgagggcagaagagaaaccatcctctcccttcttacaccgtgaggccaagatcccctcagaaggcaggagtgctgccctctcccatggtgcccgtgcctctgtgctgtgtatgtgaaccacccatgtgagggaataaacctggcactaggtaaaaaaaaaaaaaaaaaaaaa

SEQ ID NO: 447 - protein, 248 aa, Homo sapiens
  ref <308>: DATABASE ACCESSION NUMBER: SWISS-Prot / P00938
  ref <309>: DATABASE ENTRY DATE: 2002-06-15
APSRKFFVGGNWKMNGRKQSLGELIGTLNAAKVPADTEVVCAPPTAYIDFARQKLDPKIAVAAQNCYKVTNGAFTGEISPGMIKDCGATWVVLGHSERRHVFGESDELIGQKVAHALAEGLGVIACIGEKLDEREAGITEKVVFEQTKVIADNVKDWSKVVLAYEPVWAIGTGKTATPQQAQEVHEKLRGWLKSNVSDAVAQSTRIIYGGSVTGATCKELASQPDVDGFLVGGASLKPEFVDIINAKQ

SEQ ID NO: 448 - DNA, 4409 bp, Rattus norvegicus
  ref <308>: DATABASE ACCESSION NUMBER: EMBL / AF008439
  ref <309>: DATABASE ENTRY DATE: 1997-08-25
ccacgcgtccgatggggaagaagcagccgagggcagcagcaagtgctgctccaaactgtgagctaaaatcctattctaagagcacagatcctcaggtatctaccatggtgttggatcctgaagaaaagattccagacgatggtgcttctggggaccatggagactcggccagcctcggtgccatcaaccctgcttacagcaactcttccctcccacattccaccggggattctgaggagcccttcaccacctactttgatgagaaaatccccattcctgaggaggagtactcttgttttagtttccgtaaactctgggccttcacaggacctggttttcttatgagcattgcctacctggatccaggaaacattgaatctgatttacagtctggagcagtggctggatttaagttgctctgggtgctcctgctggccactattgtggggctgctgctccagcgtctcgcagctcgactgggagtggtcaccggcttgcaccttgctgaagtgtgtcaccgtcagtatcccaaggtcccacggatcatcctgtggctaatggtggagttggcaatcattggttctgatatgcaggaagtcattggctcagccatcgccatcaatctcctgtctgccggaagggttcccctgtatggtggagtcctcatcaccatcgcagatacttttgtatttctctttttggacaaatatggcttgcggaagctggaagcattttttggctttctcatcactatcatggccctcacatttggatatgagtatgttacagtgaaacccagccaaagccaagtactcaggggcatgttcgtgccatcctgttcaggctgccacacccctcaggtggagcaggcggtgggcatcgtgggagctgtgatcatgccacacaacatgtacctgcactctgccttagtcaagtctagacaagtgaaccgggccaataagcaggaagttcgagaagccaataagtacttcttcatcgagtcctgcattgcactctttgtttccttcatcatcaatgtctttgtcgtctccgtctttgctgaagcattttttgagaaaaccaatgagcaggtggttgaggtctgcagaaatagcagcagcccccatgctgacctctttcctaacgacaactctaccctggctgtggacatctacaaagggggtgttgtgcttggatgttacttcgggcctgcggccctctacatctgggcggtggggatcctggctgctggacagagctccaccatgactggaacctattctggccagtttgtcatggagggattcctgaacctaaaatggtcgcgctttgcccgcgtgatcctgaccaggtctattgccatcatccctaccctgcttgttgctgtcttccaagatgtggagcatctgacagggatgaatgatttcctgaatgttctgcagagcctacagctcccctttgccctcatccctatcctcaccttcacaagcctgcggccagtgatgagtgagttctccaacggaataggctggaggatcgcaggcggcatcttggtccttctcgtctgctccatcaacatgtactttgtcgtggtctacgtccaggagctagggcatgtggcactgtatgtggtggctgcagtggttagcgtggcttatctgggctttgtgttctacttgggttggcagtgtttgattgcgttgggcctgtcgttcctggactgtgggcgctcggtaagcatctctaaagtcctgctgagcgaagataccagcggtggcaatactaagtaaacactgggtcagcctgtctgtctgtctttgcagggagccatcagagccagtgtgtttctatggtttactgtgtgaacatagccacaagtatgtgccgttgcacagactgcatttagggaccaactgttagttgggaaacactggggtgggtgtgtggtgtgtgtgtgtgtgttgtttccttctgtctttgtcaaatagcatgctgctattaaatgcttggtggcctaaaactctgtgtagcctaggctgccttcaaacttacagcaatcctcctggctcagcctcctgggtgctgggattccaggcatgtctaccgctcctggctgtcacgagtgcttacaagatgactggttttgtcaggggaggtcttaccctgtagcattaggcagcaccttgaaaaggtgagccttgagctgttttgaacactaaattcctaaatagctgtccaaggccatggctcggttttagttctgagaaacccaaccagactgttgtcatcatttgaattgcagaattagagaccgctatttttgagttcaggatttctgtttgtttggtgcatttcattttgtttttcaagacaagggtttcttccttgttgtcctggaacttactctgtagaccagcctggctttgaactcacagagatcctcctgcctctgcctctgcttcccgactgctaggattagaggcatacaccaccactgccctgctaagctcagagttttttatttctactttggaattcctcagtggaaagaaaggtagagcaggagagggggtgtggtcaagtgatggctcccctccaggtccttgcaggtttaccttaaggagtggagcttagcagggcttcatctgtagtcctgaggctagtgacttccctgttaatagcaagcatcccgatagtgtttcatctcgagtacacacagtcctggaatctccgccttcctctcctgagagagtgcggatggcaaaagactactgtagcacttgtgaactggctcacagcaaatcccagagctgaccgcactactcccgaaagtacccttcaccaaatcttggctctgacccaccgctgtttcatgcccaagataactcagaaggcaacctcaggagctctggacccaaaccttgcaaagtcagtagttgtcactgtgatgcaaagtcctctccctgcaaggtgggactaggctgcctcctcacagcccttccctcggagagaaagcctcttgagaccaggctgcggagctctggagattcagcacgggactacagaactgctgctctcagttcagccacttctgtcctggcacgtgggagacatgattctgtcacatcaagtcctgtctgtttgctggaaaggaataatacaagtttgtataatcattgccttggtggcaacaggagctacagtgacttcgaaggatgtcgtcctctttgccgctttcccagttcgactgtcccgacaaatgacctgcattgtggtgccactgtggcattagtgctagcatttcacacagtcagaagctcagcctgcatagagtcctgtgaggcatgaagggtaaatgcagtttcactcagcctggttgacctcagccccacagctaacacaacacagtcaggccgcgggtccctcactgcggcattctcaacccctgggttgccacccatttgcagcccctatatccaaaaccatttacattatgatttataacagtagcagcattagttgtgaaatagcaaagattttatggttgggggttaccaccacaaagggtcgcagcagcaggaagtttgagaaccctgcaccacagggtccatctcacacctgcctctgccaccattgttcccaaaactgactggaaactgagcttttgaaactgtctcgatgtggtgcttgagggccagattgacagtagcagaattactggaatggatgctctagtgacatctgcatttgtacaggggcggggttgggcggggcggggcggggttgggcagggtgtgttcagagtcactgtacttacagtccagcccagagctgctggcagtcatgcccaggggtctgccttgtgcgtgctagcaaggctgtgctgcagatctcacttcctgccccagagttctgctgtagtatgttcgtttacagtgatagacggttccattgtgtacgacggtctctgactctatgcctacagtatttacagtgtcaaagattaaaagtgtcgcctgtccatttggccgtcactgggaaacagtgcttccaacagtgctctgtacgtaacctgtaagcatttcaaccccgccacgccagtgtggcctggcgttacgttggcgagccatcttgtacgttctcacttggtcctcgttcttctgcgacctgaaatagttgttccctctgctctgggagctggcggctggggaacagcagcagcttgtcttgtaaggtcctgccaggagggcaacaagtgactataaggaggctgttagtgagcctctgacagcttgtgaacttgctgtaattaaaacaaaaacttccctgttaaaaaaaaaaaaaaaaaaaaaaaaaaaaaaaaaaaaaaaaaaaaaaaaaaaaaaaaaaaaaaaaaaaaaaaaaaaaaa

SEQ ID NO: 449 - protein, 568 aa, Rattus norvegicus
  ref <308>: DATABASE ACCESSION NUMBER: SWISS-Prot / O54902
  ref <309>: DATABASE ENTRY DATE: 2002-06-15
MVLDPEEKIPDDGASGDHGDSASLGAINPAYSNSSLPHSTGDSEEPFTTYFDEKIPIPEEEYSCFSFRKLWAFTGPGFLMSIAYLDPGNIESDLQSGAVAGFKLLWVLLLATIVGLLLQRLAARLGVVTGLHLAEVCHRQYPKVPRIILWLMVELAIIGSDMQEVIGSAIAINLLSAGRVPLYGGVLITIADTFVFLFLDKYGLRKLEAFFGFLITIMALTFGYEYVTVKPSQSQVLRGMFVPSCSGCHTPQVEQAVGIVGAVIMPHNMYLHSALVKSRQVNRANKQEVREANKYFFIESCIALFVSFIINVFVVSVFAEAFFEKTNEQVVEVCRNSSSPHADLFPNDNSTLAVDIYKGGVVLGCYFGPAALYIWAVGILAAGQSSTMTGTYSGQFVMEGFLNLKWSRFARVILTRSIAIIPTLLVAVFQDVEHLTGMNDFLNVLQSLQLPFALIPILTFTSLRPVMSEFSNGIGWRIAGGILVLLVCSINMYFVVVYVQELGHVALYVVAAVVSVAYLGFVFYLGWQCLIALGLSFLDCGRSYHLGLTARPEIYLLNTVDAVSLVSR

SEQ ID NO: 450 - DNA, 4103 bp, Homo sapiens
  ref <308>: DATABASE ACCESSION NUMBER: EMBL / AB004857
  ref <309>: DATABASE ENTRY DATE: 1998-03-10
ggagccctgggcgcgggggcggcgtgtcaggtggttgcggagctggtaagaatcatattctaagaactcagccactcaggtatccaccatggtgctgggtcctgaacagaagatgtcagatgacagtgtttctggagatcatggggagtctgccagtcttggtaacatcaaccctgcctatagtaatccctctctttcacagtcccctggggactcagaggagtacttcgccacttactttaatgagaagatctccattcctgaggaggagtactcttgttttagctttcgtaaactctgggctttcaccggaccaggttttcttatgagcattgcctacctggatccaggaaatattgaatccgatttgcagtctggagcagtggctggatttaagttgctctggatccttctgttggccacccttgtggggctgctgctccagcggcttgcagctagactgggagtggttactgggctgcatcttgctgaagtatgtcaccgtcagtatcccaaggtcccacgagtcatcctgtggctgatggtggagttggctatcatcggctcagacatgcaagaagtcattggctcagccattgctatcaatcttctgtctgtaggaagaattcctctgtggggtggcgttctcatcaccattgcagatacttttgtatttctcttcttggacaaatatggcttgcggaagctagaagcattttttggctttctcatcactattatggccctcacatttggatatgagtatgttacagtgaaacccagccagagccaggtactcaagggcatgttcgtaccatcctgttcaggctgtcgcactccacagattgaacaggctgtgggcatcgtgggagctgtcatcatgccacacaacatgtacctgcattctgccttagtcaagtctagacaggtaaaccggaacaataagcaggaagttcgagaagccaataagtactttttcattgaatcctgcattgcactctttgtttccttcatcatcaatgtctttgttgtctcagtctttgctgaagcattttttgggaaaaccaacgagcaggtggttgaagtctgtacaaataccagcagtcctcatgctggcctctttcctaaagataactcgacactggctgtggacatctacaaagggggtgttgtgctgggatgttactttgggcctgctgcactctacatttgggcagtggggatcctggctgcaggacagagctccaccatgacaggaacctattctggccagtttgtcatggagggattcctgaacctaaagtggtcacgctttgcccgagtggttctgactcgctctattgccatcatccccactctgcttgttgctgtcttccaagatgtagagcatctaacagggatgaatgactttctgaatgttctacagagcttacagcttccctttgctctcatacccatcctcacatttacgagcttgcggccagtaatgagtgactttgccaatggactaggctggcggattgcaggaggaatcttggtccttatcatctgttccatcaatatgtactttgtagtggtttatgtccgggacctagggcatgtggcattatatgtggtggctgctgtggtcagcgtggcttatctgggctttgtgttctacttgggttggcaatgtttgattgcactgggcatgtccttcctggactgtgggcatacggtaagcatctctaaaggcctgctgacagaagaagccacccgtggctacgttaaataacactggattagtctgtcttctgcaggtagccatcagagccagtgtgtttctatggtttactgtgtgaacatagccaaaagtatgtgccgttgcacagactgtgtttatgactcaaccgttggttggaaaagactttgtttcatgtgtatttgaaagatggaattattttttccttcctgacctaaccttagaactggattagggtgggatctttgaaaagctgacatttgctgctatcattccaacactaaattcttaagtagttgcccaagggccagctcagtttatccttcggagagacaaggatatgcatgattcttaaccaggctatatgttaaaaaaaaattggaaaatgcaatacattttttattatacaaactacagaatgagtatgcaagttttatttatcaaaatgtaatggatttttaaaggctgagaaattttccttatacctaccttttcagttattttaattataccaaattatcaactagaatagcttcatccatatgaaatataaaatgaagagacacctagctctatcaggcttaggattctttgaacttatttccactttaatttctcagtggaagttaagaggggtgagaaaacaaagaaggggaaaaactgacaactaacaaaaccagcaccacatcgctaggtggtgcttactaattaccttctcaggattttcctcagattgaaaagcttatgaggatttcttgggagtcttaataacctgcctgttagtacagagctttcctgatgatatttactcttgagcacatgtggttgtaaaaccttaactttctttctccaggagggtggtgatagaaacagatggtagtatttatgaactgatgttctcgtgaaatgttgagggtggggagaaaagactttaagggaggagagccatctattttgttcctaaagccacctctcagcagaatcgtcatgtttttctgatgcaccgctctgcttcatgcccaagatgacttgcgaggcaatctcaggagctgtggacttaaccgttgcaaagcacactgtctttctcagcgttctctgcaagtcagtaggtgttagtatggttgcaaagttcactgtctcagcaaagttgaactgggctacctctctacagctgtttcctcagagggaaaaatcttgagaccatggtggagctctggagtcagaggaaatgggtgtcttcagcacaaagctgctgcttttacttcagccacttctgacatttttacataccgagcctgagattgtgtgattatctcaaatcaaatcactttgatggagataaataatcaaaactgttttatagtcattgatttggtgagaacagtaatggaaaatggtgttgaaggacttctcatttttggagctttccttccagagtcctggctgattggtgttcgctgttcatctgagcccccaaaagcattattactgatacttgcacacagtcaaaagcgcagactggatggatggtcttttataaggcatttaagggtacactactgtgtttcactgaccatacatttttcttagcccctcaagtaatatagcacagagttatgaatgacaattcccctaaccattcctcttcatatctgcctcttccccttaccatcgtaattctccaaactggtcataaaggcactctgtgaagatattggggactgacatcttaagctctcacctggctgcagtaggaaaggccaaactgacgacaaaaaaaaaattctttataaagatgatatggtaacatgtatctttgccctgggtctgggtgggtccagtcagtctcagatttacaagcatttaggagcctaggtaaaagctgctagtattcttttaaaagttatatttatgacttgcaatgatagaaaactccttccaattaaatggcattttataatattatgtgtgtacttcacagtgttaaaaataccctcatacgttattgcatttgatcttcacagaaagtgcattttaaccagtactctgggtgcaataaataatatgtagaaatttaagtcctccaattccagcatatccagtgagttttgacagtgtgtttatgtggaatgtttaaggatatacaattgtactttatataaattggttcttgttcttcttaaatgtgacatgaaataattgtgctgctacattatactggaaattaacaggggaaaagggaagagctcttggctcccttgaggttctgctagtggtgttaggagtggttacaactgagcttttagtaaccatttaaccgtatgtaaacttggtttctaattaaaaaaaaatttctttttcc

SEQ ID NO: 451 - protein, 568 aa, Homo sapiens
  ref <308>: DATABASE ACCESSION NUMBER: SWISS-Prot / P49281
  ref <309>: DATABASE ENTRY DATE: 2002-06-15
MVLGPEQKMSDDSVSGDHGESASLGNINPAYSNPSLSQSPGDSEEYFATYFNEKISIPEEEYSCFSFRKLWAFTGPGFLMSIAYLDPGNIESDLQSGAVAGFKLLWILLLATLVGLLLQRLAARLGVVTGLHLAEVCHRQYPKVPRVILWLMVELAIIGSDMQEVIGSAIAINLLSVGRIPLWGGVLITIADTFVFLFLDKYGLRKLEAFFGFLITIMALTFGYEYVTVKPSQSQVLKGMFVPSCSGCRTPQIEQAVGIVGAVIMPHNMYLHSALVKSRQVNRNNKQEVREANKYFFIESCIALFVSFIINVFVVSVFAEAFFGKTNEQVVEVCTNTSSPHAGLFPKDNSTLAVDIYKGGVVLGCYFGPAALYIWAVGILAAGQSSTMTGTYSGQFVMEGFLNLKWSRFARVVLTRSIAIIPTLLVAVFQDVEHLTGMNDFLNVLQSLQLPFALIPILTFTSLRPVMSDFANGLGWRIAGGILVLIICSINMYFVVVYVRDLGHVALYVVAAVVSVAYLGFVFYLGWQCLIALGMSFLDCGHTCHLGLTAQPELYLLNTMDADSLVSR

SEQ ID NO: 452 - DNA, 4409 bp, Rattus norvegicus; identical to SEQ ID NO: 448
  ref <308>: DATABASE ACCESSION NUMBER: EMBL / AF008439
  ref <309>: DATABASE ENTRY DATE: 1997-08-25

SEQ ID NO: 453 - protein, 568 aa, Rattus norvegicus; identical to SEQ ID NO: 449
  ref <308>: DATABASE ACCESSION NUMBER: SWISS-Prot / O54902
  ref <309>: DATABASE ENTRY DATE: 2002-06-15

SEQ ID NO: 454 - DNA, 4103 bp, Homo sapiens; identical to SEQ ID NO: 450
  ref <308>: DATABASE ACCESSION NUMBER: EMBL / AB004857
  ref <309>: DATABASE ENTRY DATE: 1998-03-10

SEQ ID NO: 455 - protein, 568 aa, Homo sapiens; identical to SEQ ID NO: 451
  ref <308>: DATABASE ACCESSION NUMBER: SWISS-Prot / P49281
  ref <309>: DATABASE ENTRY DATE: 2002-06-15

SEQ ID NO: 456 - DNA, 1219 bp, Rattus norvegicus
  ref <308>: DATABASE ACCESSION NUMBER: EMBL / AF008554
  ref <309>: DATABASE ENTRY DATE: 2000-03-03
aattgaggaggtcagaaggtttcgcccggtcgccgagagagacaagcgaacatggcctcgccgaggtggctctggtgtgtgtgtgcgaccgcagcggtcacactgctgctcgtttccaaggttccttcggcctctgcccaaagaaagaaggagaaggttttagtggagaaggtcattcagctgatggaatggaccaatcaaagaccagtcataagaatgaatggagacaagttccgtccccttgttaaagcaccaccaagaaattactctgttattgtcatgtttactgctctccaacttcatagacaatgtgtcgtttgcaagcaagctgatgaagaattccagattttggcaaatttttggcgatactccagtgcatttaccaaccgcatattttttgccatggtggattttgatgaaggctctgatgtatttcaaatgctaaacatgaattcagctccaactttcatcaactttcctccaaaaggaaaacccaaaagggctgatacatatgagttgcaggtgcgagggttttcagctgaacagattgcccggtggatcgcagacagaactgacgtcaacattagagtaatcagacctccaaattatgctggacctctaatgttggggttgcttcttgctgttattggtggacttgtgtatctgcgacgaagtaatatggaattcctctttaataaaaccggatgggcttttgcagcattgtgttttgtacttgcaatgacatctggccaaatgtggaaccatataagaggaccaccatatgctcataagaatccccatacaggacatgtgaattatatccacggaagcagccaagcacagtttgtagctgaaacccacattgttcttctcttcaatggtggggttaccttaggtatggtgcttttatgtgaagctgctgcctctgacatggatattgggaagcgaaggatgatgtgtattgctgggattggacttgttgtgttattcttcagttggatgctgtccatctttcgatcaaaataccatggctatccatacagctttctgatgagttaaagaggattccagagaaacattgacaccggtaatggaaactgaaaaataaaacctgttgggggttggagaatgcactcaagttttttcttaccccttgggcaaggaacgacttataacaattaccaagtccggggccttaaagaaaggaacagaggtttgg

SEQ ID NO: 457 - protein, 335 aa, Rattus norvegicus
  ref <308>: DATABASE ACCESSION NUMBER: SWISS-Prot / O35777
  ref <309>: DATABASE ENTRY DATE: 1999-07-15
MASPRWLWCVCATAAVTLLLVSKVPSASAQRKKEKVLVEKVIQLMEWTNQRPVIRMNGDKFRPLVKAPPRNYSVIVMFTALQLHRQCVVCKQADEEFQILANFWRYSSAFTNRIFFAMVDFDEGSDVFQMLNMNSAPTFINFPPKGKPKRADTYELQVRGFSAEQIARWIADRTDVNIRVIRPPNYAGPLMLGLLLAVIGGLVYLRRSNMEFLFNKTGWAFAALCFVLAMTSGQMWNHIRGPPYAHKNPHTGHVNYIHGSSQAQFVAETHIVLLFNGGVTLGMVLLCEAAASDMDIGKRRMMCIAGIGLVVLFFSWMLSIFRSKYHGYPYSFLMS

SEQ ID NO: 458 - DNA, 3015 bp, Homo sapiens
  ref <308>: DATABASE ACCESSION NUMBER: EMBL / AK027632
  ref <309>: DATABASE ENTRY DATE: 2002-08-06
cattcaccaacaggatattttttgccatggtggattttgatgaaggctctgatgtatttcagatgctaaacatgaattcagctccaactttcatcaactttcctgcaaaagggaaacccaaacggggtgatacatatgagttacaggtgcggggtttttcagctgagcagattgcccggtggatcgccgacagaactgatgtcaatattagagtgattagacccccaaattatgctggtccccttatgttgggattgcttttggctgttattggtggacttgtgtatcttcgaagaagtaatatggaatttctctttaataaaactggatgggcttttgcagctttgtgttttgtgcttgctatgacatctggtcaaatgtggaaccatataagaggaccaccatatgcccataagaatccccacacgggacatgtgaattatatccatggaagcagtcaagcccagtttgtagctgaaacacacattgttcttctgtttaatggtggagttaccttaggaatggtgcttttatgtgaagctgctacctctgacatggatattggaaagcgaaagataatgtgtgtggctggtattggacttgttgtattattcttcagttggatgctctctatttttagatctaaatatcatggctacccatacagctttctgatgagttaaaaaggtcccagagatatatagacactggagtactggaaattgaaaaacgaaaatcgtgtgtgtttgaaaagaagaatgcaacttgtatattttgtattacctctttttttcaagtgatttaaatagttaatcatttaaccaaagaagatgtgtagtgccttaacaagcaatcctctgtcaaaatctgaggtatttgaaaataattatcctcttaaccttctcttcccagtgaactttatggaacatttaatttagtacaattaagtatattataaaaattgtaaaactactactttgttttagttagaacaaagctcaaaactactttagttaacttggtcatctgattttatattgccttatccaaagatggggaaagtaagtcctgaccaggtgttcccacatatgcctgttacagataactacattaggaattcattcttagcttcttcatctttgtgtggatgtgtatactttacgcatctttccttttgagtagagaaattatgtgtgtcatgcggtcttctgaaaatggaacaccattcttcagagcacacgtctagccctcagcaagacagttgtttctcctcctccttgcatatttcctactgaaatacagtgctgtctatgattgtttttgttttgttgtttttttgagacgctactgcgctccagcctgagtgatagagtgagactctgtctcaaaaaaaagtatctctaaatacaggattataatttctgcttgagtatggtgttaactaccttgtatttagaaagatttcagattcattccatctccttagttttcttttaaggtgacccatctgtgataaaaatatagcttagtgctaaaatcagtgtaacttatacatggcctaaaatgtttctacaaattagagtttgtcacttattccatttgtacctaagagaaaaataggctcagttagaaaaggactccctggccaggcgcagtgacttacgcctgtaatctcagcactttgggaggccaaggcaggcagatcacgaggtcaggagttcgagaccatcctggccaacatggtgaaaccccgtctctactaaaaatataaaaattagctgggtgtggtggcaggagcctgtaatcccagctacacaggaggctgaggcacgagaatcacttgaactcaggagatggaggtttcagtgagccaagatcacaccactgcactccagcctggcaacagagcgagactccatctcaaaaaaaaaaaaaaagtaagaaagaaaaggactcccttagaatgggaaagaaaaatcataaaatattgagctgatgcctgtatatagaaattaagcgtttctcgaaagctgttctatgttttgctgttattttagtctttattctcttcctttaggtggagaaacaaagtaccaatttgaagggattttttttattttgtcttttggtttctgtcagtagaaataaccatatgtgctaaccaaatttctgtgaagaatgttttcatggttatcattatatctaactataacctcccccatagttatgaagagtaacctgaaatgccactattgtggaaataggataattgtaattgtgaaaaaataattttaaggaaatcttacaagtattacattaaaaagatactatgactgccacctgccatttaccttctaataaccctgccatgtggtttgcagaaagagatggatatagtagcctcagaagaaatattttatgtgggttttttgtttttcgttactagatttcatggatgaggggatatggttgaccttttactttttaatggagcagccagtttttgttaattactcacttgtaaattgtgagattctgaattccttacctgctattcttgtacttgtctcaggccaaatctatgctgtggttcttatgagacttgtatgaagatgccctgatttgtacagattgaccacgggaatactactgccatgtaatctgtatagttccagataatttgtcatgaacattgacagaatgacaattttttgtatttgctttttctccctttaagagcacattcttctgtaaggagaaaggcagcattctggctaaaatgtgtagaaggtaatttactacacttataaaatagtgtgacttttgtgaaaattttgaattagctttcatatgaagtgccttaagtagactcttcatttacttttctggtaatggtttaaatatcatttgttatgcatttttaagatacagttcagaatgacacattgtagtggcaaagataaccaaatgtctggctgtttgctttttgaccatatcaataaacttttacaatct

SEQ ID NO: 459 - protein, 348 aa, Homo sapiens
  ref <308>: DATABASE ACCESSION NUMBER: SWISS-Prot / AAB18374
  ref <309>: DATABASE ENTRY DATE: 2001-10-16
MGARGAPSRRRQAGRRLRYLPTGSFPFLLLLLLLCIQLGGGQKKKENLLAEKVEQLMEWSSRRSIFRMNGDKFRKFIKAPPRNYSMIVMFTALQPQRQCSVCRQANEEYQILANSWRYSSAFCNKLFFSMVDYDEGTDVFQQLNMNSAPTFMHFPPKGRPKRADTFDLQRIGFAAEQLAKWIADRTDVHIRVFRPPNYSGTIALALLVSLVGGLLYLRRNNLEFIYNKTGWAMVSLCIVFAMTSGQMWNHIRGPPYAHKNPHNGQVSYIHGSSQAQFVAESHIILVLNAAITMGMVLLNEAATSKGDVGKRRIICLVGLGLVVFFFSFLLSIFRSKYHGYPYSDLDFE

SEQ ID NO: 460 - DNA, 1219 bp, Rattus norvegicus; identical to SEQ ID NO: 456
  ref <308>: DATABASE ACCESSION NUMBER: EMBL / AF008554
  ref <309>: DATABASE ENTRY DATE: 2000-03-03

SEQ ID NO: 461 - protein, 335 aa, Rattus norvegicus; identical to SEQ ID NO: 457
  ref <308>: DATABASE ACCESSION NUMBER: SWISS-Prot / O35777
  ref <309>: DATABASE ENTRY DATE: 1999-07-15

SEQ ID NO: 462 - DNA, 3015 bp, Homo sapiens; identical to SEQ ID NO: 458
  ref <308>: DATABASE ACCESSION NUMBER: EMBL / AK027632
  ref <309>: DATABASE ENTRY DATE: 2002-08-06

SEQ ID NO: 463 - protein, 348 aa, Homo sapiens; identical to SEQ ID NO: 459
  ref <308>: DATABASE ACCESSION NUMBER: SWISS-Prot / AAB18374
  ref <309>: DATABASE ENTRY DATE: 2001-10-16

SEQ ID NO: 464 - DNA, 3101 bp, Rattus norvegicus
  ref <308>: DATABASE ACCESSION NUMBER: EMBL / AF009329
  ref <309>: DATABASE ENTRY DATE: 2001-05-07
tgtctacaccataattcctttgtctttgagccagctcacaaatgtcactgtggttctgagtgtgggggtcttggtgcagtccctcccctcccagtcccttccgtcgaggagcatggtgctagtgctgccacagcctggagacgcacacaaccccccaaaatctctccagacgaccgtcccacgatcacaggacagaaccctccaaatcgaaacggaggaaacggacagccattgaacatggacgaaggaatccctcatttgcaagagagacagttactggaacatagggattttataggactggactattcctctttgtatatgtgtaaacccaaaaggagcttgaagcgagacgacaccaaggatacctacaaattaccgcacagattaatagaaaagaagagacgagaccgaattaatgaatgtattgctcagctgaaagacttactgcctgaacatctgaaattgacaacactggggcatctggagaaagcagtagtcttggaattaactttgaagcacttaaaagctttaacagccttaacggagcagcagcatcagaagataattgctttacagaatggggagcgctctctgaaatcgccggtccaggccgacttggatgcgttccactcggggtttcaaacctgcgccaaagaagtcttgcaatacctcgcgcgctttgagagctggacgcccagggaaccgcgctgcgcacagctcgtcagccacctgcacgccgtggctacccagcttctgacgccacaggtgaccccaggcaggggccctgggcgcgcgccctgcagcgctggggctgcagccgcctccggttccgagcgcgtcgcccgctgcgtgccggtcatccagcggactcagcccggcacggagcccgagcacgacacggacaccgacagcggctatggaggcgaggcggagcagggccgcgccgccgtcaagcaggagccacccggggacccgtcgctgcgcccaagaggctgaagctggaggcgcgcggcgcgctcctgggcccggagcccgcgctgctcggctctctcgtggcgttgggcgggggtgcgcccttcgcgcagcccgccgccgcgcccttctgcctgcccttctacctgctgtcgccgtccgccgccgcctacgtacagccctggctagacaagagtggcctggacaagtatctgtaccccgcggcggccgcgcccttcccgctgctgtatcccggcatccccgcagcagccgccgctgccgccgccgccgctttcccttgcttgtcgtccgtgctatcgccacccccggagaaggcaggttcggccgctggtgccccattcctggcgcacgaggtggcgcccccggggtcgctgcgcccccagcacgcgcatagccgcacccacctgccgcacgccgtgaacccagagagctctcaggaagatgccacgcagccggccaaggacgccccctgaacccagcattccttccagaacagggcagggggctcctgaggagtcgccaggtttccaagttcaaacatcccctaaggcgtaccagggaggaagagtaagagatgctctgctcgacaggcttaggacaaaaacaggtgttttgtgtatgtttggagttcctgttttgcccctttctcacccttctgccaccccaccctctaccctttgacactcccttccccatccctgctgtcacagagcctccctgagaaatactggttatcttaaattaccctcccttacatttagttcacgtcctctgtttccaaacatagaccctggttcaggagtctgttgggtgggagagccacacggaaccagttagagtgcctggtatcagggctccttgacccaggcctggaacagtagctgtgtcccctgtctgtccccttaggaggtgacccataactgagggtctctgaaagttacattgacgtgtcagtattttgtattcttcagctttttggaaggtacctctttttcaaagaagtgaggatgccattgccctgttgtgaggtggctggagtggtgtctttataccttgcacctgttgggagaaactgagagttggggccatcttcaggcactgtgtcagtgtgggagctggaagagggagtttggagcccgtggcgcctttctcgcactttattgacaaattgacctcaacccctttgtcccatgtctcaactcacagatatatgtcataggttatatatttgtgtttctgatccctcgttattttatccatcatggtcccaaatttttgtaatgttactggggtttggggtggggtggggtgttaaagtgctctgggctggaaaaagacaagcccaaacctattgattgtcgaattcttagatgacagaagtggagagaggggcttgtggtcccttgtgatgggaagtgctgtgaacatgtagaaggccctgccagcctcgctctctcaagtctgtatgtatttttcgggagaccaaaccagacaccagataatcaggaagaaagctttttaaaataaggcaaaaaccgagaccttgtctagatatttttagtttgttgccaaggtagcactgagaaatctcacttgaatgttacataaggagtgattcacaatagtctagagtgaagaaagttatctgggtctgtgagtgttcgggtccgtttgctgctgctgttgctactgtttgcctcaaacgctgtgtttaaacaacgttaaacttcttagcctaccaaggcggccgtatgtacatagctgttaatacccccaactaatgtctgacatgctatttttgtagggagaagatacctgctagtgatattttgagttaaaatatcttttggggcggacttggtgaaatgtttgcactttggtcacaatgcttctactgcttggtgcaacgttacgctgtcttaaattattaaacaaataaaaaatactatctgcaagaaaaaccagctggtttagacaagtttagtatgtaaagataagctagaaactatctttatattctagtattttcagcactccatattacctaaatattgccacactattttgtgatttaaaagttcttactaaggaataaaatctttata

SEQ ID NO: 465 - protein, 410 aa, Rattus norvegicus
  ref <308>: DATABASE ACCESSION NUMBER: SWISS-Prot / O35779
  ref <309>: DATABASE ENTRY DATE: 2002-06-15
MDEGIPHLQERQLLEHRDFIGLDYSSLYMCKPKRSLKRDDTKDTYKLPHRLIEKKRRDRINECIAQLKDLLPEHLKLTTLGHLEKAVVLELTLKHLKALTALTEQQHQKIIALQNGERSLKSPVQADLDAFHSGFQTCAKEVLQYLARFESWTPREPRCAQLVSHLHAVATQLLTPQVTPGRGPGRAPCSAGAAAASGSERVARCVPVIQRTQPGTEPEHDTDTDSGYGGEAEQGRAAVKQEPPGDPSAAPKRLKLEARGALLGPEPALLGSLVALGGGAPFAQPAAAPFCLPFYLLSPSAAAYVQPWLDKSGLDKYLYPAAAAPFPLLYPGIPAAAAAAAAAAFPCLSSVLSPPPEKAGSAAGAPFLAHEVAPPGSLRPQHAHSRTHLPHAVNPESSQEDATQPAKDAP

SEQ ID NO: 466 - DNA, 3641 bp, Homo sapiens
  ref <308>: DATABASE ACCESSION NUMBER: Refseq / NM_030762
  ref <309>: DATABASE ENTRY DATE: 2001-09-28
ctgcactgaagagggagagcgagagagagactggagacgcacagatccccccaaggtctcccaagcctaccgtcccacagattattgtacagagccccaaaaatcgaaacagaggaaacgaacagcagttgaacatggacgaaggaattcctcatttgcaagagagacagttactggaacatagagattttataggactggactattcctctttgtatatgtgtaaacccaaaaggagcatgaaacgagacgacaccaaggatacctacaaattaccgcacagattaatagaaaagaaaagaagagaccgaattaatgaatgcattgctcagctgaaagatttactgcctgaacatctgaaattgacaactctgggacatctggagaaagctgtagtcttggaattaactttgaaacacttaaaagctttaaccgccttaaccgagcaacagcatcagaagataattgctttacagaatggggagcgatctctgaaatcgcccattcagtccgacttggatgcgttccactcgggatttcaaacatgcgccaaagaagtcttgcaatacctctcccggtttgagagctggacacccagggagccgcggtgtgtccagctgatcaaccacttgcacgccgtggccacccagttcttgcccaccccgcagctgttgactcaacaggtccctctgagcaaaggcaccggcgctccctcggccgccgggtccgcggccgccccctgcctggagcgcgcggggcagaagctggagcccctcgcctactgcgtgcccgtcatccagcggactcagcccagcgccgagctcgccgccgagaacgacacggacaccgacagcggctacggcggcgaagccgaggcccggccggaccgcgagaaaggcaaaggcgcgggggcgagccgcgtcaccatcaagcaggagcctcccggggaggactcgccggcgcccaagaggatgaagctggattcccgcggcggcggcagcggcggcggcccggggggcggcgcggcggcggcggcagccgcgcttctggggcccgaccctgccgccgcggccgcgctgctgagacccgacgccgccctgctcagctcgctggtggcgttcggcggaggcggaggcgcgcccttcccgcagcccgcggccgccgcggcccccttctgcctgcccttctgcttcctctcgccttctgcagctgccgcctacgtgcagcccttcctggacaagagcggcctggagaagtatctgtacccggcggcggctgccgccccgttcccgctgctataccccggcatccccgccccggcggcagccgcggcagccgccgccgccgctgccgccgccgccgccgcgttcccctgcctgtcctcggtgttgtcgccccctcccgagaaggcgggcgccgccgccgcgaccctcctgccgcacgaggtggcgccccttggggcgccgcacccccagcacccgcacggccgcacccacctgcccttcgccgggccccgcgagccggggaacccggagagctctgctcaggaagatccctcgcagccaggaaaggaagctccctgaatccttgcgtcccgaaggacggaggttcaagcagagtgagaagttaaaatacccttaaggaggttcaagcagagtgagaagttaaaatacccttaaggtctttaagggaggaagtgtaatagatgcacgacaggcataaacaagaacaacaaaacaggtgttatgtgtacattcggagttcctgttttgctcatcccgcaccaccccaccctccacacactaacatccctttcttccccccaccagctgtaaaagatcctatgcgaaagacactggctcttttttttaatcccccaaataaattttgcccccttttaggccatgttccattatctcttaaaattggaacctaattcgagaggaagtaagaagggtctgttctgtggctgagctaggtgaaccccggggtaggggaaagatgttaacacctttgacgtctttggagttgacatggaacagcaggtagttgttatgtagagctagttctcaaagctgccctgcctgttttaggaggcgttccacaaacagattgaggctctttttagaattgaatttactcttcagtattttctaatgttcagctttctaaaaggcatatatttttcaaagaagtgaggatgcagtttctcacgttgcaacctattctgaagtggtttaaatggtatctcttagtaacttgcactcgttaaagaaacacggagctgggccatcgtcagaactaagtcagggaaggagatggatgagaaggccagaatcattcctagtacatttgctaacactttattgagaaattgaccatgaattaatggactcatcttaatttcttctaagtccatatatagatagatatctatctgtacagatttctatttatccatagataggtatctatacatacacatctcaagtgcatctattcccactctcattaatccatcatgttcctaaatttttgtaatcttactgtaaaaaaaagtgcactgaacttcaaaacaaaacaaaaaacaacaacaacaaaaaacaagtccaaactgatatatcctatattctgttaaaattcaaaagtgaacgaaagcatttaactggccagttttgattgcaaatgctgtaaagatatagaatgaagtcctgtgaggccttcctatctccaagtctatgtattttctggagaccaaaccagataccagataatcacaaagaaagcttttttaataaggcttaaaccaagaccttgtctagatatttttagtttgttgccaaggtagcactgtgagaaatctcacttggatgttatgtaaggggtgagacacaacagtctgactatgagtgaggaaaatatctgggtcttttcgtcagtttggtgcatttgctgctgctgttgctactgtttgcctcaaacgctgtgtttaaacaacgttaaactcttagcctacaaggtggctcttatgtacatagttgttaatacatccaattaatgatgtctgacatgctatttttgtagggagaaaatatgtgctaatgatattttgagttaaaatatcttttggggaggatttgctgaaaagttgcacttttgttacaatgcttatgcttggtacaagcttatgctgtcttaaattattttaaaaaaattaaatactgtctgtgagaaaccagctggtttagaaaagtttagtatgtgacgataaactagaaattacctttatattctagtattttcagcactccataaattctattacctaaatattgccacactattttgtgatttaaaaattcttactaaggaataaaaactttaatatacgatatgatattgtctaataattaaaaaagacataatggatgctcaattagttttaagatatctataactatagggatacaaatcactacagttctcagatttacaccttttttttgtcattggcttgatgtcacacatttccaatctcttgcaagcctccaggctctggctttgtctacctgctcgttcccaatgtatcttaatgaaaagtgcaaaagaaaaacctaccaattaaaaaaaaaaaaaaaaaa

SEQ ID NO: 467 - protein, 482 aa, Homo sapiens
  ref <308>: DATABASE ACCESSION NUMBER: SWISS-Prot / Q9C0J9
  ref <309>: DATABASE ENTRY DATE: 2002-06-15
MDEGIPHLQERQLLEHRDFIGLDYSSLYMCKPKRSMKRDDTKDTYKLPHRLIEKKRRDRINECIAQLKDLLPEHLKLTTLGHLEKAVVLELTLKHLKALTALTEQQHQKIIALQNGERSLKSPIQSDLDAFHSGFQTCAKEVLQYLSRFESWTPREPRCVQLINHLHAVATQFLPTPQLLTQQVPLSKGTGAPSAAGSAAAPCLERAGQKLEPLAYCVPVIQRTQPSAELAAENDTDTDSGYGGEAEARPDREKGKGAGASRVTIKQEPPGEDSPAPKRMKLDSRGGGSGGGPGGGAAAAAAALLGPDPAAAAALLRPDAALLSSLVAFGGGGGAPFPQPAAAAAPFCLPFCFLSPSAAAAYVQPFLDKSGLEKYLYPAAAAAPFPLLYPGIPAPAAAAAAAAAAAAAAAAFPCLSSVLSPPPEKAGAAAATLLPHEVAPLGAPHPQHPHGRTHLPFAGPREPGNPESSAQEDPSQPGKEAP

SEQ ID NO: 468 - DNA, 2388 bp, Rattus norvegicus
  ref <308>: DATABASE ACCESSION NUMBER: EMBL / AF009330
  ref <309>: DATABASE ENTRY DATE: 2001-05-07
ttccctcccgcctctccacccgccccacttctcattcacttggctcgcacggcgcagacagccaggcgagcacacaccgccagtctgtgtgcagagcgggagccagaagccgtgggggacacccggtcatgcacgcccccaactgaagcgacacctcaaagccgcagctcctggcagcccaggccattgcaagaagctcaggctagctcataggaacataccccttgagaccctcggatcctcccttccaggccagtcctctctcagactctctgctaagtgcagacaggagcgcacagtggcccctgctcgccgcatcatggagcggatccccagcgcgcaaccacctcctacctgcctgcccaaaacgccagggctggagcacggagacctgtcagggatggattttgcccacatgtaccaagtgtacaagtccaggcggggaataaaacggagcgaggacagcaaggaaacttacaaattgccgcaccggttgattgagaaaaagagacgtgaccggattaacgagtgcattgcccagctgaaggatctcctacccgaacatctcaaacttactactttgggtcacttggagaaagcagtggttctcgagctgacgctgaagcacgtgaaagcattgacaaacctaattgatcagcagcagcagaaaatcatggccctgcagagcggtttacaagctggtgatctgtcgggaaagaatattgaggcaggacaagaaatgttctgctccggtttccagacctgtgcccgggaggtacttcagtacctggccaagcatgaaaacactagggacctgaagtcttcccagcttgtcactcatctccaccgtgtggtctctgaactcctgcagggtagtgcttccaggaaaccattggactcagctcccaaacccgtggacttcaaagagaagcccagcttcctagccaagggatcagaaggccctgggaaaaactgtgtgccagtcatccagaggacttttgctccctcgggcggggagcagagtggtagtgacacggacacagacagtggctacggaggcgaattggagaagggtgacttgcgcagtgagcaaccctacttcaagagcgatcacggacgcaggttcaccgtgggagaacgcgtcagcacaattaagcaagaatctgaagagccccccaccaaaaagagccgaatgcagctctcagatgaggaaggccacttcgtgggcagtgacctgatgggttccccatttcttgggcctcacccacatcagcctcccttttgcctgcccttctatctcatcccaccatcggccactgcctatctgcctatgctggagaaatgctggtatccgacctctgtgccactgttatacccaggcctcaacacctcagcagcagccctctccagcttcatgaacccagacaagatcccaactcccttgctcctgccccagagactcccttctcccttggcacattcgtcccttgactcttcagccttgctccaggccctgaagcagatccctcctttaaacttagaaaccaaagactaaactcttgagggcgaatctcctgctgctttgcttttcctttccccactaattccaagaccacaaaaggtttctgtgagtgcagagagatcggcccaccatgcagacccacagagaagattcagaatgtgtgtgagagtgagtgtgtgagtgcgcgtgcgtgtgcttgtatgtgtgtttatagatgtaggacattaagttccttctgacacagggaagatgtgagaaggatggcctgacatcagatgacaagaggtctatagcacatctctgggcttttccctacccagagaagagccccctttgatacaaatcagttggattttcatatgcttcaaaggcttgatctgtgagtcactccagtttgggacataggtctgtctgtggctttgagaaaaggtactttcaaaagagggctttccagagcacagctcacagccagctgttaggaccccacccttctcctttattgtggaggtgactcacagcagactgacagtggtcagactgagctttctgctaaggtggtgaggtagccaacactggcatgtctcggtagtggtttgggcaaatttccgcaggtctcttcccccaaccctgcctctgatgaataaagacaatgagtacagttccttaattcaggcttttgtgactagcttactacggaaccgaaaatggtcccctttgtacaagccgagctgttatggaatcacggtgaaccagacccaggtctgtggcacctgtttgtttgtttttttttttttttttttttagctctcatttctacggcatgctttccaaggaaccaaaggagggtctcagagatgccccctcgt

SEQ ID NO: 469 - protein, 411 aa, Rattus norvegicus
  ref <308>: DATABASE ACCESSION NUMBER: SWISS-Prot / O35780
  ref <309>: DATABASE ENTRY DATE: 2002-06-15
MERIPSAQPPPTCLPKTPGLEHGDLSGMDFAHMYQVYKSRRGIKRSEDSKETYKLPHRLIEKKRRDRINECIAQLKDLLPEHLKLTTLGHLEKAVVLELTLKHVKALTNLIDQQQQKIMALQSGLQAGDLSGKNIEAGQEMFCSGFQTCAREVLQYLAKHENTRDLKSSQLVTHLHRVVSELLQGSASRKPLDSAPKPVDFKEKPSFLAKGSEGPGKNCVPVIQRTFAPSGGEQSGSDTDTDSGYGGELEKGDLRSEQPYFKSDHGRRFTVGERVSTIKQESEEPPTKKSRMQLSDEEGHFVGSDLMGSPFLGPHPHQPPFCLPFYLIPPSATAYLPMLEKCWYPTSVPLLYPGLNTSAAALSSFMNPDKIPTPLLLPQRLPSPLAHSSLDSSALLQALKQIPPLNLETKD

SEQ ID NO: 470 - DNA, 2922 bp, Homo sapiens
  ref <308>: DATABASE ACCESSION NUMBER: Refseq / NM_003670
  ref <309>: DATABASE ENTRY DATE: 2000-11-01
ggacaccgggccatgcacgcccccaactgaagctgcatctcaaagccgaagattccagcagcccaggggatttcaaagagctcagactcagaggaacatctgcggagagacccccgaagccctctccagggcagtcctcatccagacgctccgctagtgcagacaggagcgcgcagtggccccggctcgccgcgccatggagcggatccccagcgcgcaaccaccccccgcctgcctgcccaaagcaccgggactggagcacggagacctaccagggatgtaccctgcccacatgtaccaagtgtacaagtcaagacggggaataaagcggagcgaggacagcaaggagacctacaaattgccgcaccggctcatcgagaaaaagagacgtgaccggattaacgagtgcatcgcccagctgaaggatctcctacccgaacatctcaaacttacaactttgggtcacttggaaaaagcagtggttcttgaacttaccttgaagcatgtgaaagcactaacaaacctaattgatcagcagcagcagaaaatcattgccctgcagagtggtttacaagctggtgagctgtcagggagaaatgtcgaaacaggtcaagagatgttctgctcaggtttccagacatgtgcccgggaggtgcttcagtatctggccaagcacgagaacactcgggacctgaagtcttcgcagcttgtcacccacctccaccgggtggtctcggagctgctgcagggtggtacctccaggaagccatcagacccagctcccaaagtgatggacttcaaggaaaaacccagctctccggccaaaggttcggaaggtcctgggaaaaactgcgtgccagtcatccagcggactttcgctcactcgagtggggagcagagcggcagcgacacggacacagacagtggctatggaggagaatcggagaagggcgacttgcgcagtgagcagccgtgcttcaaaagtgaccacggacgcaggttcacgatgggagaaaggatcggcgcaattaagcaagagtccgaagaaccccccacaaaaaagaaccggatgcagctttcggatgatgaaggccatttcactagcagtgacctgatcagctccccgttcctgggcccacacccacaccagcctcctttctgcctgcccttctacctgatcccaccttcagcgactgcctacctgcccatgctggagaagtgctggtatcccacctcagtgccagtgctatacccaggcctcaacgcctctgccgcagccctctctagcttcatgaacccagacaagatctcggctcccttgctcatgccccagagactcccttctcccttgccagctcatccgtccgtcgactcttctgtcttgctccaagctctgaagccaatcccccctttaaacttagaaaccaaagactaaactctctaggggatcctgctgctttgctttccttcctcgctacttcctaaaaagcaacaaaaaagtttttgtgaatgctgcaagattgttgcattgtgtatactgagataatctgaggcatggagagcagattcagggtgtgtgtgtgtgtgtgtgtgtgtgtgtgtatgtgcgtgtgcgtgcacatgtgtgcctgcgtgttggtataggactttaaagctccttttggcatagggaagtcacgaaggattgcttgacatcaggagacttgggggggattgtagcagacgtctgggcttttccccacccagagaatagcccccttcgatacacatcagctggattttcaaaagcttcaaagtcttggtctgtgagtcactcttcagtttgggagctgggtctgtggctttgatcagaaggtactttcaaaagagggctttccagggctcagctcccaaccagctgttaggaccccacccttttgcctttattgtcgacgtgactcaccagacgtcggggagagagagcagtcagaccgagctttctgctaacatggggaggtagcaggcactggcatagcacggtagtggtttggggaggtttccgcaggtctgctccccacccctgcctcggaagaataaagagaatgtagttccctactcaggctttcgtagtgattagcttactaaggaactgaaaatgggccccttgtacaagctgagctgccccggagggagggaggagttccctgggcttctggcacctgtttctaggcctaaccattagtacttactgtgcagggaaccaaaccaaggtctgagaaatgcggacaccccgagcgagcaccccaaagtgcacaaagctgagtaaaaagctgcccccttcaaacagaactagactcagttttcaattccatcctaaaactccttttaaccaagcttagcttctcaaaggcctaaccaagccttggcaccgccagatcctttctgtaggctaattcctcttgcccaacggcatatggagtgtccttattgctaaaaaggattccgtctccttcaaagaagttttatttttggtccagagtacttgttttcccgatgtgtccagccagctccgcagcagcttttcaagatgcactatgcctgattgctgatcgtgttttaactttttcttttcctgtttttattttggtattaagtcgttgcctttatttgtaaagctgttataaatatatattatataaatatattaaaaaggaaaatgtttcagatgtttatttgtataattacttgattcacacagtgagaaaaaatgaatgtattcctgtttttgaagagaagaataatttttttttctctagggagaggtacagtgtttatattttggagccttcctgaaggtgtaaaattgtaaatatttttatctatgagtaaatgttaagtagttgttttaaaatacttaataaaataattcttttcctgtggaag

SEQ ID NO: 471 - protein, 412 aa, Homo sapiens
  ref <308>: DATABASE ACCESSION NUMBER: SWISS-Prot / O14503
  ref <309>: DATABASE ENTRY DATE: 2002-06-15
MERIPSAQPPPACLPKAPGLEHGDLPGMYPAHMYQVYKSRRGIKRSEDSKETYKLPHRLIEKKRRDRINECIAQLKDLLPEHLKLTTLGHLEKAVVLELTLKHVKALTNLIDQQQQKIIALQSGLQAGELSGRNVETGQEMFCSGFQTCAREVLQYLAKHENTRDLKSSQLVTHLHRVVSELLQGGTSRKPSDPAPKVMDFKEKPSSPAKGSEGPGKNCVPVIQRTFAHSSGEQSGSDTDTDSGYGGESEKGDLRSEQPCFKSDHGRRFTMGERIGAIKQESEEPPTKKNRMQLSDDEGHFTSSDLISSPFLGPHPHQPPFCLPFYLIPPSATAYLPMLEKCWYPTSVPVLYPGLNASAAALSSFMNPDKISAPLLMPQRLPSPLPAHPSVDSSVLLQALKPIPPLNLETKD

SEQ ID NO: 472 - DNA, 1103 bp, Rattus norvegicus
  misc_feature (1)..(1103): n=a, c, g or t
  ref <308>: DATABASE ACCESSION NUMBER: EMBL / AF009603
  ref <309>: DATABASE ENTRY DATE: 1998-04-28
ggcgatgattgcaactttggtccggctcttggtgaggtaggagaagccatgagggagctctcggaggtcaaggactctttggacatggaagtgaagcagaacttcatcgacccccttcagaatcttcatgacaaagatctgagggagattcagcatcacctgaaaaagctggaaggccgacgcttagactttgattataagaagaagcgacaaggaaagattccagacgaagaactccgccaagctctggagaaatttgatgagtctaaagaaatcgctgagtcgagcatgttcaacctcttggagatggatattgaacaggtgagccagctctctgcacttgttcaggctcagctggagtaccacaaacaggctgtgcagatcctgcaacaggtcactgtcaggctggaagagagaataagacaagcttcatctcaaccaagaagggaatatcagcccaaaccacgaatgagcctagagtttgccactggagacggtacgcagcccaacgggggtctctcccacacaggcacacccaaacctgcaggtgtccaaatggatcagccttgctgccgagccctgtatgactttgaacctgaaaatgaaggggagttgggttttaaagagggtgatatcatcacgctcactaatcagattgatgagaactggtatgaggggatgcttcatggccagtccggctttttccccatcaactatgtagaaattctggttgctctgccccattagggtcctgtgctggctggctcacctccttctgacccanatagttaagtttaaccactgctttggtaatgccgcttccaatacatcacgaatgcaggccgcagtggatgattcatcaagcccacacgtgccctgggttggcctgtgtgctcctacaggagacacggtgatagatggtatcttccaaggccactgggcctggcacatgctttaaaacaccatctgagactagcccgtggtcacagaaactggctatgccgttctcaggaggctgtggttcctgatgacccacaccacagaaaacctctcctcactgaagatattgtctctcaccccaagggccatctcaagctccctgt

SEQ ID NO: 473 - protein, 248 aa, Rattus norvegicus
  ref <308>: DATABASE ACCESSION NUMBER: SWISS-Prot / O35179
  ref <309>: DATABASE ENTRY DATE: 2001-10-16
GDDCNFGPALGEVGEAMRELSEVKDSLDMEVKQNFIDPLQNLHDKDLREIQHHLKKLEGRRLDFDYKKKRQGKIPDEELRQALEKFDESKEIAESSMFNLLEMDIEQVSQLSALVQAQLEYHKQAVQILQQVTVRLEERIRQASSQPRREYQPKPRMSLEFATGDGTQPNGGLSHTGTPKPAGVQMDQPCCRALYDFEPENEGELGFKEGDIITLTNQIDENWYEGMLHGQSGFFPINYVEILVALPH

SEQ ID NO: 474 - DNA, 2540 bp, Homo sapiens
  ref <308>: DATABASE ACCESSION NUMBER: Refseq / NM_003026
  ref <309>: DATABASE ENTRY DATE: 2000-10-31
cgccgcctccctcccgcacagcagccgccagcgcggcctcctgcaccatgtcggtggccggcctcaagaagcagttccataaagccactcagaaagtgagtgagaaggttggaggagctgaaggaaccaagctagatgatgacttcaaagagatggaaaggaaagtggatgtcaccagcagggctgtgatggaaataatgactaaaacaattgaataccttcaacccaatccagcttccagagctaagctcagcatgatcaacaccatgtcaaaaatccgtggccaggagaaggggccaggctatcctcaggcagaggcgctgctggcagaggccatgctcaaatttggaagagagcttggagatgattgcaactttggcccagcacttggtgaggtcggggaggccatgcgggaactgtcggaggtcaaagactctttggacatagaagtgaagcagaacttcattgaccctcttcagaatcttcatgacaaagatcttagggaaattcaacatcatctaaagaagttggagggtcgacgcctggattttgattataagaagaaacgacaaggcaagattccggatgaagagcttcgtcaagctctagagaaatttgatgagtctaaggaaattgctgagtcaagcatgttcaatctcttggagatggatattgaacaagtgagccagctctctgcacttgtgcaagctcagctggagtaccacaagcaggcagtccagatcctgcagcaagtcacggtcagactggaagaaagaataagacaggcttcatctcagcctagaagggaatatcaacctaaaccacgaatgagcctggagtttccaactggagacagtactcagcccaatgggggtctctcccacacaggcactcccaaaccttcaggtgtccaaatggatcagccctgctgccgagctctgtacgactttgaacctgaaaatgaaggggagttgggatttaaagagggcgatatcatcacactcactaaccaaattgatgagaactggtatgaggggatgctgcatggccattcaggcttcttccccatcaattatgtggaaattctggttgccctgccccattaggatgttatgctggctggctcgcctcctcttgacccagatagttacggttaaccactgctttggcaatgctgcttataacacatcccaagtgcaggccgcagtggtccacgtcatccagccccaccaagtgactttggttgacttgtgggctcccacaggagtcatggtgatggatgatatcctcttagcctggtgggcgtggcatgtgctttttaaaacatcatctgagaccagccagtagtcacagaactgctgtttacacagttctcaggaggctgtggtttattagaatatgaccatgagccatttcacagaaaaaccatcccaccgaagatattgtctatcaccccaggggccatctgaaggtctctttgcatttctccatgcaaagaggagaaagcttttgctttcacactgtcccttcccaaatatgtgagtcatggaattgtcaaagtaagccttccctcaccagcaaattgtctcctgatctgaatgaatttgtctcttaatgcatccatagaaaagtgttaattgtgggttcaaagcattctctgcaaataggcatctcagctcctcacacttatggctatttctgacgtatagccagttttcttccctccttgctattaaagccagagtcgtaattccaaattatttttcagtaagacagttaatcagcattattgtgagagggactgaaaagaaattctccattatgaggaattgggaagaaatctggtatccaagcttaaatttcttgctatacagaactatgtatgtatttaggctattctgaagggcacagggaaggggaacaaatatcttcacttcagttttatttgtgaattacatgtttcatgaatccatttggcacagagacacaaggaagaaaacactagtaaccaactttccactagttcatatactgagaaacagtaaatacctttcctttccacttttaccctgtgttctttgaacatcatttgtgcagattctgccctcaatgaggaccaaataaagatgatttttgtgcttagcagtttaaggtatatggctggcatatgcaaaactctttcccaattcagtcgctacttttacttctgccctttctatccatcgtcttcattttgtgtgtacagtgctgtgtgtaagcttatcagtgtgtttttttatttgtatcagtcatgaaagtcctgttaggtatccagagttctatttatctagctgtacagactctttcagaggtttaacgtgctgcttccgatgtgccacctgcagtagtggatcatgtggagtgaaaggcaaatcttactgcttaatgtataaactctcaccacaggaagcatcgctgtttccaataaatattgctgaagacagaaaaaaaaaaaaaaaaaaaaaaaaaaaaaaaaaaaaaaaaaaaaaaaaaaaaaaaaa

SEQ ID NO: 475 - protein, 352 aa, Homo sapiens
  ref <308>: DATABASE ACCESSION NUMBER: SWISS-Prot / Q99962
  ref <309>: DATABASE ENTRY DATE: 2001-10-16
MSVAGLKKQFHKATQKVSEKVGGAEGTKLDDDFKEMERKVDVTSRAVMEIMTKTIEYLQPNPASRAKLSMINTMSKIRGQEKGPGYPQAEALLAEAMLKFGRELGDDCNFGPALGEVGEAMRELSEVKDSLDIEVKQNFIDPLQNLHDKDLREIQHHLKKLEGRRLDFDYKKKRQGKIPDEELRQALEKFDESKEIAESSMFNLLEMDIEQVSQLSALVQAQLEYHKQAVQILQQVTVRLEERIRQASSQPRREYQPKPRMSLEFPTGDSTQPNGGLSHTGTPKPSGVQMDQPCCRALYDFEPENEGELGFKEGDIITLTNQIDENWYEGMLHGHSGFFPINYVEILVALPH

SEQ ID NO: 476 - DNA, 2436 bp, Rattus norvegicus
  ref <308>: DATABASE ACCESSION NUMBER: EMBL / AF013144
  ref <309>: DATABASE ENTRY DATE: 1998-01-09
agctttccggggcagcgagtggcggggccgggtgctgagcgagcggggcgtggagagcgtcgcgcggcccctcgcgccgggctccgtttgcaggccacagcccccgcgaggtggcccgccggccctgggccgcccgtcctctggcagctgtggtgagcgcagcgtcgggccggcatgaaggtcacgtcgctcgacgggcgccggctgcgcaagatgctccgcaaggaggcggaggcgcgctgcgtggtgctcgattgccggccctacctggccttcgccgcgtcgagcgtgcgcggctcgctcaacgtcaacctcaactccgtggtgctgcggcgggcccggggcggcgcggtgtctgcgcgctacgtgctggccgacgaggcagcccgcgctcggctgctgcaggagggcggcggcggcgtggcggcggtggtcgtgctggaccagggcagccgccactggcagaagctgcgggaggagagtgccgcgcgcgtcgtcctcacctcgctgctggcctgtctgtccgccggaccgcgggtctacttccttaaaggtgggtacgagaccttctactcacagtatcctgagtgctgtgtggatgcgaagcccatttcacaagagaagctcgaaggtgaaagaggcctcctcagccagtgcggaaagcccattctcagcgtcgcctacagaccagcttatgaccagggtggcccagttgaaatccttcccttcctctaccttggaagtgcctaccatgcatccaagtgcgagttcctcgccaacctgcacatcacagccctgctgaatgtttcccgccggacctctgaggcctgcacaacccacctacactacaagtggatccctgtggaggacagccacaccgccgacattagctcccactttcaagaagcaatagattttattgactgtgtcagggaagagggaggcaaggtcctggttcactgtgaagccggggtctcccggtcgcccaccatctgcatggcttacctcatgaagaccaagcagttccgcctgaaggaggccttcgagtatatcaagcagaggaggagcgtggtctctcccaactttggcttcatgggacagctcctgcagtatgagtctgagatcctgccctccacacccaccccccaacctccctcctgccaaggggaggcagccagctccacctttataggccacttacagacactgagccctgatatgcagggtgcctactgcacattccctacctcagtgctggcaccggtgcccacccacgccaccgtcgcagagctccacaggagccccgtggccacagccacatcctgctgagaccggtcggctaccagcgcatccccaagagcaactgtgacctttggattttttaaacttgtggacatttcatacccgtgcaatactgaagacctctctctgtcccgctgccccggtgagatggtgaggggtcagcaggcttgcagatgcacttcaggctaacccggaggatggtttctcgcgattgtaggaaggccaagccatgcccccctagcacagcggcgtgctaactactgtacttccagaagccccgcccactcaggaccgcctcatccttgcacctcagaagtcccggcttctcatttcaagtgtaaggcaatacacagtcgcagcaaagtaggagcaagctgtgctggaccaggaggggaggagtccgcccgtctgggaggaagcacaagtttcactgttaatttgaatttcggccaactttgtctgtctctgtcctctgtcacttcagggaagagagctggtcaccgctcagtcagaaaagttaaccccgctggatttgtcaagacaaaaggacctgcccgtctgaacccagtgtttctgaggttctgtctaggatcccatggaagctgttggtgtaaggagaagctcctgactcattggagtttcttgctcaccgagggctccttggtgaccttggactttggcatggtttttacaaatacttgaacctgtcccattgtatctctccctaaagcacctctggtgtcattcagaaagttgtcagaccctagaccaaaaaccacccctttgagggggtagcaggaactgcctgcgttctgggtcagtggtggtgactgacatactttttcagtttagtgtcctgtgtgctttttttgtcatccattgtgacaatgtttccctccctaccctggggagtcgttttcaaactactgattctggggtctgcatcgtttgcaatgtggtactactatgtccttcgtagattgtttttccaaggggggaaaggcaataagtcacccccaaacccatgtgaatgtgaagaaaagcagtgttgatgttttttttatatatatatatatacatgtagtacaaaattaaaaaaatgtcaaaaaataaaaataaaaagtgctaagtgaa

SEQ ID NO: 477 - protein, 384 aa, Rattus norvegicus
  ref <308>: DATABASE ACCESSION NUMBER: SWISS-Prot / O54838
  ref <309>: DATABASE ENTRY DATE: 2002-06-15
MKVTSLDGRRLRKMLRKEAEARCVVLDCRPYLAFAASSVRGSLNVNLNSVVLRRARGGAVSARYVLADEAARARLLQEGGGGVAAVVVLDQGSRHWQKLREESAARVVLTSLLACLSAGPRVYFLKGGYETFYSQYPECCVDAKPISQEKLEGERGLLSQCGKPILSVAYRPAYDQGGPVEILPFLYLGSAYHASKCEFLANLHITALLNVSRRTSEACTTHLHYKWIPVEDSHTADISSHFQEAIDFIDCVREEGGKVLVHCEAGVSRSPTICMAYLMKTKQFRLKEAFEYIKQRRSVVSPNFGFMGQLLQYESEILPSTPTPQPPSCQGEAASSTFIGHLQTLSPDMQGAYCTFPTSVLAPVPTHATVAELHRSPVATATSC

SEQ ID NO: 478 - DNA, 2473 bp, Homo sapiens
  ref <308>: DATABASE ACCESSION NUMBER: Refseq / NM_004419
  ref <309>: DATABASE ENTRY DATE: 2001-02-07
aatcgcgaaacccggcgagcggcgcgctggctatcgagcgagcggggcggaaccgggagttgcgccgccgctcgggcgccgggctccgtcgcggccgcagccccgcgggtcgccctcccgtgcctcgcccgcggacaccctggccgtggacaccctggccgtgggcacccgcggggcgcggcgcgggcgctgcgcggcggcggcggcggcatgaaggtcacgtcgctcgacgggcgccagctgcgcaagatgctccgcaaggaggcggcggcgcgctgcgtggtgctcgactgccggccctatctggccttcgctgcctcgaacgtgcgcggctcgctcaacgtcaacctcaactcggtggtgctgcggcgggcccggggcggcgcggtgtcggcgcgctacgtgctgcccgacgaggcggcgcgcgcgcggctcctgcaggagggcggcggcggcgtcgcggccgtggtggtgctggaccagggcagccgccactggcagaagctgcgagaggagagcgccgcgcgtgtcgtcctcacctcgctactcgcttgcctacccgccggcccgcgggtctacttcctcaaagggggatatgagactttctactcggaatatcctgagtgttgcgtggatgtaaaacccatttcacaagagaagattgagagtgagagagccctcatcagccagtgtggaaaaccagtggtaaatgtcagctacaggccagcttatgaccagggtggcccagttgaaatccttcccttcctctaccttggaagtgcctaccatgcatccaagtgcgagttcctcgccaacttgcacatcacagccctgctgaatgtctcccgacggacctccgaggcctgcatgacccacctacactacaaatggatccctgtggaagacagccacacggctgacattagctcccactttcaagaagcaatagacttcattgactgtgtcagggaaaagggaggcaaggtcctggtccactgtgaggctgggatctcccgttcacccaccatctgcatggcttaccttatgaagaccaagcagttccgcctgaaggaggccttcgattacatcaagcagaggaggagcatggtctcgcccaactttggcttcatgggccagctcctgcagtacgaatctgagatcctgccctccacgcccaacccccagcctccctcctgccaaggggaggcagcaggctcttcactgataggccatttgcagacactgagccctgacatgcagggtgcctactgcacattccctgcctcggtgctggcaccggtgcctacccactcaacagtctcagagctcagcagaagccctgtggcaacggccacatcctgctaaaactgggatggaggaatcggcccagccccaagagcaactgtgatttttgtttttaagactcatggacatttcatacctgtgcaatactgaagacctcattctgtcatgctgccccagtgagatagtgagtggtcaccaggcttgcaaatgaacttcagacggacctcagggtaggttctcgggactgaaggaaggccaagccattacgggagcacagcatgtgctgactactgtacttccagacccctgccctcttgggactgcccagtccttgcacctcagagttcgccttttcatttcaagcataagccaataaatacctgcagcaacgtgggagaaagaagttgctggaccaggagaaaaggcagttatgaagccaattcattttgaaggaagcacaatttccaccttattttttgaactttggcagtttcaatgtctgtctctgttgcttcggggcataagctgatcaccgtctagttgggaaagtcaccctacagggtttgtagggacatgatcagcatcctgatttgaaccctgaaatgttgtgtagacaccctcttgggtccaatgaggtagttggttgaagtagcaagatgttggcttttctggattttttttgccatgggttcttcactgaccttggactttggcatgattcttagtcatacttgaacttgtctcattccacctcttctcagagcaactcttcctttgggaaaagagttcttcagatcatagaccaaaaaagtcataccttcgaggtggtagcagtagattccaggaggagaagggtacttgctaggtatcctgggtcagtggcggtgcaaactggtttcctcagctgcctgtccttctgtgtgcttatgtctcttgtgacaattgttttcctccctgcccctggaggttgtcttcaactgtggacttctgggatttgcagattttgcaacgtggtactacttttttttctttttgtctgttagttatttctccaggggaaaaggcaataattttctaagacccgtgtgaatgtgaagaaaagcagtatgttactggttgttgttgttgttcttgttttttatatgtaaaataaaaatagtgaaaggag

SEQ ID NO: 479 - protein, 384 aa, Homo sapiens
  ref <308>: DATABASE ACCESSION NUMBER: SWISS-Prot / Q16690
  ref <309>: DATABASE ENTRY DATE: 2002-06-15
MKVTSLDGRQLRKMLRKEAAARCVVLDCRPYLAFAASNVRGSLNVNLNSVVLRRARGGAVSARYVLPDEAARARLLQEGGGGVAAVVVLDQGSRHWQKLREESAARVVLTSLLACLPAGPRVYFLKGGYETFYSEYPECCVDVKPISQEKIESERALISQCGKPVVNVSYRPAYDQGGPVEILPFLYLGSAYHASKCEFLANLHITALLNVSRRTSEACMTHLHYKWIPVEDSHTADISSHFQEAIDFIDCVREKGGKVLVHCEAGISRSPTICMAYLMKTKQFRLKEAFDYIKQRRSMVSPNFGFMGQLLQYESEILPSTPNPQPPSCQGEAAGSSLIGHLQTLSPDMQGAYCTFPASVLAPVPTHSTVSELSRSPVATATSC

SEQ ID NO: 480 - DNA, 2436 bp, Rattus norvegicus; identical to SEQ ID NO: 476
  ref <308>: DATABASE ACCESSION NUMBER: EMBL / AF013144
  ref <309>: DATABASE ENTRY DATE: 1998-01-09

SEQ ID NO: 481 - protein, 384 aa, Rattus norvegicus; identical to SEQ ID NO: 477
  ref <308>: DATABASE ACCESSION NUMBER: SWISS-Prot / O54838
  ref <309>: DATABASE ENTRY DATE: 2002-06-15

SEQ ID NO: 482 - DNA, 2473 bp, Homo sapiens; identical to SEQ ID NO: 478
  ref <308>: DATABASE ACCESSION NUMBER: Refseq / NM_004419
  ref <309>: DATABASE ENTRY DATE: 2001-02-07

SEQ ID NO: 483 - protein, 384 aa, Homo sapiens; identical to SEQ ID NO: 479
  ref <308>: DATABASE ACCESSION NUMBER: SWISS-Prot / Q16690
  ref <309>: DATABASE ENTRY DATE: 2002-06-15

SEQ ID NO: 484 - DNA, 856 bp, Rattus norvegicus
  ref <308>: DATABASE ACCESSION NUMBER: EMBL / AF014009
  ref <309>: DATABASE ENTRY DATE: 2000-03-03
ccagcgtcaccactgccgccatgcccggagggctgcttctcggggacgaagcccccaactttgaggccaataccaccatcggccacatccgcttccacgatttcctaggagattcatggggcattctcttttcccacccacgggactttaccccagtgtgcaccacagaacttggcagagctgcaaagctggcgccagagtttgccaagaggaatgttaagttgattgctctttcaatagactctgttgaggaccattttgcctggagcaaggacatcaatgcttacaatggtgcagcacccacagaaaagctaccatttcccatcatcgacgataaggacagggaccttgccatcctgttgggcatgttggatccagcagagaaggatgaaaaaggcatgcccgtgacagcccgtgtggtattcatttttggccctgacaagaaactaaaactgtccatcctctacccagccaccacgggcagaaactttgatgagattctcagagtggttgactccctccagctgacagcatcaaatccagttgccactccagttgactggaagaagggagagagtgtgatggtccttcccaccctccctgaagaggaagccaaacaacttttccctaaaggagtcttcaccaaagagctcccatctggcaagaaatacctccgttatacgccccagccttaagtctgcgggaactggggctgcaactgctcgcccagcactgggacctgaggatgacagctgacagctgcagttccgtagaaagattgtggcgtggtcacagccgaagtcgcgtaggtcgctcgctatactactggctcattaaatggaaatggcaccaaaac

SEQ ID NO: 485 - protein, 223 aa, Rattus norvegicus
  ref <308>: DATABASE ACCESSION NUMBER: SWISS-Prot / O35244
  ref <309>: DATABASE ENTRY DATE: 2002-06-15
PGGLLLGDEAPNFEANTTIGHIRFHDFLGDSWGILFSHPRDFTPVCTTELGRAAKLAPEFAKRNVKLIALSIDSVEDHFAWSKDINAYNGAAPTEKLPFPIIDDKDRDLAILLGMLDPAEKDEKGMPVTARVVFIFGPDKKLKLSILYPATTGRNFDEILRVVDSLQLTASNPVATPVDWKKGESVMVLPTLPEEEAKQLFPKGVFTKELPSGKKYLRYTPQP

SEQ ID NO: 486 - DNA, 1653 bp, Homo sapiens
  ref <308>: DATABASE ACCESSION NUMBER: EMBL / D14662
  ref <309>: DATABASE ENTRY DATE: 2002-05-29
cggttgcttgctgtcccagcggcgccccctcatcaccgtcgccatgcccggaggtctgcttctcggggacgtggctcccaactttgaggccaataccaccgtcggccgcatccgtttccacgactttctgggagactcatggggcattctcttctcccaccctcgggactttaccccagtgtgcaccacagagcttggcagagctgcaaagctggcaccagaatttgccaagaggaatgttaagttgattgccctttcaatagacagtgttgaggaccatcttgcctggagcaaggatatcaatgcttacaattgtgaagagcccacagaaaagttaccttttcccatcatcgatgataggaatcgggagcttgccatcctgttgggcatgctggatccagcagagaaggatgaaaagggcatgcctgtgacagctcgtgtggtgtttgtttttggtcctgataagaagctgaagctgtctatcctctacccagctaccactggcaggaactttgatgagattctcagggtagtcatctctctccagctgacagcagaaaaaagggttgccaccccagttgattggaaggatggggatagtgtgatggtccttccaaccatccctgaagaagaagccaaaaaacttttcccgaaaggagtcttcaccaaagagctcccatctggcaagaaatacctccgctacacaccccagccttaagtctcttggagaagttggtgctgtgagccagaggatgtcagctgccaattgtgttttcctgcagcaattccataaacacatcctggtgtcatcacagccaaggtttttaggttgctataccaatggcttattaaatgaaaatggcactaaaagtttcttgagattctttatactctctgccttcagcaatcaattccattcatacatcagcactctgctggttctgtttgaaatatgttctgtatttaaaactcaaatcttgttggatctctgcagggcttgtgaccaatgaagtcatatttgttgatggttgacaaagcttgcttcactccatcagagaatgactatcaatttttttttaactgtcctatcacgtcctctcctgtcacccattttgaagagtggcagaacttgaagttcaacttcctctgtaaatatccaagtataaagcccaggaacttctagaataacccagatgcgctttaattttttttaatatgttttgatcacagaacttctagaataacccagatgctctttcatattcttttaatacatcttgatcacagctgggggaaaaaaagctttttaattctgtaccttcctagtagataagtgaagagcagggaaagagacctttaaatattttgctataaaaaaatttgtgataagtttctatcaaaatggggagattgcagaaaaggcttcccttggctcccaaggaggtgtagcaggtgtgagcaatattagtgccatgtgcctttcacacagggtttgcatttatcagtctgttttccgatgatgtgtacatgaaagagtacaccatgtgaagagaagagagaatgattgaaaatgttttagtatagaactcttcttgcagtgggttgctattttctagattttactttttagggaacaaaataaaatcctttgtt

SEQ ID NO: 487 - protein, 223 aa, Homo sapiens
  ref <308>: DATABASE ACCESSION NUMBER: SWISS-Prot / P30041
  ref <309>: DATABASE ENTRY DATE: 2002-06-15
PGGLLLGDVAPNFEANTTVGRIRFHDFLGDSWGILFSHPRDFTPVCTTELGRAAKLAPEFAKRNVKLIALSIDSVEDHLAWSKDINAYNCEEPTEKLPFPIIDDRNRELAILLGMLDPAEKDEKGMPVTARVVFVFGPDKKLKLSILYPATTGRNFDEILRVVISLQLTAEKRVATPVDWKDGDSVMVLPTIPEEEAKKLFPKGVFTKELPSGKKYLRYTPQP

SEQ ID NO: 488 - DNA, 602 bp, Rattus norvegicus
  ref <308>: DATABASE ACCESSION NUMBER: EMBL / AF014503
  ref <309>: DATABASE ENTRY DATE: 1998-01-08
gagggcagacatttggaaaacaggcaagactttggagaaagcagaccaggtatgatggccaccttgccaccaacagcccacacttcccagcaacctgtaaacatagaggacgaagatgggatcctggatgagtatgaccagtacagcctggcccaatcttatgtcgtcggtggaggtcggaaaggacgtaccaagagagaagctgctgccaacaccaaccgccccagccctggtgggcatgagaggaagctgctgaccaagttccagaactctgaaaggaaaaaggcctggcgctgagacagagctggagatgaggccagaccacggacaccacacccagcaatggatacaggaccttggagaaattaggagttgtaagcaggacctaggcctgcttgattctttcccacctaagtgaggctctggagagggaacaccaaaaaaagcccttccggacccagctaaagggcaagttaggagcgagaagcagagggtagatgggcagagctaagaaggcacccccaaaaagaacagtgggaaaaactggatgcccttgggtggcagtaacaataaactgtacaacagtgacagcaaaaaaaaaa

SEQ ID NO: 489 - protein, 80 aa, Rattus norvegicus
  ref <308>: DATABASE ACCESSION NUMBER: SWISS-Prot / O54842
  ref <309>: DATABASE ENTRY DATE: 2002-06-15
MATLPPTAHTSQQPVNIEDEDGILDEYDQYSLAQSYVVGGGRKGRTKREAAANTNRPSPGGHERKLLTKFQNSERKKAWR

SEQ ID NO: 490 - DNA, 719 bp, Homo sapiens
  ref <308>: DATABASE ACCESSION NUMBER: Refseq / NM_012385
  ref <309>: DATABASE ENTRY DATE: 2000-11-02
cagccttataagctgagggagtggagaggcccggggccaggaaagcagagacagacaaagcgttaggagaagaagagaggcagggaagacaagccaggcacgatggccaccttcccaccagcaaccagcgccccccagcagcccccaggcccggaggacgaggactccagcctggatgaatctgacctctatagcctggcccattcctacctcggaggtggaggccggaaaggtcgcaccaagagagaagctgctgccaacaccaaccgccccagccctggcgggcacgagaggaaactggtgaccaagctgcagaattcagagaggaagaagcgaggggcacggcgctgagacagagctggagatgaggccagaccatggacactacacccagcaatagagacgggactgcggaggaaggaggacccaggacaggatccaggccggcttgccacaccccccacccctaggacttattcccgctgactgagtctctgaggggctaccaggaaagcgcctccaaccctagcaaaagtgcaagatggggagtgagaggctgggaatggaggggcagagccaggaagatcccccagaaaagaaagctacagaagaaactggggctcctccagggtggcagcaacaataaatagacacgcacggcagccacagcttgggtgtgtgttcatccttgttaaaaaaaaaaaaaaaaaaaaaaaaaa

SEQ ID NO: 491 - protein, 82 aa, Homo sapiens
  ref <308>: DATABASE ACCESSION NUMBER: SWISS-Prot / O60356
  ref <309>: DATABASE ENTRY DATE: 2002-06-15
MATFPPATSAPQQPPGPEDEDSSLDESDLYSLAHSYLGGGGRKGRTKREAAANTNRPSPGGHERKLVTKLQNSERKKRGARR

SEQ ID NO: 492 - DNA, 1766 bp, Rattus norvegicus
  ref <308>: DATABASE ACCESSION NUMBER: EMBL / AF015304
  ref <309>: DATABASE ENTRY DATE: 1997-12-04
caccatgacaaccagtcaccagcctcaggacaggtataaggctgtctggctcatcttctttgtcctgggtctggggacactgctcccctggaatttttttataacagcaacccagtatttcacaagccgcctgaacacgtcccagaatatatccttggtcaccaaccaatcatgcgaaagcaccgaggccttggctgacccctcagtgtccttgccagcccggagttctctcagtgccatcttcaacaatgtcatgaccctgtgtgccatgttgcccttgctgatcttcacctgcctcaactctttcctgcatcagaaggtgtctcagtcccttcggatcttgggcagcctgctggctatcctgttggtgttcctcgtcactgccaccctggtgaaggtgcagatggatgccctgtccttcttcatcatcaccatgatcaagattgtgctcattaactcatttggtgccattttgcaagccagccttttcggtctggcaggcgtcctgccggccaactacacagcccccatcatgagtggccagggcctggctggcttcttcacctctgttgccatgatctgtgccgtcgccagtggctctaagctgtcagaaagtgcttttggttacttcatcacggcctgtgcagttgtcattctggccatactgtgttacctggccctgccttggatggaattctaccgacattacctgcagctcaaccttgcggggcctgcagagcaggagaccaagttggatctcatcagtgaaggagaggagccaagaggaggaagagaggaatctggggtgccaggccccaactctctacccgccaacagaaaccaatccatcaaagccatactgaagagtatctgggtcctggctctgtctgtctgtttcatcttcacagtcaccattgggttgttccctgctgtgactgctgaggtggaatccagcatcgcaggcacaagtccctggaaaaactgctacttcatccctgtggcctgcttcctgaatttcaatgtctttgactggctaggccggagcctcacagctatttgcatgtggcctggtcaggacagccgctggttgccggtcctggtcgcctgcagggttgtgtttatccccctgctgatgctctgcaatgtgaagcagcaccactacctgccctccctctttaagcatgatgtctggttcatcaccttcatggccgcctttgccttctccaatggctacctcgccagcctctgcatgtgcttcgggcccaagaaagtcaaaccggctgaggcagagactgccggaaacatcatgtccttctttctgtgtctgggcctggctctgggagctgtgttgtccttcttgttaagggcacttgtgtgagcgaccctgtgtggacagaggaactacactgcctgcttcctgctcacttccttcgctgttagggacgagcaggggtccagagggctgctcttctgctttcctccggtgctgggcccagatgtccaggaacaaaggagggagcctctgaggatggacttgggattgggggtcagagtggtagggggacaatggtctctgacggacagctctgactgatccctgcctaagccaagcacaagagactccacaaggatggggtggagacagatggctgactgtgtatcatgatctgatgtcccttgcccttctttcttctgtgcctgttccaggtccccgatccttgtcattttactgccttttttatactgacagaaaccaggtgccttca

SEQ ID NO: 493 - protein, 456 aa, Rattus norvegicus
  ref <308>: DATABASE ACCESSION NUMBER: SWISS-Prot / O54698
  ref <309>: DATABASE ENTRY DATE: 2001-10-16
TTSHQPQDRYKAVWLIFFVLGLGTLLPWNFFITATQYFTSRLNTSQNISLVTNQSCESTEALADPSVSLPARSSLSAIFNNVMTLCAMLPLLIFTCLNSFLHQKVSQSLRILGSLLAILLVFLVTATLVKVQMDALSFFIITMIKIVLINSFGAILQASLFGLAGVLPANYTAPIMSGQGLAGFFTSVAMICAVASGSKLSESAFGYFITACAVVILAILCYLALPWMEFYRHYLQLNLAGPAEQETKLDLISEGEEPRGGREESGVPGPNSLPANRNQSIKAILKSIWVLALSVCFIFTVTIGLFPAVTAEVESSIAGTSPWKNCYFIPVACFLNFNVFDWLGRSLTAICMWPGQDSRWLPVLVACRVVFIPLLMLCNVKQHHYLPSLFKHDVWFITFMAAFAFSNGYLASLCMCFGPKKVKPAEAETAGNIMSFFLCLGLALGAVLSFLLRALV

SEQ ID NO: 494 - DNA, 2162 bp, Homo sapiens
  ref <308>: DATABASE ACCESSION NUMBER: EMBL / U81375
  ref <309>: DATABASE ENTRY DATE: 1999-07-01
gggctgcgctgtccagctgtggctatggccccagccccgagatgaggagggagagaactaggggcccgcaggcctgggaatttccgtcccccaccaagtccggatgctcactccaaagtctcagcaggcccctgagggagggagctgtcagccagggaaaaccgagaacaccatcaccatgacaaccagtcaccagcctcaggacagatacaaagctgtctggcttatcttcttcatgctgggtctgggaacgctgctcccgtggaattttttcatgacggccactcagtatttcacaaaccgcctggacatgtcccagaatgtgtccttggtcactgctgaactgagcaaggacgcccaggcgtcagccgcccctgcagcacccttgcctgagcggaactctctcagtgccatcttcaacaatgtcatgaccctatgtgccatgctgcccctgctgttattcacctacctcaactccttcctgcatcagaggatcccccagtccgtacggatcctgggcagcctggtggccatcctgctggtgtttctgatcactgccatcctggtgaaggtgcagctggatgctctgcccttctttgtcatcaccatgatcaagatcgtgctcattaattcatttggtgccatcctgcagggcagcctgtttggtctggctggccttctgcctgccagctacacggcccccatcatgagtggccagggcctagcaggcttctttgcctccgtggccatgatctgcgctattgccagtggctcggaactatcagaaagtgccttcggctactttatcacagcctgtgctgttatcattttgaccatcatctgttacctgggcctgccccgcctggaattctaccgctactaccagcagctcaagcttgaaggacccggggagcaggagaccaagttggacctcattagcaaaggagaggagccaagagcaggcaaagaggaatctggagtttcagtctccaactctcagcccaccaatgaaagccactctatcaaagccatcctgaaaaatatctcagtcctggctttctctgtctgcttcatcttcactatcaccattgggatgtttccagccgtgactgttgaggtcaagtccagcatcgcaggcagcagcacctgggaacgttacttcattcctgtgtcctgtttcttgactttcaatatctttgactggttgggccggagcctcacagctgtattcatgtggcctgggaaggacagccgctggctgccaagcctggtgctggcccggctggtgtttgtgccactgctgctgctgtgcaacattaagccccgccgctacctgactgtggtcttcgagcacgatgcctggttcatcttcttcatggctgcctttgccttctccaacggctacctcgccagcctctgcatgtgcttcgggcccaagaaagtgaagccagctgaggcagagaccgcaggagccatcatggccttcttcctgtgtctgggtctggcactgggggctgttttctccttcctgttccgggcaattgtgtgacaaaggatggacagaaggactgcctgcctccctccctgtctgcctcctgccccttccttctgccaggggtgatcctgagtggtctggcggttttttcttctaactgacttctgctttccacggcgtgtgctgggcccggatctccaggccctggggagggagcctctggacggacagtggggacattgtgggtttggggctcagagtcgagggacggggtgtagcctcggcatttgcttgagtttctccactcttggctctgactgatccctgcttgtgcaggccagtggaggctcttgggcttggagaacacgtgtgtctctgtgtatgtgtctgtgtgtctgcgtccgtgtctgtcagactgtctgcctgtcctggggtggctaggagctgggtctgaccgttgtatggtttgacctgatatactccattctcccctgcgcctcctcctctgtgttttttccatgtccccctcccaactccccatgcccagtttttacccatcatgcaccctgtacagttgccacgttactgccttttttaaaaatatatttgacagaaaccaggtgccttcagaggctctctgatttaaataaacctttcttgttttttt

SEQ ID NO: 495 - protein, 455 aa, Homo sapiens
  ref <308>: DATABASE ACCESSION NUMBER: SWISS-Prot / Q99808
  ref <309>: DATABASE ENTRY DATE: 2001-10-16
TTSHQPQDRYKAVWLIFFMLGLGTLLPWNFFMTATQYFTNRLDMSQNVSLVTAELSKDAQASAAPAAPLPERNSLSAIFNNVMTLCAMLPLLLFTYLNSFLHQRIPQSVRILGSLVAILLVFLITAILVKVQLDALPFFVITMIKIVLINSFGAILQGSLFGLAGLLPASYTAPIMSGQGLAGFFASVAMICAIASGSELSESAFGYFITACAVIILTIICYLGLPRLEFYRYYQQLKLEGPGEQETKLDLISKGEEPRAGKEESGVSVSNSQPTNESHSIKAILKNISVLAFSVCFIFTITIGMFPAVTVEVKSSIAGSSTWERYFIPVSCFLTFNIFDWLGRSLTAVFMWPGKDSRWLPSLVLARLVFVPLLLLCNIKPRRYLTVVFEHDAWFIFFMAAFAFSNGYLASLCMCFGPKKVKPAEAETAGAIMAFFLCLGLALGAVFSFLFRAIV

SEQ ID NO: 496 - DNA, 1678 bp, Rattus norvegicus
  ref <308>: DATABASE ACCESSION NUMBER: EMBL / AF015305
  ref <309>: DATABASE ENTRY DATE: 1997-12-04
ttacccaacctgcaccctctcactggctacagcactccctccgaccttgggattcccagacaccggccagcgttgctgcccttcggcttcctagccctgcgtaggcgcaggtgcaacctccctgcagtgggcctggtgcaataggactgcggacatcatggcgcacggaaacgcccctcgggacagctaccacctggtcgggatcagcttcttcattttgggtctgggcaccctcctcccctggaacttcttcattaccgccatcccgtacttccaggggcggttggcagggaccaacagcagcgctgagaccccgagcaccaaccacaccagtcccacagacaccttcaacttcaacaactgggtgacactgctgtcccagctgcctctactgctcttcacgctcctcaactccttcttgtatcagtgcatccctgagtcggtgcgtattctgggcagcctgctggccatactactgctctttgccctgacagcagcgctggtgaaggtggatttgagccccgggctgttcttttccatcaccatggcatccgtctggttcatcaattccttctgtgcagtgcttcaaggcagcctctttgggcagctgggtaccatgccttctacctacagcaccctcttcctcagtggccagggcctggctgggatcttcgctgcccttgctatgctcacgtccttagccagtggcgtggacccccagacctctgcccttgggtacttcatcacaccctgtgtgggcatcctcctctccatcatatgttacctcagtctgccccatctgaagtttgcccgttactacctgaccaagaagcctcaggccccagttcaggagctggagaccaaagctgagctcctcggagctgatgagaagaatgggattcctgtcagcccccagcaggcaggcccaactctggatcttgacccagagaaggagctggagctggggctggaggaaccacagaagccaggaaaaccttcggtctttgtcgtcttccggaagatctggctgacggcgctgtgccttgtgttggtcttcacagtcaccctgtcggtctttcctgctatcacagccatggtgaccaccagctccaatagccccgggaagtggagtcagttcttcaaccctatctgttgcttcctgctcttcaacgtcatggattggctgggccggagcctgacttcctacttcctgtggccagatgaggacagccagctgctgcccctgctggtgtgcctgcgcttcctgttcgtgcccctcttcatgctgtgtcatgtgccccagcgtgcccggctgcccatcatcttctggcaggatgcctacttcatcacattcatgctgctcttcgccatttccaacggctacttcgtgtctctcaccatgtgtctggcacccaggcaggtgctgccgcatgagagggaggtggccggagccctcatgaccttcttcctggccctgggactctcctgcggagcctctctctccttcctctttaaggctttactctgaggaccaccgcactccacagtcctccctcactgctgcttctggagctggacattcccggggaaggacctctgctataccgggtctcttggtctgtgggtgccaggagggggcagaaactaccttggctggtagccacattgcatatggtga

SEQ ID NO: 497 - protein, 456 aa, Rattus norvegicus
  ref <308>: DATABASE ACCESSION NUMBER: SWISS-Prot / O54699
  ref <309>: DATABASE ENTRY DATE: 2001-10-16
MAHGNAPRDSYHLVGISFFILGLGTLLPWNFFITAIPYFQGRLAGTNSSAETPSTNHTSPTDTFNFNNWVTLLSQLPLLLFTLLNSFLYQCIPESVRILGSLLAILLLFALTAALVKVDLSPGLFFSITMASVWFINSFCAVLQGSLFGQLGTMPSTYSTLFLSGQGLAGIFAALAMLTSLASGVDPQTSALGYFITPCVGILLSIICYLSLPHLKFARYYLTKKPQAPVQELETKAELLGADEKNGIPVSPQQAGPTLDLDPEKELELGLEEPQKPGKPSVFVVFRKIWLTALCLVLVFTVTLSVFPAITAMVTTSSNSPGKWSQFFNPICCFLLFNVMDWLGRSLTSYFLWPDEDSQLLPLLVCLRFLFVPLFMLCHVPQRARLPIIFWQDAYFITFMLLFAISNGYFVSLTMCLAPRQVLPHEREVAGALMTFFLALGLSCGASLSFLFKALL

SEQ ID NO: 498 - DNA, 2522 bp, Homo sapiens
  ref <308>: DATABASE ACCESSION NUMBER: EMBL / AF034102
  ref <309>: DATABASE ENTRY DATE: 2000-10-27
ggatccgcggtggcgcgaccctctgtccccgcctcggggcggagcccaggtcccagcctgcggagcgcgagacacgccgaaatccgcccgaggctacctgtgcgactccagccgccctgcaccggaatctggggagacccgccccccgccccaccggtctgcggccctccgccccagcgcaggtgcaggtgcggcttctctgcccctttcaccccaggcgcatccgccgcggcggccatggcgcgaggagacgccccgcgggacagctaccacctggtcgggatcagcttcttcatcctggggctgggcaccctccttccctggaacttcttcatcaccgccatcccgtacttccaggcgcgactggccggggccggcaacagcacagccaggatcctgagcaccaaccacacgggtcccgaggatgccttcaacttcaacaattgggtgacgctgctgtcccagctgcccctgctgctcttcaccctcctcaactccttcctgtaccagtgcgtcccggagacggtgcgcattctgggcagcctgctggccatactgctgctctttgccctgacagcagcgctggtcaaggtggacatgagccccggacccttcttctccatcaccatggcctccgtctgcttcatcaactccttcagtgcagtcctacagggcagcctcttcgggcagctgggcaccatgccctccacctacagcaccctcttcctcagcggccagggcctggctgggatctttgctgcccttgccatgctcctgtccatggccagtggcgtggacgccgagacctctgccctggggtactttatcacgccctgtgtgggcatcctcatgtccatcgtgtgttacctgagcctgcctcacctgaagtttgcccgctactacctggccaataaatcatcccaggcccaagctcaggagctggagaccaaagctgagctcctccagtctgatgagaacgggattcccagtagtccccagaaagtagctctgaccctggatcttgacctggagaaggagccggaatcagagccagatgagccccagaagccaggaaaaccttcagtcttcactgtcttccagaagatctggctgacagcgctgtgccttgtgttggtcttcacagtcaccctgtccgtcttccccgccatcacagccatggtgaccagctccaccagtcctgggaagtggagtcagttcttcaaccccatctgctgcttcctcctcttcaacatcatggactggctgggacggagcctgacctcttacttcctgtggccagacgaggacagccggctgctgcccctgctggtctgcctgcggttcctgttcgtgcccctcttcatgctgtgccacgtgccccagaggtcccggctgcccatcctcttcccacaggatgcctacttcatcaccttcatgctgctctttgccgtttctaatggctacctggtgtccctcaccatgtgcctggcgcccaggcaggtgctgccacacgagagggaggtggccggcgccctcatgaccttcttcctggccctgggactttcctgtggagcctccctctccttcctcttcaaggcgctgctctgaagtggcccctccaggctctttggcagcctcttctcgacgtctccttccggagctgagatccagcccagggcgaatggcgagcttggctcaggcctctgcggggtggaggcccctgggcctgaggctgccagcagcgggcaggagctgctcttcatccacttggagtgctgcggggaagaaatcaccaccggtcattctaaccctcacccaggaatgggggtgactcgcacaagacctcatggaaagggtgatgactagggaaaagagggtgcagggcacggctgctccccaccaccaggtctgcatttgttcatcatcatcaggagcagaggtgaccagagggttcagagtgggaggcagggccagcccaggccaggagcgcctcatcttcccaggcctcagccacccagggtaaaaggtgccagggaagttgtgggcacctgagaggaggaacagatgtggaggacctgagggtgctcaaagggccaggctcagcctcaagcagtgttttcattgccaacacttactgtacccactccgcagagccccgctgggcctgggccccagggccacagctagcctgcatgtgtgtactgcactttacagtttgcaaagctcttccatacccactctctcaccgaagcctaattgaggctcttggaaggagtcaggcaaggattgtgcttcccccattatacaggtgacaaaactgagtcctggggaaagtgactggtccgtggtagagccgggacccaatcccctctctctcctccctgttggtgctgttcttcctgcccaacacctgtttctcttttcctcaaggggtttggggcaggagcctgggcacttactccccgtttttgctgtttctccttctgaccctgctcttgggtctaataaccccatttatttgt

SEQ ID NO: 499 - protein, 456 aa, Homo sapiens
  ref <308>: DATABASE ACCESSION NUMBER: SWISS-Prot / Q14542
  ref <309>: DATABASE ENTRY DATE: 2002-06-15
MARGDAPRDSYHLVGISFFILGLGTLLPWNFFITAIPYFQARLAGAGNSTARILSTNHTGPEDAFNFNNWVTLLSQLPLLLFTLLNSFLYQCVPETVRILGSLLAILLLFALTAALVKVDMSPGPFFSITMASVCFINSFSAVLQGSLFGQLGTMPSTYSTLFLSGQGLAGIFAALAMLLSMASGVDAETSALGYFITPYVGILMSIVCYLSLPHLKFARYYLANKSSQAQAQELETKAELLQSDENGIPSSPQKVALTLDLDLEKEPESEPDEPQKPGKPSVFTVFQKIWLTALCLVLVFTVTLSVFPAITAMVTSSTSPGKWSQFFNPICCFLLFNIMDWLGRSLTSYFLWPDEDSRLLPLLVCLRFLFVPLFMLCHVPQRSRLPILFPQDAYFITFMLLFAVSNGYLVSLTMCLAPRQVLPHEREVAGALMTFFLALGLSCGASLSFLFKALL

SEQ ID NO: 500 - DNA, 489 bp, Rattus norvegicus
  ref <308>: DATABASE ACCESSION NUMBER: EMBL / AF015719
  ref <309>: DATABASE ENTRY DATE: 1998-01-08
atgaaaattttgaaaccatatatgaggaatacatccatcttgtactacctgtgtttccttctcaacagtcacttcttaactgaggctggcatccatgtcttcattttgggctgtgtcagtgtaggtctccctaaaacagaggccaactggatagatgtaagatacgatctggagaaaattgaaagtcttattcaatttattcatattgatactactctatacactgacagtgactttcatcccagttgcaaagttactgcaatgaactgctttctcctggaattacaggttattttgcacgagtacagtaacatgactcttaatgaaacagtaagaaacgtgctctaccttgcaaacagcactctgtcttctaacaagaatgtaatagagtctggctgcaaggaatgtgaggagctggaggagagaaacttcacggagtttttgcagagttttatacatattgtccaaatgttcatcaacacgtcctga

SEQ ID NO: 501 - protein, 162 aa, Rattus norvegicus
  ref <308>: DATABASE ACCESSION NUMBER: SWISS-Prot / P97604
  ref <309>: DATABASE ENTRY DATE: 1999-07-15
MKILKPYMRNTSILYYLCFLLNSHFLTEAGIHVFILGCVSVGLPKTEANWIDVRYDLEKIESLIQFIHIDTTLYTDSDFHPSCKVTAMNCFLLELQVILHEYSNMTLNETVRNVLYLANSTLSSNKNVIESGCKECEELEERNFTEFLQSFIHIVQMFINTS

SEQ ID NO: 502 - DNA, 486 bp, Homo sapiens
  ref <308>: DATABASE ACCESSION NUMBER: EMBL / Y09908
  ref <309>: DATABASE ENTRY DATE: 1997-05-30
cggattgggatcggacctacttgattcacttctgggaaatcaaggatctacgtaccatggattttcaggtgcagattttcagcttcctgctaatcagtgcctcagtcataatgtctagagccaactgggtgaatgtaataagtgatttgaaaaaaattgaagatcttattcaatctatgcatattgatgctactttatatacggaaagtgatgttcaccccagttgcaaagtaacagcaatgaagtgctttctcttggagttacaagttatttcacttgagtccggagatgcaagtattcatgatacagtagaaaatctgatcatcctagcaaacaacagtttgtcttctaatgggaatgtaacagaatctggatgcaaagaatgtgaggaactggaggaaaaaaatattaaagaatttttgcagagttttgtacatattgtccaaatgttcatcaacacttcttgattgcaattgattcctcgag

SEQ ID NO: 503 - protein, 162 aa, Homo sapiens
  ref <308>: DATABASE ACCESSION NUMBER: SWISS-Prot / P40933
  ref <309>: DATABASE ENTRY DATE: 2002-06-15
MRISKPHLRSISIQCYLCLLLNSHFLTEAGIHVFILGCFSAGLPKTEANWVNVISDLKKIEDLIQSMHIDATLYTESDVHPSCKVTAMKCFLLELQVISLESGDASIHDTVENLIILANNSLSSNGNVTESGCKECEELEEKNIKEFLQSFVHIVQMFINTS

SEQ ID NO: 504 - DNA, 865 bp, Rattus norvegicus
  ref <308>: DATABASE ACCESSION NUMBER: EMBL / AF016047
  ref <309>: DATABASE ENTRY DATE: 1999-08-30
ggagggaggggcgctaaattgtctctggtccctgtcggcttttcaggagctgcggtgctgaggatgagcggggaaggggagaacccggccagcaagcccacgcctgtgcaggacgtgcagggcgacggacgctggatgtctctgcaccatcgatttgtggcagacagcaaagacaaggaacccgaagtcgtctttatcggggactccttggttcagctaatgcatcagtgtgagatctggcgggagctcttctcacctctgcatgcacttaactttggcattggcggtgacagcacacagcatgtactctggcggcttgagaatggggagctggagcacatccggcccaagattgtggtggtctgggtgggcaccaacaaccacagccacacagcagaacaagtgacaggtggcatcaaagccattgtacaactggtgaacaagctgcagccccaggcccgggtggttgtgctgggcctgcttccaagaggccagcaccccaacccacttcgagagaaaaaccgacaggtgaacgagctggttcgggcagcactagctggctacccccgagcgcacttcttagatgcagaccctggctttgtgcactcggacggtaccataagtcaccatgacatgtatgactacctgcacctgagccgcctggggtacacacctgtctgccgggccctgcactccttgctgcttcgtctcctggcccaagatcagggccaaggcatccctctgccagagacagcaccctaagcatctttccttccttcccttgacaataaattctcctcttccacctaaaaaaaaaaaaaaaaaaaaaaaaaaaaaaaaaaaaataaaataaaaaaaaaaaaaa

SEQ ID NO: 505 - protein, 232 aa, Rattus norvegicus
  ref <308>: DATABASE ACCESSION NUMBER: SWISS-Prot / O35263
  ref <309>: DATABASE ENTRY DATE: 2000-05-30
MSGEGENPASKPTPVQDVQGDGRWMSLHHRFVADSKDKEPEVVFIGDSLVQLMHQCEIWRELFSPLHALNFGIGGDSTQHVLWRLENGELEHIRPKIVVVWVGTNNHSHTAEQVTGGIKAIVQLVNKLQPQARVVVLGLLPRGQHPNPLREKNRQVNELVRAALAGYPRAHFLDADPGFVHSDGTISHHDMYDYLHLSRLGYTPVCRALHSLLLRLLAQDQGQGIPLPETAP

SEQ ID NO: 506 - DNA, 852 bp, Homo sapiens
  ref <308>: DATABASE ACCESSION NUMBER: EMBL / D63391
  ref <309>: DATABASE ENTRY DATE: 1999-01-21
ggacggtcctttgttgccgcgaggggtaggagtgggcgtggcggagccagctccgttcggaacactcccgggccgacccgactcgctcatcctgcaggagctgcggcgccaagatgagtggagaggagaacccagccagcaagcccacgccggtgcaggacgtacagggcgacgggcgctggatgtccctgcaccatcggttcgtggctgacagcaaagataaggaacccgaagtcgtcttcatcggggactccttggtccagctcatgcaccagtgcgagatctggcgcgagctcttctctcctctgcatgcacttaactttggcattggtggtgacggcacacagcatgtactgtggcggctggagaatggggagctggaacacatccggcccaagattgtggtggtctgggtgggcaccaacaaccacggacacacagcagagcaggtgactggtggcatcaaggccattgtgcaactggtgaatgagcgacagccccaggcccgggttgtggtgctgggcctgcttccgcgaggccaacatcccaacccacttcgggagaagaaccgacaggtgaacgagctggtacgggcggcactggctggccaccctcgggcccacttcctagatgccgaccctggctttgtgcactcagatggcaccatcagccatcatgacatgtatgattacctgcatctgagccgcctgggctacacacctgtttgccgggctctgcactccctgcttctgcgtctgctggcccaagaccagggccaaggtgctcccctgctggagcccgcaccctaagcatcctgctgccttcccacaacattaaactctccttcctcag

SEQ ID NO: 507 - protein, 231 aa, Homo sapiens
  ref <308>: DATABASE ACCESSION NUMBER: SWISS-Prot / Q15102
  ref <309>: DATABASE ENTRY DATE: 2002-06-15
MSGEENPASKPTPVQDVQGDGRWMSLHHRFVADSKDKEPEVVFIGDSLVQLMHQCEIWRELFSPLHALNFGIGGDGTQHVLWRLENGELEHIRPKIVVVWVGTNNHGHTAEQVTGGIKAIVQLVNERQPQARVVVLGLLPRGQHPNPLREKNRQVNELVRAALAGHPRAHFLDADPGFVHSDGTISHHDMYDYLHLSRLGYTPVCRALHSLLLRLLAQDQGQGAPLLEPAP

SEQ ID NO: 508 - DNA, 4505 bp, Rattus norvegicus
  ref <308>: DATABASE ACCESSION NUMBER: EMBL / AF016252
  ref <309>: DATABASE ENTRY DATE: 1997-10-04
ggggagggagggagggagggaggtgcggcggagcggcccgggttagcggagcagccacgggcgcggggatgccgggcatcccgagagccaaggcccccggccggagtagggggcgcctgcgccgccagcgccgctgacaccgcctcggaggatgtgagccggtgccgcggccgctgcttcgcgggctgggcgcgcggtcccagcggctccagccagcctccgcttctttaatttgggtgggggcgaacgcaccaggccgctagatctttggaagggggctggctgtctttggcagcttggttgggggaggcgacccacacagggcgctcggagattttttttttttaaagcagggttaactgttttttggcagcttgatttctgggggactctatagaaggcctttcgggatttctttctttggggggagggggcggtggtcccgacttggccagccgcctgctggagggggacagcggggagcagggggatgcgaacccggctcccccaaccatgatgaagacggagcctcgggggcccgggggtcccctccggagcgcctccccgcaccgcagcgcctacgaagcgggcatccaggcactaaagcctcccgatgctcccgggcctgacgaggcacccaaggcggcccaccataagaaatatggctccaacgtccaccgcatcaaaagtatgttcctgcagatgggcaccaccacggggccgccgggtgaggcaggcggcgcctcaggcatggccgaagccccacgggcgtccgatcgcggcgtgcgcctttccctgccgcgggccagcagcctgaacgagaacgtggaccacagtgccctgctcaagctgggcaccagtgtgtcggagcgcgtgagccgtttcgactccaagcccgcgccctcggcgcagccggctccgccgccgcacccgccgtcccggctgcaggagacgcggaagctgttcgaacggagcgtccccgcggcctcgggtggcgacaaggaggccgtggcgcggcggctgctgaggcaggagcgcgccagcctgcaggaccggaagctggacgtcgtggtgcgctttaacggcagcaccgaggcgctggacaagctggatgctgacgccgtgtcgccgacggtcagccagctcagtgcggtcttcgagaaagccgactcgaggaccggccttcaccgtgcacccggtccccctcgggccgcgggggcgccccaggtcaactcgaagctggtcaccaagcggtcccgggtgttccagccaccgccgccgcctcccgccccgtcgggggatgccgcgacagagaaggatcgtggccccggagggcagcagcccccacagcaccgagtggcccctgcccgacctccgccaaagccgcgggaggtacgcaagatcaaaccggtggaggttgaggaaagtggggagtctgaggctgagtcggctcccggggaagtgatccaggccgaggtgaccgtccatgcagccttggagaatggcagcaccacagccaccacagccagccctgcacccgaggaacccaaggccgaagcggtccccgaagaggaggcgtcgtcgtcagtggcgacactagagaggggggtggacaatggccgggccccggacatggcacccgaggaggtggatgaatccaaaaaggaggacttctcagaagcggacttggtagacgtgagcgcctacagtggactcggggaggactctgggggcagtgccctggaagaggacgatgaagaagatgaagaggacggggagcccccctacgagccggaatcagggtgtgtggagattcctgggctttcagaggaagaggacccagccccgagccggaagatccatttcagcaccgcaccgatccaagtattcagcacctactccaatgaggactatgaccgacgcaatgaggatgtggaccccatggcggcctctgcggaatacgagctggagaagcgagtggagaggttggagctgtttcctgtggagttggagaaggactctgagggcctgggcatcagcatcattggcatgggagccggagccgacatgggcctggagaagctgggcatcttcgtcaagactgtgactgagggtggtgcagcccatcgggatggcaggatccaagtgaacgatctcctggtagaggtggacgggacgagcctggtgggagtgacccagagctttgcagcctctgtgcttaggaacaccaaaggcagagtgcggttcatgattggccgggagcggcctggagaacagagtgaagtggcccagctaattcagcagaccttggagcaggagaggtggcagcgggagatgatggagcagagatacgcccagtatggagaagacgatgaggagacaggagagtatgccaccgatgaagatgaagaactgagcccgacatttccagggggtgaaatggccatcgaggtgtttgaactagcagagaatgaggatgcactgtcccctgtggagatggagcctgaaaagctggtgcacaagttcaaggagctccagatcaagcatgctgtcactgaagcggaaatccagcagctgaagcggaagttgcagagtctggagcaggagaaagggcgctggcgggtggagaaggcccagctggagcagagtgtggaggagaataaggagcggatggagaagctagaaggctactggggtgaggcccagagcctgtgccaggctgtggatgagcacctgcgggagactcaggcccagtatcaggccctggagcgaaagtacagcaaggccaagcgtctcatcaaggactaccagcaaaaggagatcgagttcctgaaaaaagagaccgcccagcgtcgggtactggaagagtcggagctagccaggaaggaggaaatggacaaacttctggataagatctcagaactggaaggaaacctgcaaacactgaggaattccaattctacttaacaggaatccttgactggacaatgataacccctccattatccttaccccctgtcctcaatcctcaccccacccctaccagcctggggacaggtgccccgacttcccctactcctccaccccatctcccccagcttcagggaccagagggcccatattacaggcccctttagggtggccagggcagacaatgctggctggaagagtggcctccttgccctgtggggctgaggcacagaggccgagagaagctaagagctggcctgggtggtggatggacacaaggacctgcagaccaaactgccagactttataacctccagcctgtgtctctggaccggagtggagctggggctctcccagcatctcaccacttggaggctgctccctgcccacagggtccgtatggcccctgggcctcttgacttgagattcttggccccttcctcttccccatcattgtgctgtctgttgcattctggcctccaacttggagggattgcctcaacatctcccacccctgctccccatcccaggagggatagagcccacccttgagccggaggctgggcctggtcctgcactgatatctctcctatccttcaggggggaaggagaatgtgactaggggaaagggtagtccaggacacctggaatccagccccccttcctaggaagggcagcagccctcaacttctccgtgtgcctcccctctcccaggtgccaaacagccataggcctcctcctggaactgccctgaggccactctggggttgggggtttccttggtctagcctaggaatgccaggagggagggaggtcagcttaggtggtgtgcctgcagagctctcactggagagctaggccctacccagggccacacccggaagccttgtattaacatcaaagagactcagcctcccctcctccactcccccactgttttccaatgttttcactggagggcaaaattttactactcatctttctggagaccagggctgcttactgtcagcctgctttctaagtgaaattgactccatttccccacgttaaccccaaattggggcttggaccaagggaggtgagaaccctcaggtaccctcccctttcagaatccatctcttgccacttccacataccaccccggccctaagcctaactttgttttattttttttttcttctttttaaaacaacccagttctatccttttcggtttctcctagtcccctgtaaatagaccataccatcaatcagtatttcttgcccctctcttcctcccctcgacgtgcccctactcccccgaaagagctggctgtcacagtgcccggcccctgcacttcacccaggcagatggagggggcggagccgggtgggcgggccctcggtgtacttccggttttgaccggcagcgctcctgccccgcccttggaggacccgtctctgtatataatatatatatgtatgtattgttcctggttttgtacggaccatgccctctgtcaggtcgtccccataaaagcagcccccagagaaaaa

SEQ ID NO: 509 - protein, 817 aa, Rattus norvegicus
  ref <308>: DATABASE ACCESSION NUMBER: SWISS-Prot / O35274
  ref <309>: DATABASE ENTRY DATE: 2002-06-15
MMKTEPRGPGGPLRSASPHRSAYEAGIQALKPPDAPGPDEAPKAAHHKKYGSNVHRIKSMFLQMGTTTGPPGEAGGASGMAEAPRASDRGVRLSLPRASSLNENVDHSALLKLGTSVSERVSRFDSKPAPSAQPAPPPHPPSRLQETRKLFERSVPAASGGDKEAVARRLLRQERASLQDRKLDVVVRFNGSTEALDKLDADAVSPTVSQLSAVFEKADSRTGLHRAPGPPRAAGAPQVNSKLVTKRSRVFQPPPPPPAPSGDAATEKDRGPGGQQPPQHRVAPARPPPKPREVRKIKPVEVEESGESEAESAPGEVIQAEVTVHAALENGSTTATTASPAPEEPKAEAVPEEEASSSVATLERGVDNGRAPDMAPEEVDESKKEDFSEADLVDVSAYSGLGEDSGGSALEEDDEEDEEDGEPPYEPESGCVEIPGLSEEEDPAPSRKIHFSTAPIQVFSTYSNEDYDRRNEDVDPMAASAEYELEKRVERLELFPVELEKDSEGLGISIIGMGAGADMGLEKLGIFVKTVTEGGAAHRDGRIQVNDLLVEVDGTSLVGVTQSFAASVLRNTKGRVRFMIGRERPGEQSEVAQLIQQTLEQERWQREMMEQRYAQYGEDDEETGEYATDEDEELSPTFPGGEMAIEVFELAENEDALSPVEMEPEKLVHKFKELQIKHAVTEAEIQQLKRKLQSLEQEKGRWRVEKAQLEQSVEENKERMEKLEGYWGEAQSLCQAVDEHLRETQAQYQALERKYSKAKRLIKDYQQKEIEFLKKETAQRRVLEESELARKEEMDKLLDKISELEGNLQTLRNSNST

SEQ ID NO: 510 - DNA, 2559 bp, Homo sapiens
  ref <308>: DATABASE ACCESSION NUMBER: EMBL / BC016162
  ref <309>: DATABASE ENTRY DATE: 2001-11-13
gagggcctgggcatcagcatcatcggcatgggcgccggggcagacatgggcctggagaagctgggtatcttcgtcaagaccgtgacggagggtggtgcggcccatcgggatggcaggatccaggtgaatgatctcctggtggaggtggatggaacaagtctggtgggagtgacccagagcttcgcggcgtctgtgctccggaacaccaagggccgagtgcggtttatgattggccgggagcggccgggagagcagagcgaagtggcccagctaattcagcagactttggaacaggagcgatggcagcgggagatgatggagcagagatacgcccagtatggggaggatgacgaggagacaggagagtatgccactgacgaggatgaggagctgagccccacgttcccgggtggtgagatggccatcgaggtgtttgagctagcggagaacgaggatgcactgtcccctgtggacatggagcccgagaagctggtgcacaagttcaaggagctccagatcaagcatgcggtcactgaggcagagatccagcagctgaaaagaaagctgcagagcctggagcaggagaaggggcgctggcgggtggagaaggcgcagttggagcagagtgtggaggagaacaaggagcgcatggagaaactggaaggctactggggtgaggcccagagcctgtgccaggctgtggacgagcacctgcgggagactcaggcgcagtaccaggccctggagcgcaagtacagcaaggccaagcgcctcatcaaggactaccagcagaaggagatcgagttcctgaaaaaggagactgcacagcgtcgggttctggaggagtcggagctggccagaaaggaggagatggacaagctcctggacaagatctcagaactggaaggaaacttgcaaacactgaggaattccaattctacttaacaggaatcattccatgactggacaataattaacccccctcccattgtcctccctcccctgtcctcaacaccccacccctcccccttccagcctggggacaggtgccccgactccccccacccctccaccccacctcccccagcttcagggaccagagggctcatatcacaggcccccttaagatggcctgggcagacagaggtggctagaagggcagcctctttcttgccccatggggctgaggcacagaggccgagggctgccgagggctggcctggtggtcgacggacacaagcacctgcagatcaaactgccagactttacacactccagcttttgtctctggactggaacggggctggggctctcccagcatctgccaactgggggctgctccctgcccatggggcacctgggtggcccctgggcctcttgacttgagattctaccttctcggcccttccctctccccccatcattgtgccgtctctgttgcattctgaccctcccgcctggggggtgggggcgttgcctcaacacctcccccatccctgttccctgtcctgggagggatagagtccaccccagagcccggaggctgggcctggccctggccctgcactgatttctcatgtgtccttcgggaaaagggggagtgagagtgggaaaaagggagagttcaggacacctggtccccagctccccattgcctggggcagcagccctcaatttctccttgtgcctcccctcttccaggtgccaaatagccataacctcgtcttggaactgttatgtggcctctctggggtccaggtttcctggtcaagcctgggaatgccagggaggaaagggggtctggctacagcgaccctggtcttaggcaaggggaacatttctccctggagagtcaggtcctatcctgtgctgccctgtctgcccagcccagggcgatgcctggaagcctactgacattgcagggagtcagcctcgcccccaccccctactggttttccaatgttttgactggagggcaaaattttactactactcatctttttggagaccagggctgccctgctggcagcctgccttctaagtgaaatcgactctgtttccccactttaaccccaaattggggcttggaccaagggaggtgagaccccctcccccaggtcccctcccctttcaaaatccatctcattttgccacttcatgcccctgccctaactgggtttttgttcattttttaaaaacagaccacccatcccatccgttttggcttcttgtcccctgtaaatagaccatgacttcgatcagtatttcttgtccccaccccttcctatccccagatgtgcccccatcccctgaaggagctggctgtctcagtcctgggctcgcgcacttcaccccggcagatggagggggcggaaccgggtgggcggggccgcttcgggctgcttgggccagcggccacccctgcccagccgtcgggagggccgcatctctgtatataatatatatatgtatgtattgttcccggttttgtacggaccatgccctctgtcaggtcgtccccataaaagcagcccccagagcaaaaaaaaaaaaaaaaaa

SEQ ID NO: 511 - protein, 817 aa, Homo sapiens
  ref <308>: DATABASE ACCESSION NUMBER: Refseq / NP_115984
  ref <309>: DATABASE ENTRY DATE: 2002-11-15
MMKTEPRGPGGPLRSASPHRSAYEAGIQALKPPDAPGPDEAPKGAHHKKYGSNVHRIKSMFLQMGTTAGPSGEAGGGAGLAEAPRASERGVRLSLPRASSLNENVDHSALLKLGTSVSERVSRFDSKPAPSAQPAPPPHPPSRLQETRKLFERSAPAAGGDKEAARRLLRQERAGLQDRKLDVVVRFNGSTEALDKLDADAVSPTVSQLSAVFEKADSRTGLHRGPGLPRAAGVPQVNSKLVSKRSRVFQPPPPPPPAPSGDAPAEKERCPAGQQPPQHRVAPARPPPKPREVRKIKPVEVEESGESEAESAPGEVIQAEVTVHAALENGSTVATAASPAPEEPKAQAAPEKEAAAVAPPERGVGNGRAPDVAPEEVDESKKEDFSEADLVDVSAYSGLGEDSAGSALEEDDEDDEEDGEPPYEPESGCVEIPGLSEEEDPAPSRKIHFSTAPIQVFSTYSNEDYDRRNEDVDPMAASAEYELEKRVERLELFPVELEKDSEGLGISIIGMGAGADMGLEKLGIFVKTVTEGGAAHRDGRIQVNDLLVEVDGTSLVGVTQSFAASVLRNTKGRVRCRFMIGRERPGEQSEVAQLIQQTLEQERWQREMMEQRYAQYGEDDEETGEYATDEDEELSPTFPGGEMAIEVFELAENEDALSPVDMEPEKLVHKFKELQIKHAVTEAEIQQLKRKLQSLEQEKGRWRVEKAQLEQSVEENKERMEKLEGYWGEAQSLCQAVDEHLRETQAQYQALERKYSKAKRLIKDYQQKEIEFLKKETAQRRVLEESELARKEEMDKLLDKISELEGNLQTLRNSNST

SEQ ID NO: 512 - DNA, 669 bp, Rattus norvegicus
  ref <308>: DATABASE ACCESSION NUMBER: EMBL / AF016387
  ref <309>: DATABASE ENTRY DATE: 2001-07-11
ccaagatgaaggacatgcggatggataagtcggagctcgggtgcctgcgcgccattgtgctgttcaatccagatgccaagggtttgtccaacccctcggaggtggagtctcttcgagagaaggtttatgccaccctcgagccctataccaagcagaagtatccggaacagcctggcaggtttgccaagcttctgctgcgcctcccagctctgcgctccattggattgaaatgcctggaacacctcttcttcttcaagctcattggggatacccccattgacaccttcctcatggagatgttggagacccctctgcagatcacctgaaactcctcggcagtagcttcctcacccagagtgacccctgggctggtgtgtgtgtcgccctacccctgcacactgtcctctcccactctgacttcccttcctgtccccaaaatgtgatgcttgtcccgaataactacaacctttctacacatgagacttttctaggtggagttttgtatggttgttaaaggtgacccttctttgctacttaaggggctgagtctggcagttcttggaagagtagccaagcctctgtacatataattatcttggtttaaattattttttcacttgccatggaaagcaaacaaatggaaaagaaaataataaatacgatactggc

SEQ ID NO: 513 - protein, 107 aa, Rattus norvegicus
  ref <308>: DATABASE ACCESSION NUMBER: SWISS-Prot / AAD01591
  ref <309>: DATABASE ENTRY DATE: 2002-06-01
KMKDMRMDKSELGCLRAIVLFNPDAKGLSNPSEVESLREKVYATLEPYTKQKYPEQPGRFAKLLLRLPALRSIGLKCLEHLFFFKLIGDTPIDTFLMEMLETPLQIT

SEQ ID NO: 514 - DNA, 1742 bp, Homo sapiens
  ref <308>: DATABASE ACCESSION NUMBER: Refseq / NM_006917
  ref <309>: DATABASE ENTRY DATE: 2002-11-05
ctccgatctagaggcagattcctgactaatcccagagggctggcccagcctgtgctccccgggctgctaggaagcgatgaccactcttgttagcccaagttgaagaaagccgggctgtgcctgggagccgagagaggcggtaatatttagaagctgcacaggagaggaacatgaactgacgagtaaacatgtatggaaattattctcacttcatgaagtttcccgcaggctatggaggctcccctggccacactggctctacatccatgagcccatcagcagccttgtccacagggaagccaatggacagccaccccagctacacagataccccagtgagtgccccacggactctgagtgcagtggggacccccctcaatgccctgggctctccatatcgagtcatcacctctgccatgggcccaccctcaggagcacttgcagcgcctccaggaatcaacttggttgccccacccagctctcagctaaatgtggtcaacagtgtcagcagttcagaggacatcaagcccttaccagggcttcccgggattggaaacatgaactacccatccaccagccccggatctctggttaaacacatctgtgccatctgtggagacagatcctcaggaaagcactacggggtatacagttgtgaaggctgcaaagggttcttcaagaggacgataaggaaggacctcatctacacgtgtcgggataataaagactgcctcattgacaagcgtcagcgcaaccgctgccagtactgtcgctatcagaagtgccttgtcatgggcatgaagagggaagctgtgcaagaagaaagacagaggagccgagagcgagctgagagtgaggcagaatgtgctaccagtggtcatgaagacatgcctgtggagaggattctagaagctgaacttgctgttgaaccaaagacagaatcctatggtgacatgaatatggagaactcgacaaatgaccctgttaccaacatatgtcatgctgctgacaagcagcttttcaccctcgttgaatgggccaagcgtattccccacttctctgacctcaccttggaggaccaggtcattttgcttcgggcagggtggaatgaattgctgattgcctctttctcccaccgctcagtttccgtgcaggatggcatccttctggccacgggtttacatgtccaccggagcagtgcccacagtgctggggtcggctccatctttgacagagtcctaactgagctggtttccaaaatgaaagacatgcagatggacaagtcggaactgggatgcctgcgagccattgtactctttaacccagatgccaagggcctgtccaacccctctgaggtggagactctgcgagagaaggtttatgccacccttgaggcctacaccaagcagaagtatccggaacagccaggcaggtttgccaagctgctgctgcgcctcccagctctgcgttccattggcttgaaatgcctggagcacctcttcttcttcaagctcatcggggacacccccattgacaccttcctcatggagatgttggagaccccgctgcagatcacctgagccccaccagccacagcctccccacccaggatgacccctgggcaggtgtgtgtggacccccaccctgcactttcctccacctcccaccctgacccccttcctgtccccaaaatgtgatgcttataataaagaaaacctttctacaaaaaaaaaaaaaaaaaa

SEQ ID NO: 515 - protein, 463 aa, Homo sapiens
  ref <308>: DATABASE ACCESSION NUMBER: SWISS-Prot / P48443
  ref <309>: DATABASE ENTRY DATE: 2002-06-15
MYGNYSHFMKFPAGYGGSPGHTGSTSMSPSAALSTGKPMDSHPSYTDTPVSAPRTLSAVGTPLNALGSPYRVITSAMGPPSGALAAPPGINLVAPPSSQLNVVNSVSSSEDIKPLPGLPGIGNMNYPSTSPGSLVKHICAICGDRSSGKHYGVYSCEGCKGFFKRTIRKDLIYTCRDNKDCLIDKRQRNRCQYCRYQKCLVMGMKREAVQEERQRSRERAESEAECATSGHEDMPVERILEAELAVEPKTESYGDMNMENSTNDPVTNICHAADKQLFTLVEWAKRIPHFSDLTLEDQVILLRAGWNELLIASFSHRSVSVQDGILLATGLHVHRSSAHSAGVGSIFDRVLTELVSKMKDMQMDKSELGCLRAIVLFNPDAKGLSNPSEVETLREKVYATLEAYTKQKYPEQPGRFAKLLLRLPALRSIGLKCLEHLFFFKLIGDTPIDTFLMEMLETPLQIT

SEQ ID NO: 516 - DNA, 669 bp, Rattus norvegicus; identical to SEQ ID NO: 512
  ref <308>: DATABASE ACCESSION NUMBER: EMBL / AF016387
  ref <309>: DATABASE ENTRY DATE: 2001-07-11

SEQ ID NO: 517 - protein, 107 aa, Rattus norvegicus; identical to SEQ ID NO: 513
  ref <308>: DATABASE ACCESSION NUMBER: SWISS-Prot / AAD01591
  ref <309>: DATABASE ENTRY DATE: 2002-06-01

SEQ ID NO: 518 - DNA, 1742 bp, Homo sapiens; identical to SEQ ID NO: 514
  ref <308>: DATABASE ACCESSION NUMBER: Refseq / NM_006917
  ref <309>: DATABASE ENTRY DATE: 2002-11-05

SEQ ID NO: 519 - protein, 463 aa, Homo sapiens; identical to SEQ ID NO: 515
  ref <308>: DATABASE ACCESSION NUMBER: SWISS-Prot / P48443
  ref <309>: DATABASE ENTRY DATE: 2002-06-15

SEQ ID NO: 520 - DNA, 1283 bp, Rattus norvegicus
  ref <308>: DATABASE ACCESSION NUMBER: EMBL / AF017437
  ref <309>: DATABASE ENTRY DATE: 1997-09-23
cggcgcggagatgtggcccttggcggcggcgcgctcctgctgctgcggttcagctcaactcctgcttagtaaagtcaaatctgtagagttcacgtcatgcaatgacactgtggtcatcccttgcaaagtccttaatgtggaggcccaaagcaccgatgaaatgtttgtgaagtggaagttgaacaaatcgtatattttcatctatgatggaaataaaaatagcactactagagaacaaaactttaccagtgcaaaaatctcggtctcagacttgctcaaaggcattgcctctttgacaatggatacccatgaggctgtggtgggaaactacacctgtgaagtgactgagctttccagagaaggcaaaacagttatagagctgaaaaaccgcccagtttcgtggttttctacaaatgaaaagatcctcattgttattttcccaattttggctatactcctgttctggggaaagtttggtatattaacactcaaatacaagtccagccatacgaataagagaatcattctgctgctggttgccgggctggcactcacactcatcgtggttgttggcgccatccttttcatcccgggagagaagcccgtgaagaacgcttctggtcttggcctcattgtaatctccacaggaatattaatactgcttcagtacaatgtgtttatgacagcttttggaatgacctctttcaccattgccatattgatcactcaagtgctgggctatgtccttgctgtggtcgggatgtgtctttgcatcatggcttgtgaaccagtgcacggcccccttttgatttcaggtttgggaatcatagctttagcagaattacttggactagtttatatgaagtttgtcgcttccaaccagcgaactatacaacctcctaggaaagctgtagaggaaccccttaacgcgtttaaagagtcgaaagggatgatgaatgacgaataactgaagggaagtgacggactgtaacttgaaagtcagaagtggaagaattcagttgtctgagcaccatggccttcacaactcacagctggaaggaacacacaacagtgactgactttcatctctgaaaaaagtcattgaaccataaatgaatattacagttaagtttatattaaagcagctgtaatttacgtaataaaaaatatatgatgtgctgtgaaaaaaaaaaaaaaaaaaaaaaaaaaaaaaaaaaaaaaaaaaaaaaaaaaaaaaaaaaaaaaaaaaaaaaaaaaaaaaaaaaaaaaaaaaaaaaaaaaaa

SEQ ID NO: 521 - protein, 318 aa, Rattus norvegicus
  ref <308>: DATABASE ACCESSION NUMBER: SWISS-Prot / AAB70273
  ref <309>: DATABASE ENTRY DATE: 2003-02-01
MWPLAAARSCCCGSAQLLLSKVKSVEFTSCNDTVVIPCKVLNVEAQSTDEMFVKWKLNKSYIFIYDGNKNSTTREQNFTSAKISVSDLLKGIASLTMDTHEAVVGNYTCEVTELSREGKTVIELKNRPVSWFSTNEKILIVIFPILAILLFWGKFGILTLKYKSSHTNKRIILLLVAGLALTLIVVVGAILFIPGEKPVKNASGLGLIVISTGILILLQYNVFMTAFGMTSFTIAILITQVLGYVLAVVGMCLCIMACEPVHGPLLISGLGIIALAELLGLVYMKFVASNQRTIQPPRKAVEEPLNAFKESKGMMNDE

SEQ ID NO: 522 - DNA, 1285 bp, Homo sapiens
  ref <308>: DATABASE ACCESSION NUMBER: Refseq / NM_001777
  ref <309>: DATABASE ENTRY DATE: 2000-10-31
gggctgcctgtgacgcgcggcgcggtcggtcctgcctgtaacggcggcggcggctgctgctccagacacctgcggcggcggcggcgaccccgcggcgggcgcggagatgtggcccctggtagcggcgctgttgctgggctcggcgtgctgcggatcagctcagctactatttaataaaacaaaatctgtagaattcacgttttgtaatgacactgtcgtcattccatgctttgttactaatatggaggcacaaaacactactgaagtatacgtaaagtggaaatttaaaggaagagatatttacacctttgatggagctctaaacaagtccactgtccccactgactttagtagtgcaaaaattgaagtctcacaattactaaaaggagatgcctctttgaagatggataagagtgatgctgtctcacacacaggaaactacacttgtgaagtaacagaattaaccagagaaggtgaaacgatcatcgagctaaaatatcgtgttgtttcatggttttctccaaatgaaaatattcttattgttattttcccaatttttgctatactcctgttctggggacagtttggtattaaaacacttaaatatagatccggtggtatggatgagaaaacaattgctttacttgttgctggactagtgatcactgtcattgtcattgttggagccattcttttcgtcccaggtgaatattcattaaagaatgctactggccttggtttaattgtgacttctacagggatattaatattacttcactactatgtgtttagtacagcgattggattaacctccttcgtcattgccatattggttattcaggtgatagcctatatcctcgctgtggttggactgagtctctgtattgcggcgtgtataccaatgcatggccctcttctgatttcaggtttgagtatcttagctctagcacaattacttggactagtttatatgaaatttgtggcttccaatcagaagactatacaacctcctaggaaagctgtagaggaaccccttaatgcattcaaagaatcaaaaggaatgatgaatgatgaataactgaagtgaagtgatggactccgatttggagagtagtaagacgtgaaaggaatacacttctgtttaagcaccatggccttgatgattcactgttggggagaagaaacaagaaaagtaactggttgtcacctatgagacccttacgtgattgttagttaagtttttattcaaagcagctgtaatttagttaataaaataattatgatc

SEQ ID NO: 523 - protein, 323 aa, Homo sapiens
  ref <308>: DATABASE ACCESSION NUMBER: SWISS-Prot / Q08722
  ref <309>: DATABASE ENTRY DATE: 2002-06-15
MWPLVAALLLGSACCGSAQLLFNKTKSVEFTFCNDTVVIPCFVTNMEAQNTTEVYVKWKFKGRDIYTFDGALNKSTVPTDFSSAKIEVSQLLKGDASLKMDKSDAVSHTGNYTCEVTELTREGETIIELKYRVVSWFSPNENILIVIFPIFAILLFWGQFGIKTLKYRSGGMDEKTIALLVAGLVITVIVIVGAILFVPGEYSLKNATGLGLIVTSTGILILLHYYVFSTAIGLTSFVIAILVIQVIAYILAVVGLSLCIAACIPMHGPLLISGLSILALAQLLGLVYMKFVASNQKTIQPPRKAVEEPLNAFKESKGMMNDE

SEQ ID NO: 524 - DNA, 1283 bp, Rattus norvegicus; identical to SEQ ID NO: 520
  ref <308>: DATABASE ACCESSION NUMBER: EMBL / AF017437
  ref <309>: DATABASE ENTRY DATE: 1997-09-23

SEQ ID NO: 525 - protein, 318 aa, Rattus norvegicus; identical to SEQ ID NO: 521
  ref <308>: DATABASE ACCESSION NUMBER: SWISS-Prot / AAB70273
  ref <309>: DATABASE ENTRY DATE: 2003-02-01

SEQ ID NO: 526 - DNA, 1285 bp, Homo sapiens; identical to SEQ ID NO: 522
  ref <308>: DATABASE ACCESSION NUMBER: Refseq / NM_001777
  ref <309>: DATABASE ENTRY DATE: 2000-10-31

SEQ ID NO: 527 - protein, 323 aa, Homo sapiens; identical to SEQ ID NO: 523
  ref <308>: DATABASE ACCESSION NUMBER: SWISS-Prot / Q08722
  ref <309>: DATABASE ENTRY DATE: 2002-06-15

SEQ ID NO: 528 - DNA, 2047 bp, Rattus norvegicus
  ref <308>: DATABASE ACCESSION NUMBER: EMBL / AF018261
  ref <309>: DATABASE ENTRY DATE: 2000-03-03
gcacgagggatcatggtagggctcagtaaatctccctccatggcttgttggagaggcatagactgttgatcggagtctactctggacccaggctgctccagttgtgagatgtggtgatctaccagtgtccattgcggtctccctttgtgagtcgcgtcatctctccatgccccggggggctggtgccccttgacaccactactgggcacaatgtcgacatcatcgctgcggcgtcagatgaagaatatcgtccacaactactcagaggcagagatcaaggtccgggaggccacaagcaatgatccctggggcccatccagctccctcatgtcagagattgctgacctcacctacaatgttgtggccttctccgagattatgagcatgatctggaagcggctcaacgaccatggcaagaattggaggcacgtctacaaggccatgacgttgatggagtacctcatcaagactggctctgagcgtgtatcacaacagtgcaaagagaacatgtatgctgtgcagacgctgaaggacttccaatatgtggaccgtgatggcaaggaccagggtgtgaatgtgcgggagaaggccaagcagctggtggctttgctgcgtgatgaggatcggcttcgggaggagcgcgcccacgcgctcaagaccaaggagaaactggcacagactgccacggcttcctcagcagctgtgggctctggaccacctcccgaggcggagcaggcatggccacagagcagcggggaggaggagttgcagctccagctggccctggctatgagcaaggaggaggctgaccagcccccgtcctgcggccccgaggatgacgtccagctccagctggcccttagtttgagccgagaggagcacgataaggaagagcggatccgtcgtggggatgacctgaggctgcagatggcaatagaggagagcaagagggagactgggggcaaggaggagtcatctcttatggatcttgctgacgtcttcacaaccccagcccctccacaggcctcagacccttgggggggcccggcatctgtgcctactgctgtccctgtggctgctgctgcctcagacccttggggggcacctgctgtccctccagctgctgatccttggggtggtgcagcccccacgccagcctccggggatccttggaggcctgcagcccctacagggccctctgttgacccttggggtgggaccccagctcctgcagctggagaggggcccacatctgacccgtggggaagcgctgatggtggggcccctgtcagtggacccccatcttctgacccctgggcacctgccccagctttctcagacccttggggaggttcacctgcaaagcccagcagcaatggcactgcagttgggggctttgacactgagcccgatgagttctcagacttcgaccgactccgcactgccctgccaacctctgggagcagcacaggggaattggagttgctcgcaggggaggttcctgctcgcagccccggggcattcgacatgagtggggttgggggatctctggctgagtctgtggggagtccccctcctgcggcaaccccaactcctaccccgccaacacggaagactccggagtcattcctaggccctaatgcagcccttgtggacttggactcactggtgagccgaccaggccctacaccgccaggagccaaggcttccaacccattccttccaagtggagctccggccaccggcccctccgtcaccaatcctttccagccagcaccccctgcaacgctcaccctgaaccagctccgtctcagtcctgtgcccccagttcctggagcgccacccacctacatctctcctcttggtggaggccctggcctgccccccatgatgcccccgggtcccccagcccccaacactaaccccttcctcctataatccagggtaggagggaggcctggttcagctggcttccccaatttctgctccctgggagatcagtgttgtgagtgcatgtgaaatggggggggggcctccccctcgtgcc

SEQ ID NO: 529 - protein, 575 aa, Rattus norvegicus
  ref <308>: DATABASE ACCESSION NUMBER: SWISS-Prot / AAC33823
  ref <309>: DATABASE ENTRY DATE: 2003-02-01
MSTSSLRRQMKNIVHNYSEAEIKVREATSNDPWGPSSSLMSEIADLTYNVVAFSEIMSMIWKRLNDHGKNWRHVYKAMTLMEYLIKTGSERVSQQCKENMYAVQTLKDFQYVDRDGKDQGVNVREKAKQLVALLRDEDRLREERAHALKTKEKLAQTATASSAAVGSGPPPEAEQAWPQSSGEEELQLQLALAMSKEEADQPPSCGPEDDVQLQLALSLSREEHDKEERIRRGDDLRLQMAIEESKRETGGKEESSLMDLADVFTTPAPPQASDPWGGPASVPTAVPVAAAASDPWGAPAVPPAADPWGGAAPTPASGDPWRPAAPTGPSVDPWGGTPAPAAGEGPTSDPWGSADGGAPVSGPPSSDPWAPAPAFSDPWGGSPAKPSSNGTAVGGFDTEPDEFSDFDRLRTALPTSGSSTGELELLAGEVPARSPGAFDMSGVGGSLAESVGSPPPAATPTPTPPTRKTPESFLGPNAALVDLDSLVSRPGPTPPGAKASNPFLPSGAPATGPSVTNPFQPAPPATLTLNQLRLSPVPPVPGAPPTYISPLGGGPGLPPMMPPGPPAPNTNPFLL

SEQ ID NO: 530 - DNA, 2620 bp, Homo sapiens
  ref <308>: DATABASE ACCESSION NUMBER: Refseq / NM_013333
  ref <309>: DATABASE ENTRY DATE: 2002-10-01
aattctttcatttcagagttgagcaaactgtgtctcaaggaggtgtgcgctgcaggtagctgatgtggccaggatttgaacccacattttatattctttgccattagattccatttttcttatctcttatttctcagcgccaggtctctttttgtttctgggcctctttcttccttggcctcctgcctccctgtcttcccatgttcttgtatctgctgctgcctgtgtttttctcattgtgtctctgcctagctccctctgcccaggtttctatgtgtctctttctgtcagaactgtcttctatttcttctcagtccccttctctgcatttgttacatcatctcttcatcttaatgtattaggctggggctgttttgggactccagagagttactttttaactagctacatctgtcttcaggtgcctggctttctggcctgaggtggaagcagaggccagcctctctccgtcatccctatctcccctgggcttacatcatggcggggctttgaaaatctccctctgtggcttcttggagccgcatagatgggtgatcagagctggctctggaaccaggctgctccaggagtaaggagcccagtctttgcatgcagtgttgaaaaaggtaatgtccctcttgtgctgagcgagcacctggcacacagcagggacccaggcagtggggctgttaggttccttatctctcctgagccttgggcttccgctatccttgggacgtctggtcttctggcttccccggttcttcctgccgccctggatgcggtgacctgccagcacctgccgcagccttcgtccgggagtcgccccatctctccacgcaatcggccctgtgccccttgctgctgcagccgggcaccatgtcgacctcgtccttgaggcgccagatgaagaacatcgtccacaactactcagaggcggagatcaaggttcgagaggccacgagcaatgacccctggggcccatccagctccctcatgtcagagattgccgacctcacctacaacgttgtcgccttctcggagatcatgagcatgatctggaagcggctcaatgaccatggcaagaactggcgtcacgtttacaaggccatgacgctgatggagtacctcatcaagaccggctcggagcgcgtgtcgcagcagtgcaaggagaacatgtacgccgtgcagacgctgaaggacttccagtacgtggaccgcgacggcaaggaccagggcgtgaacgtgcgtgagaaagctaagcagctggtggccctgctgcgcgacgaggaccggctgcgggaagagcgggcgcacgcgctcaagaccaaggaaaagctggcacagaccgccacggcctcatcagcagctgtgggctcaggcccccctcccgaggcggagcaggcgtggccgcagagcagcggggaggaggagctgcagctccagctggccctggccatgagcaaggaggaggccgaccaggaggagcggatccgtcgcggggatgacctgcggctgcagatggcaatcgaggagagcaagagggagactgggggcaaggaggagtcgtccctcatggaccttgctgacgtcttcacggccccagctcctgccccgaccacagacccctgggggggcccagcacccatggctgctgccgtccccacggctgcccccacctcggacccctggggcggcccccctgtccctccagctgctgatccctggggaggtccagcccccacgccggcctctggggacccctggaggcctgctgcccctgcaggaccctcagttgacccttggggtgggaccccagcccctgcagctggggaggggcccacgcctgatccatggggaagttccgatggtggggtcccggtcagtgggccctcagcctccgatccctggacaccggccccggccttctcagatccctggggagggtcacctgccaagcccagcaccaatggcacaacagcagccgggggattcgacacggagcccgacgagttctctgactttgaccgactccgcacggcactgccgacctccgggagcagcgcaggagagctggagctgctggcaggagaggtgccggcccgaagccctggggcgtttgacatgagtggggtcaggggatctctggctgaggctgtgggcagccccccacctgcagccacaccaactcccacgccccccacccggaagacgccggagtcattcctggggcccaatgcagccctcgtcgacctggactcgctggtgagccggccgggccccacgccgcctggagccaaggcctccaaccccttcctgccaggcggaggcccagccactggcccttccgtcaccaaccccttccagcccgcgcctcccgcgacgctcaccctgaaccagctccgtctcagtcctgtgcctcccgtccctggagcgccacccacgtacatctctccccttggcgggggccctggcctgccccccatgatgcccccgggccccccggcccccaacactaatcccttcctcctataatccagggcggaagggggcctggctccatccggctgccccattccggctccctgggagatcagtgttgtgagtgcatgtgaaatgg

SEQ ID NO: 531 - DNA, 3845 bp, Rattus norvegicus
  ref <308>: DATABASE ACCESSION NUMBER: EMBL / AF019043
  ref <309>: DATABASE ENTRY DATE: 2000-03-03
gtctgcagaggatggagcttacttattcagagttaaagatgtctccagcctgggaggctgagagtggaaattcaccggctcagcggttagtcaggagtgaatccctgcaggaaagccccgcctgcctaggctcagcaggtcactcattcgctgactcagtcgcttagcaaacacagtgttcaccacccacacgctaggccatgcatctagactgacatggcccctgccctactgaggggcagacactgcctccagggaggctcacttgctatgggcttgctttcttcccaagggctactgttcaaggaactcttgtgttgaccacaggctgaggcttccaacaacttctccaaattcacacagtagagaacaggccatgatgctctttcctgcagccagacccctgacatggggtgagagaacaggtgagcaggccagagtcagtgtccgggcccagcagctgccttttgggaagtcagttctgagtagacgggcctggttaaaatcctggcgatgccattttctggttgtgaccttgcacaggtcatcccctctctgagcacctgtttccctcctctataagtaagtggtgacaagactcagtttttcttccctaaggtgtccgaaaaggggagggccacagctcctcgtgccgaattcggcacgaggcgggctgcgggctgcgtccccattcattgcagtggtctgctgggttggggtccagtgtttccggagtcatggaggcgctgatcccggtcatcaataagctgcaggacgtcttcaacaccgtgggcgccgacatcatccagctgcctcagattgtcgtagtgggaactcagagcagtggaaagagctcagtgctggaaagcctagtggggagggaccttcttcccagagggactggtgtggtcacccggagacctcttattctgcagctggtccacgtttcaccagaagataaaagaaaaacaacaggagaagaaaatgaccctgctacatggaaaaactcaagacacctttctaaaggagttgaagcagaagaatggggtaaatttcttcacaccaaaaacaagctttacacagattttgatgaaattcgacaagaaattgaaaatgaaactgaaagaatttcaggaaataataagggagtaagccctgagccaatccatctcaaggttttctcgcccaacgttgtcaacctgacgcttgtggatttaccaggaatgaccaaagtacctgtaggtgatcagcccaaggatattgagcttcaaatcagagaacttattcttcggttcatcagtaatcccaattccattatccttgctgtcactgctgcaaatacagatatggcaacgtcagaggcacttaagatttccagagaggtagatccagatgggcgcagaactctagctgtaatcaccaagcttgatctcatggatgcgggtactgatgccatggatgtattgatgggaagggttattccagtcaagcttggaataattggagtagttaacaggagccaactggacattaacaataagaagagtgtaactgattcaatccgtgatgagtatgcttttcttcaaaagaagtacccatctctggccaacagaaatggaacaaagtatcttgctaggactctgaataggttacttatgcatcatatcagagactgtttaccagagctgaaaacaagaataaatgtcttagctgctcagtatcagtctcttctaaatagctatggtgagcccgtggatgataaaagtgctactttactccagctcattaccaagtttgccacagagtattgtaacactattgaaggaacggcaaagtacatcgaaacttctgagctatgtggtggtgctaggatttgttatattttccatgagacttttgggcgaaccttagaatctgttgatccactaggtggccttaacactattgacatcttgactgccattagaaatgctactggcccccgtccagctttatttgtgcctgaagtttcatttgagttactggtcaaacgtcagattaagcgtctagaggagcccagcctccgctgtgtggagctggtccacgaggaaatgcagaggatcattcagcactgtagcaactacagcacacaggaactgttacggttccctaaactccatgatgccatagttgaagtagtgacttgtcttcttcgtaaaaggttgcccgtgacaaatgaaatggtacataacttagtggcaattgagctagcatatatcaacacaaaacaccccgactttgctgatgcctgtgggctaatgaacaataacatagaggaacaaagaagaaacagactagcaagagaactaccttcagctgtatcgcgagacaagtcttctaaagttccaagtgctttggcacctgcctcccaggagccctcccctgccgcttctgccgaggctgatggcaagttaattcaggacaacagaagagaaactaaaaatgttgcatctgcaggtggtggaattggagatggtggtcgaattggagatggtggtcaggaaccgacaacaggcaactggagaggaatgctgaaaacttcaaaagctgaagaattacttgctgaagaaaaatcaaaaccaattccaattatgccagcaagtccacaaaaaggccatgctgtcaatttgctagatgtgccagttccagttgcacgaaaactgtctgcccgagaacagcgagattgtgaggttattgaaagactcatcaaatcatattttctaattgtcagaaagaatattcaagacagcgtcccaaaggcagtaatgcattttttggttaatcatgtgaaagatactcttcagagtgaattagtagggcagctgtataagtcatccttattagatgaccttctgactgaatccgaggacatggcacagcgaagaaaagaagcggctgacatgctgaaggcattacaaggagccagtcaaattattgctgaaatccgagagactcatctttggtgaacagaactgtttggtcttctacactttgctgacttgaacctactagctactgcctacctgagtagaagtttatttatggacttttgtgtatcgcagtgtatgaatttgcttgtgtgaagactggctataagctgaaaagtatattattcattacaagacaaatcacatgtttaattcacatttttcaagtttcctatgatgtatatcaagtctgtccgtttcagtcaaacttacaagaacaattgatgttctagttgtacaaagcagtttgcctgtgcatatgatgacccgcgtaacctttttttagtcttaaagctgcagccgtagtcctcaaagaggaagctccaggacatttcatgactataatgcatgcactatttatatagactgacctggcttcaaaaggtggagcctggcgagttcctcacataatcaatgtatccacctatccttcatttttatagtcttaaaaaacaaacaaaattctgtaacttctgcagttttaggaaaaatataagatctgaaagactcataaagatgtaggaacagactgtgtaattaatggctcctgagtctatactgccctaatgttagaaagtaaaatatgctttgattcaaaataagcctgaaaatataaattgacttcctgcattaaaaataactattaggaactttcttagtaacaataactggtcctgttagtttctaaatgactcagtgacaacctaaatttccctaatttacaagtacatcgattgcagtccagatgcaccttagggtggggcgctgactctggggctccgagactcagttatgtgagacctaaaagtctactctgtt

SEQ ID NO: 532 - protein, 848 aa, Rattus norvegicus
  ref <308>: DATABASE ACCESSION NUMBER: SWISS-Prot / Q08877
  ref <309>: DATABASE ENTRY DATE: 2001-10-16
MGNREMEELIPLVNRLQDAFSALGQSCLLELPQIAVVGGQSAGKSSVLENFVGRDFLPRGSGIVTRRPLVLQLVTSKAEYAEFLHCKGKKFTDFDEVRHEIEAETDRVTGMNKGISSVPINLRVYSPHVLNLTLIDLPGITKVPVGDQPPDIEYQIRDMIMQFITRENCLILAVTPANTDLANSDALKLAKEVDPQGLRTIGVITKLDLMDEGTDARDVLENKLLPLRRGYVGVVNRSQKDIDGKKDIKAAMLAERKFFLSHPAYRHIADRMGTPHLQKVLNQQLTNHIRDTLPNFRNKLQGQLLSIEHEVEAFKNFKPEDPTRKTKALLQMVQQFAVDFEKRIEGSGDQVDTLELSGGAKINRIFHERFPFEIVKMEFNEKELRREISYAIKNIHGIRTGLFTPDMAFEAIVKKQIVKLKGPSLKSVDLVMQELINTVKKCTKRLANFPRLCEETERIVANHIREREGKTKDQVLLLIDIQVSYINTNHEDFIGFANAQQRSSQVHKKSTIGNQVIRKGWLTVSNIGIMKGGSKGYWFVLTAESLSWYKDDEEKEKKYMLPLDNLKVRDVEKGFMSSKHVFALFNTEQRNVYKDYRSLELACDSQEDVDSWKASLLRAGVYPDKSFTENDENGQAENFSMDPQLERQVETIRNLVDSYMSIINKCIRDLIPKTIMHLMINNVKDFINSELLAQLYSSEDQNTLMEESVEQAQRRDEMLRMYQALKEALAIIGDINTVTVSTPAPPPVDDSWLQHSRRSPPPSPTTQRRLTLSAPLPRPASSRGPAPAIPSPGPHSGAPPVPFRPGPLPPFPNSSDSYGAPPQVPSRPTRAPPSVPRFGAVKEEAVEP

SEQ ID NO: 533 - DNA, 2493 bp, Homo sapiens
  ref <308>: DATABASE ACCESSION NUMBER: EMBL / AF000430
  ref <309>: DATABASE ENTRY DATE: 1998-06-23
ggaggcgaactgtgggccccggccattcattgccgtggccggcgggcactggggccccgtgttttcagagtcatggaggcgctaattcctgtcataaacaagctccaggacgtcttcaacacggtgggcgccgacatcatccagctgcctcaaatcgtcgtagtgggaacgcagagcagcggaaagagctcagtgctagaaagcctggtggggagggacctgcttcccagaggtactggaattgtcacccggagacctctcattctgcaactggtccatgtgacacaagaagataaacggaaaacaacaggagaagaaaatggggtggaagcagaagaatggggtaaatttcttcacaccaaaaataagctttacacggattttgatgaaattcgacaagaaattgaaaatgaaacagaaagaatttcaggaaataataagggagtaagccctgaaccaattcatcttaagattttttcacccaacgttgtcaatttgacacttgtggatttgccaggaatgaccaaggtgcctgtaggtgatcaacctaaggatattgagcttcaaatcagagagctcattcttcggttcatcagtaatcctaattccattatcctcgctgtcactgctgctaatacagatatggcaacatcagaggcacttaaaatttcaagagaggtagatccagatggtcgcagaaccctagctgtaatcactaaacttgatctcatggatgcgggtactgatgccatggatgtattgatgggaagggttattccagtcaaacttggaataattggagtagttaacaggagccagctagatattaacaacaagaagagtgtaactgattcaatccgtgatgagtatgcttttcttcaaaagaaatatccatctctggccaatagaaatggaacaaagtatcttgctaggactctaaacaggttactgatgcatcacatcagagattgtttaccagagttgaaaacaagaataaatgttctagctgctcagtatcagtctcttctaaatagctacggtgaacccgtggatgataaaagtgctactttactccaacttattaccaaatttgccacagaatattgtaacactattgaaggaactgcaaaatatattgaaacttcggagctatgcggtggtgctagaatttgttatattttccatgagacttttgggcgaaccttagaatctgttgatccacttggtggccttaacactattgacattttgactgccattagaaatgctactggtcctcgtcctgctttatttgtgcctgaggtttcatttgagttactggtgaagcggcaaatcaaacgtctagaagagcccagcctccgctgtgtggaactggttcatgaggaaatgcaaaggatcattcagcactgtagcaattacagtacacaggaattgttacgatttcctaaacttcatgatgccatagttgaagtggtgacttgtcttcttcgtaaaaggttgcctgttacaaatgaaatggtccataacttagtggcaattgaactggcttatatcaacacaaaacatccagactttgctgatgcttgtgggctaatgaacaataatatagaggaacaaaggagaaacaggctagccagagaattaccttcagctgtatcacgagacaagtcttctaaagttccaagtgctttggcacctgcctcccaggagccctcccccgctgcttctgctgaggctgatggcaagttaattcaggacagcagaagagaaactaaaaatgttgcatctggaggtggtggggttggagatggtgttcaagaaccaaccacaggcaactggagaggaatgctgaaaacttcaaaagctgaagagttattagcagaagaaaaatcaaaacccattccaattatgccagccagtccacaaaaaggtcatgccgtgaacctgctagatgtgccagttcctgttgcacgaaaactatctgctcgggaacagcgagattgtgaggttattgaacgactcattaaatcatattttctcattgtcagaaagaatattcaagacagtgtgccaaaggcagtaatgcattttttggttaatcatgtgaaagacactcttcagagtgagctagtaggccagctgtataaatcatccttattggatgatcttctgacagaatctgaggacatggcacagcgcaggaaagaagcagctgatatgctaaaggcattacaaggagccagtcaaattattgctgaaatccgggagactcatctttggtgaagagaactatgtaatactgagactttgttgactcaaaacttgctagttactgcctacctgagtagaatcttatttatgaactcctgtgtattgcaatggtatgaatctgctcatgtggagactggctataaactgaaaagtgtattccaaattgcagaacacatcacacatttaatccaaataataaatggctgtttctaaaaaaaaaaa

SEQ ID NO: 534 - protein, 737 aa, Homo sapiens
  misc_feature (1)..(737): Xaa=Unknown amino acid
MEALIPVINKLQDVFNTVGADIIQLPQIVVVGTQSSGKSSVLESLVGRDLLPRGTGIVTRRPLILQLVHVTQEDKRKTTGEENGVEAEEWGKFLHTKNKLYTDFDEIRQEIENETERISGNNKGVSPEPIHLKIFSPNVVNLTLVDLPGMTKVPVGDQPKDIELQIRELILRFISNPNSIILAVTAANTDMATSEALKISREVDPDGRRTLAVITKLDLMDAGTDAMDVLMGRVIPVKLGIIGVVNRSQLDINNKKSVTDSIRDEYAFLQKKYPSLANRNGTKYLARTLNRLLMHHIRDCLPELKTRINVLAAQYQSLLNSYGEPVDDKSATLLQLITKFATEYCNTIEGTAKYIETSELCGGARICYIFHETFGRTLESVDPLGGLNTIDILTAIRNATGPRPALFVPEVSFELLVKRQIKRLEEPSLRCVELVHEEMQRIIQHCSNYSTQELLRFPKLHDAIVEVVTCLLRKRLPVTNEMVHNLVAIELAYINTKHPDFADACGLMNNNIEEQRRNRLARELPSAVSRDKSSKVPSALAPASQEPSPAASAEADGKLIQDSRRETKNVASGGGGVGDGVQEPTTGNWRGMLKTSKAEELLAEEKSKPIPIMPASPQKGHAVNLLDVPVPVARKLSAREQRDCEVIERLIKSYFLIVRKNIQDSVPKAVMHFLVNHVKDTLQSELVGQLYKSSLLDDLLTESEDMAQRRKEAADMLKALQGASQIIAEIRETHLWX

SEQ ID NO: 535 - DNA, 6628 bp, Rattus norvegicus
  ref <308>: DATABASE ACCESSION NUMBER: EMBL / AF019628
  ref <309>: DATABASE ENTRY DATE: 1998-07-01
agcagctggcctcccaccaccctaaaaataatccactcgccgctgtctgctgacccgggaggaaaacttgtcatcccatggagtgtgtgagctcctcggcttgctccagagagatccccaaccgctttgaggagtcagtgactgagttctgtggacttgtttgaaatttacatcttcagactgtgcgcaggcggttggaaggtagatcaagtgcaccagtagggggactaagttcctgagccaaagtcaaggctaatcaactaagaagaaatgagcctttccttctgtggtaacaacatctcctcctacaacatctaccatggtgttctccaaaacccctgctttgtggacgcactcaacctggtccctcacgtcttcctgctgtttatcacctttccgatcctgttcattggatgggggagccaaagctcaaaagtgcaaattcatcacaacacatggcttcattttcctggacacaacctgagatggattctgacgtttgcactcctgtttgtgcatgtctgcgagatagcagaaggcattgtttcagactcgcaacgggcgtccaggcatctccaccttttcatgccggctgtgatgggatttgtcgccaccaccacatccattgtgtattaccacaacattgaaacatcaaacttccctaaattacttttagctttattcctgtactgggtcatggccttcattacaaagacaataaagttggtcaaatactggcagttggggtggggaatgtcagacctgcgcttctgcatcacgggagtgatggtcatcttgaatggactgctgatggctgtggagatcaatgtcatccgggtccgaagatatgttttcttcatgaatcctcagaaagtgaagcctccagaggacctccaggacctgggcgtgaggttcctccagccgtttgtgaatttgctgtccaaagctacttactggtggatgaacacgcttatcatatcagctcacaggaaacctattgatctgaaggcgatcggaaagttgccgatagcaatgagggcggtgacgaattatgtttgcttgaaggaggcctacgaagagcagaagaaaaaggctgcggatcatccgaatcggactccctccatatggctggccatgtacagggcttttgggagaccgatcctgctgagcagcacgttccgctacttggctgacttgctgggctttgccggccctctttgtatttccggaatcgtccagcgtgtgaatgaaccgaagaataacacgacgagattttcagagacactctcatcaaaggagtttctggaaaatgcccatgtgctggctgtcctgctcttcctggccctcatcctgcaaagaacatttttgcaggcttcgtactatgtgaccatagagaccggcatcaacctgcgtggggctctgctggctatgatctacaacaaaatccttcgactgtctacttctaacctatccatgggcgagatgaccctgggacagatcaacaacttggttgccatagaaaccaatcagctcatgtggttcttgttcctgtgtcccaatctgtgggccatgcccgttcagatcataatgggggtgatcctgctctataatctgcttgggtcaagcgcactggtaggcgcggcggtcatcgtgctcctcgcaccgattcagtacttcatcgccacgaagctggcggaggctcagaagagcactctggattattccaccgagaggctgaagaagacaaacgagatactgaaaggcatcaagctccttaagctgtatgcctgggagcacattttctgcaagagcgtggaagagactagaatgaaggagctctccagcctcaaaaccttcgcgctctacacgtcgctttccatcttcatgaacgcagccattcccatcgcagccgttcttgcaacatttgtgacccatgcctatgccagtggcaacaacctgaaacccgcagaggcctttgcctctctgtctctcttccacatcctcgtcacaccgctcttcctgctgtccacggtggtcagattcgcagtgaaagccatcatcagcgttcagaagctgaatgagtttctcttgagcgatgagattggcgaggacagctggaggactggggaggggacgctgccttttgagtcctgtaagaagcacaccggagtgcaatcaaaaccgataaacaggaagcagcctggaaggtaccacctggacaactacgagcaggcgcggcgtcttcggcctgctgagactgaagatgttgccataaaggtgacgaacggatacttctcatggggcagtggtttagccacattatccaatattgacattcgaattccaacaggtcagctaaccatgattgtgggtcaggtgggttgtggcaaatcgtctctcctccttgccatccttggtgagatgcagaccctggaaggaaaagtttactggaacaatgtaaatgaatctgagccttcttttgaagcaacccgaagcagaagcaggtactctgtggcttatgctgcccagaagccttggctcctcaatgctacggtcgaggaaaacatcacttttggaagttctttcaacagacagaggtacaaggctgtcaccgatgcctgctctctgcagccagacattgatttgttaccctttggagaccaaactgaaattggagagaggggtatcaacctgagtgggggtcagaggcagagaatctgcgtggcccgggcactctaccagaacaccaatattgtcttcttggacgatccattctccgctctggacatccacctgagcgaccacttgatgcaggaagggatcctgaagtttctccaggacgacaagaggacggtcgtccttgtgactcacaaactacagtacctgacgcacgcggactggatcatagccatgaaggatgggagtgtgttaagggaagggactttgaaagacatccagaccaaagacgtggagctctatgaacactggaaaaccctcatgaatcggcaagatcaggaattagaaaaggacatggaagccgaccaaacaacgctggagaggaagactctccgaagagctatgtactcaagggaggccaaagcacagatggaggatgaagatgaagaggaggaggaggaggaagatgaggacgacaacatgtcaactgtaatgaggctcaggacgaagatgccctggaagacctgttggtggtacctcacttcaggagggtttttcctgctcttcctcatgatcttctctaagcttttgaagcactctgtgatcgtggccatcgactactggctagctacgtggacctccgagtacagtataaacgacccagggaaagctgaccagaccttctatgtggctgggttcagcatcctctgtggagcgggcattttcctttgcctcgtcacctccctcactgtagaatggatgggtctcaccgccgccaagaacctccaccacaatctcctcaataagataattctgggcccaataaggttctttgataccacgcccctgggactgatcctcaatcggttttctgctgataccaacatcatcgaccaacatatccctccgaccttggagtcgctgacccgctctaccctgctctgcctgtcggctattgggatgatctcctatgctacacccgtgtttctcatcgctcttgcgcccctgggcgtcgccttttatttcatccagaaatacttccgggttgcctctaaggatctccaggaactcgatgacagcacccagctccccctgctttgtcacttctcagaaacagctgaagggcttaccactatccgggccttcaggcatgaaaccagattcaagcaacgcatgctggagctgacagacacaaacaacattgcctacttatttctctccgcagccaacagatggctggaggtcaggacggactacctgggagcttgcattgttctgacggcctccattgcatccatcagtggctcttccaactctggactagtgggcttgggccttctgtatgccctcacgataaccaattacctgaattgggttgtaaggaacttggccgacctcgaagtccagatgggcgcagtgaagaaagtgaacagtttcttaactatggagtctgagaactatgaaggcaccatggatccttctcaagtcccagagcattggccacaggaaggtgagatcaagattcacgatctatgcgtcagatatgaaaataacctgaagcccgttctgaaacatgtcaaggcttacatcaagcctgggcagaaggtgggcatctgtggtcgcaccggtagtgggaagtcctctctatctctggctttcttcagaatggtcgacatatttgatggaaagatagtcattgatggaatagacatttccaagctgcccttgcacacgctccgctctagactgtccatcattctccaggacccaatcctgttcagcggctctatcagatttaacttggatcctgaatgcaagtgcacagacgacaggctctgggaggctctggaaattgctcagttgaagaatatggtcaaatctctgccaggaggcctagacgccactgtcaccgaaggtggtgagaacttcagcgttggacagagacagctgttctgcctggccagggcctttgttcgaaagagcagcatactcattatggatgaggccacggcctccatcgacatggccacggaaaacattttgcagaaagtagtcatgacagcctttgcggatcgcacggttgtaaccatagctcatcgggttcacaccattctgactgctgacctggtcattgtgatgaagagaggaaacattttggaatacgacaccccggaaagcctcttggcccaggaggatggagtgttcgcctcgttcgttcgtgcggacatgtgacaggattacatcacaacagcacctgtgtctcgatgcctaccgtcgcccaccagagggttcccccaactttgcctcggaagggtggcgccggaaacttcgacagacttctgtatggaaagtagagatttctgtttcctgttttggtctgagggacactccctgtaggttcatcgtgggtgttgtactgtgatcaggccacactggaaaggtagcctatgctaaaacatgccagcgaccttaaggggtaaatctgtcgatgtctgtcaagcactggagctgaaatgaggcgtctgcgctaccacactctcattaggaagactagcactgccctgctgttgatgaagaaaattcattttctaacaaaatactcacgttcatgatccataggagagtcttttctgtgcatttaacattgttgatatttccttttaacttttccccttttaactcatttcctgtcaccacgaagctatcatatttagtacctctataaagccgacccctcacaagagaaagatcatgaaaagagattgaatatttgaaaatattatttgtttccatttgcctccatccaataaggaggaagttcaagttagcttcagtccttcagcaatgggccacctaaactaagctttctagagtttaattctttatcagccaaacaatggctctgaaccctgaaatgctatattatctagggcccaaaagaatatagatgaatggccttatctgtcacacacacacacacacacacacacacacacacacacacacacacacacatatacatacacatcttcatgccatatcttggctgtatgctaatcttggcatgtgcacattcctcgaaggtaccagatatcccctaccctacatctctgtgggaagatagaaatagttctcactctgaatttacacaggtagcaagtgtttattttcacttgggcaaatttcagtggcagacattgatgtcacacatgtggccattggtcctgttctaatttatagagtgtaccagaagtctatatgatattagtgtcacatttcatttaavtgcccattaataaagccaaactgactgaagttcacttccctgttatccagcttccacagtttctgtaacctttaaccatcagatataagcagctgctcaattccatatgagggtctccacagaaaatagatgtccatcgcccaccgttcctgtagtcatatggcgttgtttattctgtgtcaagacttatagttcttgtgcatcgagatatttcaaggtgcctttatggatatagaacgtaatgtaagaaaaacgttcatagagatatacagaaacggcccaggttacttagcctaaatagtcaccttttcttccatatcaaaaacttcattagaaaaaaataatagtattatttgcagaaagctagtaggtcacagctattagcaatgagttcaaccgcaaaagtacttcataagagaatcgactaatctactaaaatattgctggtgctgcagaaggttctgctggggctgatacccatgacgtttgttgtcagtcagtgtctccttctctcctagaaatggcattcatctacagaagtagctccctgctgctgtagcccactacgccatcctgtgcaaaagtgactttcgtttcctcgaaacttttacttacttgatttgcaaaaaacaaacaaaaaacaaacaaacaaacaaaaaaaaaaaa

SEQ ID NO: 536 - protein, 1545 aa, Rattus norvegicus
  ref <308>: DATABASE ACCESSION NUMBER: SWISS-Prot / Q63563
  ref <309>: DATABASE ENTRY DATE: 2001-10-16
MSLSFCGNNISSYNIYHGVLQNPCFVDALNLVPHVFLLFITFPILFIGWGSQSSKVQIHHNTWLHFPGHNLRWILTFALLFVHVCEIAEGIVSDSQRASRHLHLFMPAVMGFVATTTSIVYYHNIETSNFPKLLLALFLYWVMAFITKTIKLVKYWQLGWGMSDLRFCITGVMVILNGLLMAVEINVIRVRRYVFFMNPQKVKPPEDLQDLGVRFLQPFVNLLSKATYWWMNTLIISAHRKPIDLKAIGKLPIAMRAVTNYVCLKEAYEEQKKKAADHPNRTPSIWLAMYRAFGRPILLSSTFRYLADLLGFAGPLCISGIVQRVNEPKNNTTRFSETLSSKEFLENAHVLAVLLFLALILQRTFLQASYYVTIETGINLRGALLAMIYNKILRLSTSNLSMGEMTLGQINNLVAIETNQLMWFLFLCPNLWAMPVQIIMGVILLYNLLGSSALVGAAVIVLLAPIQYFIATKLAEAQKSTLDYSTERLKKTNEILKGIKLLKLYAWEHIFCKSVEETRMKELSSLKTFALYTSLSIFMNAAIPIAAVLATFVTHAYASGNNLKPAEAFASLSLFHILVTPLFLLSTVVRFAVKAIISVQKLNEFLLSDEIGEDSWRTGEGTLPFESCKKHTGVQSKPINRKQPGRYHLDNYEQARRLRPAETEDVAIKVTNGYFSWGSGLATLSNIDIRIPTGQLTMIVGQVGCGKSSLLLAILGEMQTLEGKVYWNNVNESEPSFEATRSRSRYSVAYAAQKPWLLNATVEENITFGSSFNRQRYKAVTDACSLQPDIDLLPFGDQTEIGERGINLSGGQRQRICVARALYQNTNIVFLDDPFSALDIHLSDHLMQEGILKFLQDDKRTVVLVTHKLQYLTHADWIIAMKDGSVLREGTLKDIQTKDVELYEHWKTLMNRQDQELEKDMEADQTTLERKTLRRAMYSREAKAQMEDEDEEEEEEEDEDDNMSTVMRLRTKMPWKTCWWYLTSGGFFLLFLMIFSKLLKHSVIVAIDYWLATWTSEYSINDPGKADQTFYVAGFSILCGAGIFLCLVTSLTVEWMGLTAAKNLHHNLLNKIILGPIRFFDTTPLGLILNRFSADTNIIDQHIPPTLESLTRSTLLCLSAIGMISYATPVFLIALAPLGVAFYFIQKYFRVASKDLQELDDSTQLPLLCHFSETAEGLTTIRAFRHETRFKQRMLELTDTNNIAYLFLSAANRWLEVRTDYLGACIVLTASIASISGSSNSGLVGLGLLYALTITNYLNWVVRNLADLEVQMGAVKKVNSFLTMESENYEGTMDPSQVPEHWPQEGEIKIHDLCVRYENNLKPVLKHVKAYIKPGQKVGICGRTGSGKSSLSLAFFRMVDIFDGKIVIDGIDISKLPLHTLRSRLSIILQDPILFSGSIRFNLDPECKCTDDRLWEALEIAQLKNMVKSLPGGLDATVTEGGENFSVGQRQLFCLARAFVRKSSILIMDEATASIDMATENILQKVVMTAFADRTVVTIAHRVSSIMDAGLVLVFSEGILVECDTGPNLLQHKNGLFSTLVMTNK

SEQ ID NO: 537 - DNA, 3170 bp, Homo sapiens
  ref <308>: DATABASE ACCESSION NUMBER: EMBL / AK056519
  ref <309>: DATABASE ENTRY DATE: 2002-08-06
gtgcttcgcctaggggaggaaaactgtcatcggagagttctgcgtccgggtttgaaatttacatcttaagacagtgtaggaagtcggtgttttgaaggtagctcaagtgcaccggcaggggtttgaagcagcgtgaagctattgcccaagagtaaaccatataagaagaaatgagcctttcattttgtggtaacaacatttcttcatataatatcaacgatggtgtactacaaaattcctgctttgtggatgccctcaacctggtccctcatgtctttctgttgtttatcacttttccaatattgtttattgggtgggggagccaaagctcaaaagtacaaattcaccacaacacatggcttcattttccgggacataacctgagatggattcttacattcgctctcctgtttgtgcatgtctgtgaaatagcagaaggcattgtttcagactcgcggcgggaatcaaggcacctccacctctttatgccagccgtgatgggattcgttgccactacaacatcgatagtgtattatcataatatcgaaacatcaaattttcctaaattacttttagttccaggtgtttctgtctctggcttggagtccaaggacattttcccaaggttcaagcctttcactgatgctgtgggaatgccacattttactagaattactatgtagcagagtatgtttctagcataatgaaaagtatgctgtcctgaggagcagctgccattacatcacggcctttcgcacctgcattgtgactaaaattgttttattagcctctcttgcttccttgttctgtggaaatcagaggctctctaaaatattcctaattttatttttgccttgggtcaaaattatataacgcatctatatgagttatgttcaatactctgacccatcactgtattccttggagtatactttctttcttaaagagataaaggtatggaacaagaatcacagatgggctatgaacctcctgaaattgtagttcgaattatgtgtttgtgtgaatgatgcttactgtttctgattttatttgattgttgtataatgaaaatgatgttggctaatgatatagaaattaggagaagaaatattgaaaacacacacacagtattttattcatttgtccagaggacatgaaaatttaaaatggatgcatgaaagatattgattatttaattatatgttgtgtcacattatatgattgttaaaggcaatctaataaaaaaggtagagagggttaaatattaatttaaaaggctgtcacattttgaattatcttaatagaaaggtcttttgtgcaaaatgagaggcagacattattgcagaaaatgccaaaaaaagagaaagaaatttccaacaagtagctgcaaaaaaatatgtgaaattgagaatttaataagctaaatatctatttttgaaaagttgatggtaaaaagaaaggttataactagaaaggaatttagatattaataatgttttgatggaaatgcaatcagaagaggcctattattgttatttaggtgcaagacagcacaatttgatcatattgctggaaggacatggagataaaatataatatttcttgttattttaacagagaaaaatttggacctaggaaagttactcattttaagaccacaaagatagtaattttgtctcaacatttcattatgaaaatcaccaaatgtacagaaagttgaaagaatcatgtgaattcccacttacccaacatctgaattcttcaaattacattttttctgtttgttttatcacatatctacatcttttcatccttctattcatacctctctccatcttagttttgatgcattttaaggtaagttgtagacattagtatactttacctctgaacgcttcatgcgtatctttttgtgagacaaaatttatatacatgaaacacagcgatcttaatttgctaaatgcatgtacctatataacactatcatgacataactatcatccatgcaaattttcttatactcaatttcacctttacagaagcaatatctgttctgatttttacccccaccatggattaggtttgcctgttctagaacttcatgtaaattgaatgacacagtatagacttttaagtaaggcttctttttctaagcatgattttttgatgctcatccgtaatgtagcatagatcaatattttcttattgttgcatttcattgtataactatatcatagttttttcaatcccttgttaatagacatctgtactatttccaggttttagccatcatgagagtaaaagctgctatcaacattcttaagtattttgtggctatatgcatttatttctcctaggtaaatacctaagagtgaaatctctgggtcatacaataagtgggtaaatgttcatattttaagaaactgacatcttttcccaaaatgtttgtatcattttttatactcactaacaaggtgtaagagttccagttccacatgttcatcatttggtgatcttggtctaatttagtcatgctagtgggtgtgtactggtaatacattgcggttttaatttgcatttatctgattgctaattatgttgaacactctttgatgagtttattggccatttttaatctttgggatgtggctattcatatcttttgcccatgtttcattgggttgcacttttattattgcgttgtaggaatattttgtgcatactagatattagtatgtcatcagttacatgttttgataatgttttccttctagtctgtggcatacatattcatttatttaatagggtcttttaatgagcagaagattttaaatttcgatgtagtataatttatcatttcttctagtccttagttactgctttctgtgtcttaagacatctttgtcttccctctaaatatgtttccctcttattctcctgtttgcttttagatgctttatggtttccatttttatttttaggactacgattctttctaaattaattgtgtatatggtgtaagataggtgtcaaagttctttttttttttttttttttccaagtggatatcaatgtgttccagcaccatttgtgggatagactttctgtttctcaagagattgcattggcacttatgtaaaaaaaaataaatcaaatgactatttaaattt

SEQ ID NO: 538 - DNA, 411 bp, Rattus norvegicus
  ref <308>: DATABASE ACCESSION NUMBER: EMBL / AF020210
  ref <309>: DATABASE ENTRY DATE: 2001-10-31
cttcttcccagagggactggtgtggtcacccggagacctcttattctgcagctggtccacgtttcaccagaagataaaagaaaaacaacaggagaagaaaatggtaaatttcagagctggaaccctgctacatggaaaaactcaagacacctttctaaaggagttgaagcagaagaatggggtaaatttcttcacaccaaaaacaagctttacacagattttgatgaaattcgacaagaaattgaaaatgaaactgaaagaatttcaggaaataataagggagtaagccctgagccaatccatctcaaggttttctcgcccaacgttgtcaacctgacgcttgtggatttaccaggaatgaccaaagtacctgtaggtgatcagcccaaggatattgagcttcaaatcaga

SEQ ID NO: 539 - protein, 137 aa, Rattus norvegicus
  ref <308>: DATABASE ACCESSION NUMBER: SWISS-Prot / AAB71235
  ref <309>: DATABASE ENTRY DATE: 2002-10-01
LLPRGTGVVTRRPLILQLVHVSPEDKRKTTGEENGKFQSWNPATWKNSRHLSKGVEAEEWGKFLHTKNKLYTDFDEIRQEIENETERISGNNKGVSPEPIHLKVFSPNVVNLTLVDLPGMTKVPVGDQPKDIELQIR

SEQ ID NO: 540 - DNA, 411 bp, Rattus norvegicus; identical to SEQ ID NO: 538
  ref <308>: DATABASE ACCESSION NUMBER: EMBL / AF020210
  ref <309>: DATABASE ENTRY DATE: 2001-10-31

SEQ ID NO: 541 - protein, 137 aa, Rattus norvegicus; identical to SEQ ID NO: 539
  ref <308>: DATABASE ACCESSION NUMBER: SWISS-Prot / AAB71235
  ref <309>: DATABASE ENTRY DATE: 2002-10-01

SEQ ID NO: 542 - DNA, 636 bp, Rattus norvegicus
  ref <308>: DATABASE ACCESSION NUMBER: EMBL / AF020212
  ref <309>: DATABASE ENTRY DATE: 2001-10-31
atggtacataacttagtggcaattgagctagcatatatcaacacaaaacaccccgactttgctgatgtctgtgggctaatgaacaataacatagaggaacaaagaagaaacagactagcaagagaactaccttcagctgtatcgcgagacaagtcttctaaagttccaagtgctttggcacctgcctcccaggagccctcccctgccgcttctgccgaggctgatggcaaggttgcatctgcaggtggtggaattggagatggtggtcgaattggagatggtggtcaggaaccgacaacaggcaactggagaggaatgctgaaaacttcaaaagctgaagaattacttgctgaagaaaaatcaaaaccaattccaattatgccagcaagtccacaaaaaggccatgctgtcaatttgctagatgtgccagttccagttgcacgaaaactgtctgcccgagaacagcgagattgtgaggttattgaaagactcatcaaatcatattttctaattgtcagaaagaatattcaagacagcgtcccaaaggcagtaatgcattttttggttaatcatgtgaaagatactcttcagagtgaattagtagggcagctgtataagtcatccttattagatgac

SEQ ID NO: 543 - protein, 212 aa, Rattus norvegicus
  ref <308>: DATABASE ACCESSION NUMBER: SWISS-Prot / AAB71237
  ref <309>: DATABASE ENTRY DATE: 2002-06-01
MVHNLVAIELAYINTKHPDFADVCGLMNNNIEEQRRNRLARELPSAVSRDKSSKVPSALAPASQEPSPAASAEADGKVASAGGGIGDGGRIGDGGQEPTTGNWRGMLKTSKAEELLAEEKSKPIPIMPASPQKGHAVNLLDVPVPVARKLSAREQRDCEVIERLIKSYFLIVRKNIQDSVPKAVMHFLVNHVKDTLQSELVGQLYKSSLLDD

SEQ ID NO: 544 - DNA, 3293 bp, Homo sapiens
  ref <308>: DATABASE ACCESSION NUMBER: Refseq / NM_012062
  ref <309>: DATABASE ENTRY DATE: 2002-11-05
ggaggcgaactgtgggccccggccattcattgccgtggccggcgggcactggggccccgtgttttcagagtcatggaggcgctaattcctgtcataaacaagctccaggacgtcttcaacacggtgggcgccgacatcatccagctgcctcaaatcgtcgtagtgggaacgcagagcagcggaaagagctcagtgctagaaagcctggtggggagggacctgcttcccagaggtactggaattgtcacccggagacctctcattctgcaactggtccatgtgacacaagaagataaacggaaaacaacaggagaagaaaatggggtggaagcagaagaatggggtaaatttcttcacaccaaaaataagctttacacggattttgatgaaattcgacaagaaattgaaaatgaaacagaaagaatttcaggaaataataagggagtaagccctgaaccaattcatcttaagattttttcacccaacgttgtcaatttgacacttgtggatttgccaggaatgaccaaggtgcctgtaggtgatcaacctaaggatattgagcttcaaatcagagagctcattcttcggttcatcagtaatcctaattccattatcctcgctgtcactgctgctaatacagatatggcaacatcagaggcacttaaaatttcaagagaggtagatccagatggtcgcagaaccctagctgtaatcactaaacttgatctcatggatgcgggtactgatgccatggatgtattgatgggaagggttattccagtcaaacttggaataattggagtagttaacaggagccagctagatattaacaacaagaagagtgtaactgattcaatccgtgatgagtatgcttttcttcaaaagaaatatccatctctggccaatagaaatggaacaaagtatcttgctaggactctaaacaggttactgatgcatcacatcagagattgtttaccagagttgaaaacaagaataaatgttctagctgctcagtatcagtctcttctaaatagctacggtgaacccgtggatgataaaagtgctactttactccaacttattaccaaatttgccacagaatattgtaacactattgaaggaactgcaaaatatattgaaacttcggagctatgcggtggtgctagaatttgttatattttccatgagacttttgggcgaaccttagaatctgttgatccacttggtggccttaacactattgacattttgactgccattagaaatgctactggtcctcgtcctgctttatttgtgcctgaggtttcatttgagttactggtgaagcggcaaatcaaacgtctagaagagcccagcctccgctgtgtggaactggttcatgaggaaatgcaaaggatcattcagcactgtagcaattacagtacacaggaattgttacgatttcctaaacttcatgatgccatagttgaagtggtgacttgtcttcttcgtaaaaggttgcctgttacaaatgaaatggtccataacttagtggcaattgaactggcttatatcaacacaaaacatccagactttgctgatgcttgtgggctaatgaacaataatatagaggaacaaaggagaaacaggctagccagagaattaccttcagctgtatcacgagacaagtcttctaaagttccaagtgctttggcacctgcctcccaggagccctcccccgctgcttctgctgaggctgatggcaagttaattcaggacagcagaagagaaactaaaaatgttgcatctggaggtggtggggttggagatggtgttcaagaaccaaccacaggcaactggagaggaatgctgaaaacttcaaaagctgaagagttattagcagaagaaaaatcaaaacccattccaattatgccagccagtccacaaaaaggtcatgccgtgaacctgctagatgtgccagttcctgttgcacgaaaactatctgctcgggaacagcgagattgtgaggttattgaacgactcattaaatcatattttctcattgtcagaaagaatattcaagacagtgtgccaaaggcagtaatgcattttttggttaatcatgtgaaagacactcttcagagtgagctagtaggccagctgtataaatcatccttattggatgatcttctgacagaatctgaggacatggcacagcgcaggaaagaagcagctgatatgctaaaggcattacaaggagccagtcaaattattgctgaaatccgggagactcatctttggtgaagagaactatgtaatactgagactttgttgactcaaaacttgctagttactgcctacctgagtagaatcttatttatgaactcctgtgtattgcaatggtatgaatctgctcatgtggagactggctataaactgaaaagtgtattccaaattgcagaacacatcacacatttaatccaaataataaatggctgtttctaaagtttcccagtatatataaaatacatcaagtctgtcttgtgacagtttcatctgaacttaacttaaaaacaactgttaatgttctagttgtgcaaagcagtttgcctgtggataagatgacctgtgtaataatctttgttagtagtcttaaagctgctgccatagtcctccaagaagaaagcaccaagacaacatttcatatgactataatgcatgtactatataagctgatctggctttgaaagatgtgagttggcaagttcctcacatagagtcattgtattccacctgtccttcaatttagttttttctgagcttctttgcagcctttgatgtgtttttaagaaagctgaatgcacaagaggatctgtgacactgacatggctgtggtgtgcatactgtgtagttacatagcccttccaattctgggtccatttgcactagcaaattaaaatatgctttgattcatacttaaacctgaaagcaggaatgcctacattaattcctacattaaaaacagccatctacccttgattatctagaaagacttggtaatgatggtcagttccttttagatttcagaaaatcaaatgatgacctaaatttcccttaatttgcaaatacagtagtaattaaggtacatctctaaagtggagcacttacaccaggctctaagattcactttgaggtggaacttaaaaccagtgtactgtatgtatgcattggtaatagctacttttgcttcatagcttcataccaacaaaatatatttattagaatagtatgaaagtactgaaggagttgaaaga

SEQ ID NO: 545 - protein, 736 aa, Homo sapiens
  ref <308>: DATABASE ACCESSION NUMBER: Refseq / NP_036192
  ref <309>: DATABASE ENTRY DATE: 2002-11-05
MEALIPVINKLQDVFNTVGADIIQLPQIVVVGTQSSGKSSVLESLVGRDLLPRGTGIVTRRPLILQLVHVTQEDKRKTTGEENGVEAEEWGKFLHTKNKLYTDFDEIRQEIENETERISGNNKGVSPEPIHLKIFSPNVVNLTLVDLPGMTKVPVGDQPKDIELQIRELILRFISNPNSIILAVTAANTDMATSEALKISREVDPDGRRTLAVITKLDLMDAGTDAMDVLMGRVIPVKLGIIGVVNRSQLDINNKKSVTDSIRDEYAFLQKKYPSLANRNGTKYLARTLNRLLMHHIRDCLPELKTRINVLAAQYQSLLNSYGEPVDDKSATLLQLITKFATEYCNTIEGTAKYIETSELCGGARICYIFHETFGRTLESVDPLGGLNTIDILTAIRNATGPRPALFVPEVSFELLVKRQIKRLEEPSLRCVELVHEEMQRIIQHCSNYSTQELLRFPKLHDAIVEVVTCLLRKRLPVTNEMVHNLVAIELAYINTKHPDFADACGLMNNNIEEQRRNRLARELPSAVSRDKSSKVPSALAPASQEPSPAASAEADGKLIQDSRRETKNVASGGGGVGDGVQEPTTGNWRGMLKTSKAEELLAEEKSKPIPIMPASPQKGHAVNLLDVPVPVARKLSAREQRDCEVIERLIKSYFLIVRKNIQDSVPKAVMHFLVNHVKDTLQSELVGQLYKSSLLDDLLTESEDMAQRRKEAADMLKALQGASQIIAEIRETHLW

SEQ ID NO: 546 - DNA, 2225 bp, Rattus norvegicus
  ref <308>: DATABASE ACCESSION NUMBER: EMBL / AF020618
  ref <309>: DATABASE ENTRY DATE: 1998-07-02
ctgcagtacttgtacattgctaaataaagagagggactccaggaggagcagcctgggtctaagaggtaggcagaaggaggttttaggggcctgagcacaagcttgaggagagaaaggttattaaaaagccagacgcttacaggtctcagaagggctagccagaaactgtggctggggttaaggaaagggtttaagagtgtgggcttttggttctgaggatgtagaacgtgaatgttgagagaagaaccaagtggcggagttgggtgtgagcaatgctattaggaatttgaggcagggattcacgcgctgctgtgactattttttaacaatgactcagtgctgtgacctgatactgtttccagagcgacttctaaacaaattccccctttctaggccagacacatggccccaagcccaagaccccagcatgtcctgcactggaaggaagcccactctttctacctcctgtctccactgatgggcttcctcagccgggcctggagccgcctgagggggcccgaggtctcagaggcctggttggcagaaacagtagcaggagcaaaccagatagaggctgatgctctgttgacgcctcccccggtctctgaaaatcacctacctctccgagagactgaaggaaatggaactcctgaatggagtaaagcagcccagaggctctgccttgatgtggaagcccaaagttcccctcctaaaacttggggactttcagatattgatgaacataatgggaagccaggacaagatggccttagagagcaagaagtggagcacacagctggcctgcctacactacagccccttcacctgcaaggggcagataagaaagttggggaggtggtggctagagaagagggtgtgtccgagctggcttaccccacatcacactgggagggtggtccagctgaggatgaagaggatacagaaaccgtgaagaaggctcaccaggcctctgctgcttccatagctccaggatataaacccagcacttctgtgtattgcccaggggaggcagaacatcgagccacggaggaaaaaggaacagacaataaggctgaaccctcaggctcccactccagagtctgggagtaccacactagagagaggcctaagcaggagggagaaactaagccagagcaacacagggcagggcagagtcacccttgtcagaatgcagaggctgaggaaggaggacctgagacttctgtctgttctggcagtgccttcctgaaggcctgggtgtatcgcccaggagaggacacagaggaggaagaagacagtgatttggattcagctgaggaagacacagctcatacctgtaccaccccccatacaagtgccttcctgaaggcctgggtctatcgcccaggagaggacacagaagaggaagatgacggtgattgggattcagctgaggaagacgcgtctcagagctgtaccaccccccatacaagtgccttcctgaaggcctgggtctatcgcccaggagaggacacagaagaggaagacgacagtgagaatgtggccccagttgactcagaaacagttgactcttgccagagtacccagcattgtctaccagtagagaagaccaagggatgtggagaagcagagccccctcccttccagtggccttctatttacctggacagaagccagcaccaccttgggctgcccctaagctgccccttcgactgcagaagcggctcagatctttcaaagcccccgcccggaatcagggccctgagattcctctgaagggtagaaaggtgcacttctctgagaaagttacagtccatttccttgctgtctgggcaggaccagcccaggctgctcgtcgaggcccctgggagcagtttgcacgagatcgaagccgctttgctcgacgcattgccaggcagaggagcagctgggtccttaccttacccctgctttcagggccagagcatggacacgccttagaaacctaccccttcctctgtcgtcctcgtctcttccactgcctgagccttgctcttccactgaggccacacccctcagccaagatgtgaccactccctctccccttcccagtgaaatccctcctcccagcctggacttgggaggaaggcgggctaagcctgagtagttttttgtgtattctatgagtgttagtctcttaatacgaatatgtaacgccttttgcatttgtaaaaaaaaaaaaaaaa

SEQ ID NO: 547 - protein, 457 aa, Rattus norvegicus
  ref <308>: DATABASE ACCESSION NUMBER: SWISS-Prot / AAC24980
  ref <309>: DATABASE ENTRY DATE: 2000-05-01
MAPSPRPQHVLHWKEAHSFYLLSPLMGFLSRAWSRLRGPEVSEAWLAETVAGANQIEADALLTPPPVSENHLPLRETEGNGTPEWSKAAQRLCLDVEAQSSPPKTWGLSDIDEHNGKPGQDGLREQEVEHTAGLPTLQPLHLQGADKKVGEVVAREEGVSELAYPTSHWEGGPAEDEEDTETVKKAHQASAASIAPGYKPSTSVYCPGEAEHRATEEKGTDNKAEPSGSHSRVWEYHTRERPKQEGETKPEQHRAGQSHPCQNAEAEEGGPETSVCSGSAFLKAWVYRPGEDTEEEEDSDLDSAEEDTAHTCTTPHTSAFLKAWVYRPGEDTEEEDDGDWDSAEEDASQSCTTPHTSAFLKAWVYRPGEDTEEEDDSENVAPVDSETVDSCQSTQHCLPVEKTKGCGEAEPPPFQWPSIYLDRSQHHLGLPLSCPFDCRSGSDLSKPPPGIRALRFL

SEQ ID NO: 548 - DNA, 2331 bp, Homo sapiens
  ref <308>: DATABASE ACCESSION NUMBER: Refseq / XM_009097
  ref <309>: DATABASE ENTRY DATE: 2002-08-01
cccagttgttgatcttatgcaagacgctgcacgaccccgcgcccgcttgtcgccacggcacttgaggcagccggagatactctgagttactcggagcccgacgcctgagggtgagatgaacgcgctggcctccctaaccgtccggacctgtgatcgcttctggcagaccgaaccggcgctcctgcccccggggtgacgcgcagctcccagccgcccagacacatggccccaggccaagcaccccatcaggctaccccgtggagggatgcccaccctttcttcctcctgtccccagtgatgggcctcctcagccgcgcctggagccgcctgaggggcctgggacctctagagccctggctggtggaagcagtaaaaggagcagctctggtagaagctggcctggagggagaagctaggactcctctggcaatcccccataccccttggggcagacgccctgaagaggaggctgaagacagtggaggccctggagaggacagagaaacactggggctgaaaaccagcagttcccttcctgaagcctggggacttttggatgatgatgatggcatgtatggtgagcgagaggcaaccagtgtccctagagggcagggaagtcaatttgcagatggccagcgtgctcccctgtctcccagccttctgataaggacactgcaaggttctgataagaacccaggggaggagaaagccgaggaagagggagttgctgaagaggagggagttaacaagttctcttatccaccatcacaccgggagtgttgtccagccgtggaggaggaggacgatgaagaagctgtaaagaaagaagctcacagaacctctacttctgccttgtctccaggatccaagcccagcacttgggtgtcttgcccaggggaggaagagaatcaagccacggaggataaaagaacagaaagaagtaaaggagccaggaagacctccgtgtccccccgatcttcaggctccgaccccaggtcctgggagtatcgttcaggagaggcgtccgaggagaaggaggaaaaggcacacaaagaaactgggaaaggagaagctgccccagggccgcaatcctcagccccagcccagaggccccagctcaagtcctggtggtgccaacccagtgatgaagaggagggtgaggtcaaggctttgggggcagctgagaaggatggagaagctgagtgtcctccctgcatccccccaccaagtgccttcctgaaggcctgggtgtattggccaggagaggacacagaggaagaggaagatgaggaagaagatgaggacagtgactctggatcagatgaggaagagggagaagctgaggcttcctcttccactcctgctacaggtgtcttcttgaagtcctgggtctatcagccaggagaggacacagaggaggaggaagatgaggacagtgatacaggatcagccgaggatgaaagagaagctgagacttctgcttccacaccccctgcaagtgctttcttgaaggcctgggtgtatcggccaggagaggacacggaggaggaggaagatgaggatgtggatagtgaggataaggaagatgattcagaagcagccttgggagaagctgagtcagacccacatccctcccacccggaccagagggcccacttcaggggctggggatatcgacctggaaaagagacagaggaagaggaagctgctgaggactggggagaagctgagccctgccccttccgagtggccatctatgtacctggagagaagccaccgcctccctgggctcctcctaggctgcccctccgactgcaaaggcggctcaagcgcccagaaacccctactcatgatccggaccctgagactcccctaaaggccagaaaggtgcgcttctccgagaaggtcactgtccatttcctggctgtctgggcagggccggcccaggccgcccgccagggcccctgggagcagcttgctcgggatcgcagccgcttcgcacgccgcatcacccaggcccaggaggagctgagcccctgcctcacccctgctgcccgggccagagcctgggcacgcctcaggaacccacctttagcccccatccctgccctcacccagaccttgccttcctcctctgtcccttcgtccccagtccagaccacgcccttgagccaagctgtggccacaccttcccgctcgtctgctgctgcagcggctgccctggacctcagtgggaggcgtggctgagaccaactggtttgcctataatttattaactatttattttttctaagtgtgggtttatataaggaataaagccttttgatttgt

SEQ ID NO: 549 - protein, 674 aa, Homo sapiens
  ref <308>: DATABASE ACCESSION NUMBER: Refseq / XP_009097
  ref <309>: DATABASE ENTRY DATE: 2002-08-01
MAPGQAPHQATPWRDAHPFFLLSPVMGLLSRAWSRLRGLGPLEPWLVEAVKGAALVEAGLEGEARTPLAIPHTPWGRRPEEEAEDSGGPGEDRETLGLKTSSSLPEAWGLLDDDDGMYGEREATSVPRGQGSQFADGQRAPLSPSLLIRTLQGSDKNPGEEKAEEEGVAEEEGVNKFSYPPSHRECCPAVEEEDDEEAVKKEAHRTSTSALSPGSKPSTWVSCPGEEENQATEDKRTERSKGARKTSVSPRSSGSDPRSWEYRSGEASEEKEEKAHKETGKGEAAPGPQSSAPAQRPQLKSWWCQPSDEEEGEVKALGAAEKDGEAECPPCIPPPSAFLKAWVYWPGEDTEEEEDEEEDEDSDSGSDEEEGEAEASSSTPATGVFLKSWVYQPGEDTEEEEDEDSDTGSAEDEREAETSASTPPASAFLKAWVYRPGEDTEEEEDEDVDSEDKEDDSEAALGEAESDPHPSHPDQRAHFRGWGYRPGKETEEEEAAEDWGEAEPCPFRVAIYVPGEKPPPPWAPPRLPLRLQRRLKRPETPTHDPDPETPLKARKVRFSEKVTVHFLAVWAGPAQAARQGPWEQLARDRSRFARRITQAQEELSPCLTPAARARAWARLRNPPLAPIPALTQTLPSSSVPSSPVQTTPLSQAVATPSRSSAAAAAALDLSGRRG

SEQ ID NO: 550 - DNA, 2225 bp, Rattus norvegicus; identical to SEQ ID NO: 546
  ref <308>: DATABASE ACCESSION NUMBER: EMBL / AF020618
  ref <309>: DATABASE ENTRY DATE: 1998-07-02

SEQ ID NO: 551 - protein, 457 aa, Rattus norvegicus; identical to SEQ ID NO: 547
  ref <308>: DATABASE ACCESSION NUMBER: SWISS-Prot / AAC24980
  ref <309>: DATABASE ENTRY DATE: 2000-05-01

SEQ ID NO: 552 - DNA, 2331 bp, Homo sapiens; identical to SEQ ID NO: 548
  ref <308>: DATABASE ACCESSION NUMBER: Refseq / XM_009097
  ref <309>: DATABASE ENTRY DATE: 2002-08-01

SEQ ID NO: 553 - protein, 674 aa, Homo sapiens; identical to SEQ ID NO: 549
  ref <308>: DATABASE ACCESSION NUMBER: Refseq / XP_009097
  ref <309>: DATABASE ENTRY DATE: 2002-08-01

SEQ ID NO: 554 - DNA, 1278 bp, Rattus norvegicus
  ref <308>: DATABASE ACCESSION NUMBER: EMBL / AF020712
  ref <309>: DATABASE ENTRY DATE: 1999-02-04
atctgtttcccaggagactctggaaaacgcaggggcagagtccccaacagcagctgagggctcgaagagactaggtacctgcttgtggagttttttgtcccggagcaagctgtgtgctcagacttgaccatgtttgggcatggaggctcaacccagatggaactgaagactgcttccctagagaccaactggagaccaaacttcctgctagagctccaaggcctgacttggggtgggggggtgggggccagtggagagaaaccatctgccagcggagacccagggaactaaatgactgttgcctcctgtggccatggggaagaagctggtgatggcccagaagcgcggagagactcgagccctctgcctgggggtggcgatggtcgtgtgtgccgccatcacttactacatcctgggtaccactgtgctgcccctctaccagaaaagtgtgtggacccaggaatccacctgtcacttggttgaaaccaacatcaaggaccaggaagagctggagggcaggaaggtgccccagtacccatgcctttgggtcaatgtatcagctgtgggcagatgggccatgctgtatcacacagaagacactcgggatcaaaaccaacagtgctcctatatccccaggaacctggacaactaccagacagccttggttgatgtgaagaaggtcagagccaatttctacaaacaccataatttctattgcttttctgcacctcaagtcaatgagaccagtgttgtgtaccagcgcctctatgggccccaaatcctcctcttctccttcttctggcccaccttcctgctgactggtggccttcttatcattgccatggtaaagctcaacaggtccctctctgtcttggcagctcagaagtagaccaatctcttctgcacagcagcatggagtcaccaggaacggcaggggtcccgggcaggcataattctcttcctcttgtcctccatttaatttgttcaacctctttggacaatcatttcttgctcaagaatgtttaacagctctctccggttgacttcgaagggcaaaggaactgccagtcacagctctcgatccccggcttcagttggctcacatctgttacctgctatgtcactgtctactcccaagacgatgaatatcgtcacctctgtccctatgtgctctctcttagttcctcagatacccacctttgacatccaggatgctgtccttggccaaattcagcttctttgaattgtcataaaagccatagctctcaaaaaaaaaaa

SEQ ID NO: 555 - protein, 191 aa, Rattus norvegicus
  ref <308>: DATABASE ACCESSION NUMBER: SWISS-Prot / AAD11858
  ref <309>: DATABASE ENTRY DATE: 2002-06-01
MGKKLVMAQKRGETRALCLGVAMVVCAAITYYILGTTVLPLYQKSVWTQESTCHLVETNIKDQEELEGRKVPQYPCLWVNVSAVGRWAMLYHTEDTRDQNQQCSYIPRNLDNYQTALVDVKKVRANFYKHHNFYCFSAPQVNETSVVYQRLYGPQILLFSFFWPTFLLTGGLLIIAMVKLNRSLSVLAAQK

SEQ ID NO: 556 - DNA, 1277 bp, Homo sapiens
  ref <308>: DATABASE ACCESSION NUMBER: Refseq / NM_004137
  ref <309>: DATABASE ENTRY DATE: 2002-11-27
aagctgcttccctggagacgggcggggaggccaaacttcctgctgaagctctgtggcctcttttggggtgggggcgggggtccaggcagaaagaaactgtctgctgctcaagacccacaggacgcccggaagactaaatgatcactgcccccagtgaatatggtgaagaagctggtgatggcccagaagcggggagagacacgagccctttgcctgggtgtaaccatggtggtgtgtgccgtcatcacctactacatcctggtcacgactgtgctgcccctctaccagaaaagcgtgtggacccaggaatccaagtgccacctgattgagaccaacatcagggaccaggaggagctgaagggcaagaaggtgccccagtacccatgcctgtgggtcaacgtgtcagctgccggcaggtgggctgtgctgtaccacacggaggacactcgggaccagaaccagcagtgctcctacatcccaggcagcgtggacaattaccagacggcccgggccgacgtggagaaggtcagagccaaattccaagagcagcaggtcttctactgcttctccgcacctcgggggaacgaaaccagcgtcctattccagcgcctctacgggccccaggccctcctcttctccctcttctggcccaccttcctgctgaccggtggcctcctcattatcgccatggtgaagagcaaccagtacctgtccatcctggcggcccagaagtagagccatccatccatgccataccacttgtcagggcacaggggactggctgggcccccagggctgctccccacttgcagcacaatgccttctccacctgccctcccactcttccagtccaatccacgctgtcttctgttgcaggactaacctttgagaaatccttttgtgaagtcattgcctgctcaagaatgtacagtggctccccaatgccttggaggccataaggccagccagttctagctctctattacctgtccccactcaactgactcatacctgtttccggctgcatcactatgtgccccacagagaacgatgatcgtcacctctgtgcctgagttctccctgttgtctcaaagcggtacccatcctcccccagaagctgtccccagcgagcctcccttctttgtttgaattctctaataagagcaacagcagctcccatttctagaacacatttacagtattactattttctaggatataaagtgccatatatatttttaattccaatattaataaatgtatgccaaacaacaata

SEQ ID NO: 557 - protein, 190 aa, Homo sapiens
  ref <308>: DATABASE ACCESSION NUMBER: SWISS-Prot / Q16558
  ref <309>: DATABASE ENTRY DATE: 1998-12-15
VKKLVMAQKRGETRALCLGVTMVVCAVITYYILVTTVLPLYQKSVWTQESKCHLIETNIRDQEELKGKKVPQYPCLWVNVSAAGRWAVLYHTEDTRDQNQQCSYIPGSVDNYQTARADVEKVRAKFQEQQVFYCFSAPRGNETSVLFQRLYGPQALLFSLFWPTFLLTGGLLIIAMVKSNQYLSILAAQK

SEQ ID NO: 558 - DNA, 8942 bp, Rattus norvegicus
  ref <308>: DATABASE ACCESSION NUMBER: EMBL / AF021923
  ref <309>: DATABASE ENTRY DATE: 1998-06-11
gtggtgatagtttcctgtgaagagtaaagattcccaattgtagaagagccccataagcaccatccactgggaagcaaggagcagcatgacagagccgtctgtgtgagtctgaagtgtgaagaccaccatatccaccagaagatccaagatggatctccatcaaagcgccacagtcaggctcctgcaggaatggtgttcccatgagtcaccatctggctgcaggagacattataataccaggaaaaaactgaagctaattcgagtcattggccttgtcatgggcctggtagccgtgagcactgtcccgttttcaatcagtgcctttactgagacatactctcagaacaacagaggagaagccagtgatgtgacgggccctagggcagcacccggtcaccgtcaaagaactctcttagacttaaatgacaagattcgagattacaccccacagccacctgcttctcaggaagaccgatctgagaacggtactgatcacgcccagggagactacccaaaggatgtcttttccctggaggagcgaaggaaaggtgccatcattctccatgtcatcggaatgatctatatgttcatagccttagccatcgtctgtgatgagttctttgttccttctctaactgtcatcactgaaaaactgggaatctctgatgatgtggccggagccaccttcatggccgcaggcgggtcagccccagaacttttcacatctctcataggggttttcattgcgcacagcaacgtgggcattggcaccatcgtaggttccgccgtgttcaatatcctctttgttattggcatgtgtgctctgttttctagagaaatcttaaacctgacctggtggccgctctttcgggatgtgtccttctacatcgttgatttgatcatgttgatcatatttttcctggataacgttatcatgtggtgggaaagcttactcctcttaacagcttatttcgcctatgtggttttcatgaagttcaacgtccaagtagagagatgggtgaagcaaatgataaatcgcaataaagttgtcaaggtgacagtgtcagaagcccaagccaaggcatctacagctggggacaaggaagagccgacgttaccgaataagccgcgcctccagcgaggtggaagctctgcttccctccacaacagtctcatgaggaacagcatcttccagctcatgatacacacccttgacccactcgctgaagaacttggatcatatggaaaactaaaatattatgacacaatgactgaagaagggaggttcagagaaaaagcttcaattctccacaagattgccaagaagaaatgccaagtggatgagaatgagaggcaaaatggagctgccaatcatgtggattatgccgcagaaaaaattgagctccccaacagcacgagcacagaggtggaaatgactccatcaagcgaagcttcagaacctgtgcagaatggaaacctctctcacagcatcgaagctgcagacgccccgcaggccacagagaccgccgaggaagatgatgaccagcccctcagcctgtcctggccgtccaacacccgcaagcagatcaccttcctaatcgttcttcccatcgtgttccctctctggatcaccttacccgacgtccgcaaacctgcttccaagaagttcttccctatcacgttcttcggctccatcacctggatcgcagttttctcgtacctgatggtgtggtgggcacaccaggttggagagacaatcggcattagtgaggagatcatgggcctcaccatcttggcagctggaacctctatccccgatctcatcaccagtgtcatagtggcccgaaagggcctgggggacatggctgtgtccagctccgttggaagcaacatctttgacatcactgtggggctcccactgccctggctcctctacaccatcatccacagattcaagccagtgactgtcagcagcaatggcctcttctgtgccatcgtcctcctcttcatcatgttgatttttgtcatcctctccatcgccctctgcaagtggcggatgaacaaaatcctcggcttcatcatgtttggcctctacttcgcgttcctggtggtcagcgtcctcctggaagacaaagttctcgagtgccctgtctccatctagtggaaaagccatatcttaaaccaacagcatggatggtccctcccggctctgggctccaggctccttgcagtcttgagaagaggcaacttgtgcacagccctgggaggcaagtgtccctccttgaaaggttggaggaaggatggattcccacggggccactcacttcacaggcccctcacccttgcctgctgaaatgactccgtgttagagacaaagaggaccgtctctccatccccactgacaggtactcctcgctggtcagaggtacgttcattgtgatgacgcgaaagaggacagaggccatacatacatataaatattataaatatatacacatgagcatacagatcttgcctgtttctgtactatacctctcctcctatacctatagattaatacataactgtacacaaacagaaagaaaaattatatatatatataaaaacatatatatttaagtgcaaatgcatcttttcagggatagctctagtatatttatagtacctatttgaagaggggcatcaaccttcaaccttcagtttgtgctttgcccctcgagtgcaaaagctgagttaacagaatcagtaggcaaagcgctccttgctgtgatctctagcctgctttggatggaataagtttagtgaaatactttgcagaaaggagagcttaatagagggagtccgtaggagccccagttagaacctctaaaatactctcacaagccaaaaagaatcaccctgctcatccccactggggcgctctgacacccccaggattccgtaagacagaggtaaaactcagactgactgacaaccagggggcggggagggtgcggcatctgttgagggttaggctgtcttgttttgttttgttttgttgtaataccccagcatgcaagtagatgatatgaatgaaaaaccaaattagtgattttctaggacagcaaaattatataaaccgagcctatcatgttccagtgcatggcccattatcatcaaacgaacaagggcaatcttagccgtgattgtcatttgacaagctttaatgccaagggctcccacacagtccaaagtcctgccaagagtgctgagatgtgtgctgagaaacaccatccagcagaggtgctcagtgggggtggccacccgatgggaacatagggcatagctccttagagcacttctcagtgtggtcacaaagggctgcaatgtctaaggatcattcccaatagagctgaactaaggaatgacagtgcttgattgaggcagttcaggtttgtttgcagagacatttagccggtttgtgtgtacctcaccccacccccagaacagtttccaagtcctgtgtcacggatttggtctgtagactcatgcaacatctgtatcccgcctctatcatagccccgcctggacctgtagcatcccaagcacagtggagactatatatcttccatcatttctttacattactttgaagcagtcactcatatcttgatcagcttcacatgggggtaatctcactcatggagtgtccctaagctctgaatgacttcaaagctcttgtctgactccctaagcccttgtgtgatttctcgggttcatttcagtagaaaatgggactggttggcagcaagttaaattggagaaaaaaaatgtgccgagtttttcttttccctaaaccatgctttctccttaaaatcaactgaaaaagtgaataaagggtggccacctgcatgtaaatcggcacacgtcatacacagagaatgtcaccacgcattcacatcctgatctggcactacgccttttctgactgtcgtgaacaccccttaacacagggaggcaggacacagagctcagagctgaataaaaaggttgggtaacccaataccccagcccaagttcagcattccatctacaaacaccccatttacagagcatggcaacaggaggcagagccaagccccatcacctctcttcactcacaagcaaaaggcacttcaaagtggaggccccctgaggacacgagaaataaaaaggtccgcctggctttcaagtctctccaacaatgcagagttgggttttcaatggtgaaagagaaatccatgccccatttatcaagggttgaactttgtatggggcaagcgtttgtgttgcttccttacagagaaagacaaagggaaagtgagttttcagttttcaaatctcagattcttgtcccggctgctcgggcaagagcccaatgattgttggataaattctttttcctgattggtttattgcttaaaacggattttttttaaaccaactacaaacagactgtaaagtaaaaaagatcacagaatgtatgctcctaccgttactatcccctcctcaccaaaaagccaggaagcactccagatgcctaagagctgagagctctgcttcatagggagggttgtggtctttaacaacattcccaaagccagtccccacctccacggtgttccccctccctgagaggtgcaggtcccagccgctgctggttcttgctgcctttgttgaggagtgtgtggctatgtggccatatgttgtcctggaatcattcacatcattgtaaaactgcttcctacaggatagattcagatcatttctaatttctctcttgcacatcagtgtgcgcaagtgtactagatctgctggcacacaaatatcaatgccgccatcaccttattggcccacccagtcacatttggaatcccaaagcacagagtatcaaatttgacagtcaagaaagagaaaactcgtgcacaccaaccaaagtgaacatctatgaaaaaaaagggggttagttttattctgtgcacatatacacacaaacattcacatttaaacactccaaccccacagaatattggaaatggcagctgtatccctaatgctttcagagaagcaaaagtatgcaacaagaggcaggggagacaaattttagattgctgtctccttgtttctctggagcagggtacaaaataatatcaaaagttcaagccaaaattttaccactcctaaaataaaggaattgggcccaaatttgctcacagaaaaccaagccagtcttgcttgctgtcacctctcctatagcctcaggaaaccctgaaacaggagagaaacttggttcagattgaggattctaaagcagaaactcgtagatttgcatttgagagtgtccatgacacatccacctgccctctggacccagtcagttcctagtgggattgttggtgttgttcaagttctcaggaccgaaacatgccagacagagtcagcagggcagagaacatgtgcaggcgctcggggatggggctgttcctcagctcagcagatgatgcagaatgtctgaagcctcactttagtgtcatgaaaagaggcaaggaccgtctcatgatcaaggaaaccgctttgcagggcctctgacagaggccattggaatttattttgtagggaagacatgagtcaggtggcttggaggcctttcagcaaaacacagctgtctccatgacaagatttttggtaaccttaacatacatctgctcctggccagagagagttgatccacttcccttcaccaccacttcccacatcttttaaatgcctctgtgacttgagatgaagtgagatgtggcctgtaaaagaaggttgtccacacccagtccaccttaacagaaagatgatcacaaaagagacaactatcagagctgctggccagtcaggggggacgatggaacttgaagtgttctcttgagagaattgcactgaagatttgatagggtttgatgcctgcctgaatgaagcctgtcagagaatttcagtgagctttcatacaagcacacacacacacacacacacacacacacacaccacacacacacacatacacacacacacacacacacacacaccacacacacacacatacacacacacacacacacacacacacaccacacacacacacatacacacacacacacacacacacacacacacacacacctctgcatggacaggcatacgcacaaattatatccttccttgcacccagaaagattggggctccatcaagtagcatgttagagacagcaggtctgtcgcaggaaaagcatgctatagaaactttcaattagcagacaaggccttcccattaagagggagttggaagaaaaatataaaaatcaaaggggggagggaggagagaaaataacttattagtaatgggattcctaagaaagcaaccaaaatatatcatgatgttttaaagtggttacaaatagcagacatttttaaacaattactggagtctatacatagcctacatttgaaaagcacgtgtcaagaaggactcaggaaagaaaggtacctgtgccttgccccagtgtctgtctgagcttagtttactgcctttggatctttgtggtcctttttaatctcacagctttgtattccttgacatgtataagctaagaaaagcaataaaggaaatacagccagctcagatccaataccgattattgtaccttccagctatttccctcacgtcactgggcactttaggtccacagaggctatggtgccacagcaaggggacattggcttctgtgcagtcacagatgtgctcatgttcgctacatctggaagtagcttgcttcccacatagaccgcctagacagcatgcatccacatgcctttctcacacgtagacaatcaacctcgctttaaactacctaaacggcaccaaagtctttaatcttgctcatgagtctgttcttaggaaagggtgggagagagggccacacagacaaatgcatgacctggccaggctttgagagaccaacctagtcctgaaagtctaagcacccagactcgaattattgtacagagagggggactgaatggagaagtatggtgcttaagccaaagcacttttcctaaatgaccgatgggctgactggaaaattagtaaatacctaagggtgaaggaatgccgtggacttgcatggactcccaccagagactgattccactgggggaatctgtctgctggttaccatagtacaaaggaccacagatagtaagtcatcttggaatatcagcaaagagttcctagtgttaccaaggtcaatgtttaacactgacagaagagtccccatccagcttaaccccccaagaccctacagctgatgacttcaccctttttttgtttggttgatttggtttggtttggtttcgaacactttttgatcttacgcatgacaaggttgaaagttgccactctgggaccctacacctattttcttcagaagcatccctgaagtttttgtttgtttaggtgttttcttcagctttctcctcttcctcctcctcctcgtttttctcctcttccttttcttccttctgatgccattattcccacacagtgtaaagattcaaaagttctagacctttacccccaacagcacttttctgtgcatgactaatccccagaggagtcctttctagttgctactgaatggcaggcagaatccataaccacagaggtacataccttccaaggaccagtagacttgaaggcggtaccaatgggagttggttgtctggtgtcaagatgagcactggacacagtgttatcatagagttatggttaggtcaaggttgtagccttttttgtatcctgcatcttcgttccacatagtcaaaaaggaaacaggaaaggagccacattgaatcattccaagactctgggtttgtgcttgcctgcattgattattgggaggaagtcatttcaaatgggaggtcagagaaaggcttgggctcctcttgctatgagtcccacagtgcgattactttcgtatgcagtaggttgatagaaacagtgaggtcacttcctgacctgggaatctggtcaccaaaagatggggattttcccttcggttgcagtttcttcataatagatatgtaaataacggagccttggacactgacgggtctctagaactctctgctagccaaaaagatactaattttctcaaatcaagttacatacacacaaacaagaaaaaagcaaaatgtcagaatcccagaataaaatcatttccagaatgaaactgcatgtgtgaattaagggcagagaattcctcgccagttaacccaatgactctccgattcttaccatcaggataaaactgaaggacaaaggatgccttttgggttttttaatttttttaatattgcactttatagtatttcataagagacgattgtcttaattaaagccataaaataccaataatgcatatattcagggcttctggatatagtcaataaacagtccacgggtcattctgtgtgttgttcgttgtaaaatgaagtttatctgttctgttttttattacttaaactactgttctagacaatcctaaaaaattgtaggtgtgtattttaagcaaactttgaaaatcaaagaaattattcctttcatggaagaattcttcattttcaaagcaactcattgcatggtttctttaagtagcaagttccactattgcactgaaaatatttccttttacagaccctaagattatttttcaggaatccatttgctatgttaagcaagattcgcccacgtggagattgaaatagatgattagcaaacatgcctggaaaaattaggatgtgcttatgttcttagacccatcatatatttatataagaacataagcacatcctaatttttccaggcatgtttgctaatc

SEQ ID NO: 559 - protein, 670 aa, Rattus norvegicus
  ref <308>: DATABASE ACCESSION NUMBER: SWISS-Prot / O54701
  ref <309>: DATABASE ENTRY DATE: 2002-06-15
MDLHQSATVRLLQEWCSHESPSGCRRHYNTRKKLKLIRVIGLVMGLVAVSTVPFSISAFTETYSQNNRGEASDVTGPRAAPGHRQRTLLDLNDKIRDYTPQPPASQEDRSENGTDHAQGDYPKDVFSLEERRKGAIILHVIGMIYMFIALAIVCDEFFVPSLTVITEKLGISDDVAGATFMAAGGSAPELFTSLIGVFIAHSNVGIGTIVGSAVFNILFVIGMCALFSREILNLTWWPLFRDVSFYIVDLIMLIIFFLDNVIMWWESLLLLTAYFAYVVFMKFNVQVERWVKQMINRNKVVKVTVSEAQAKASTAGDKEEPTLPNKPRLQRGGSSASLHNSLMRNSIFQLMIHTLDPLAEELGSYGKLKYYDTMTEEGRFREKASILHKIAKKKCQVDENERQNGAANHVDYAAEKIELPNSTSTEVEMTPSSEASEPVQNGNLSHSIEAADAPQATETAEEDDDQPLSLSWPSNTRKQITFLIVLPIVFPLWITLPDVRKPASKKFFPITFFGSITWIAVFSYLMVWWAHQVGETIGISEEIMGLTILAAGTSIPDLITSVIVARKGLGDMAVSSSVGSNIFDITVGLPLPWLLYTIIHRFKPVTVSSNGLFCAIVLLFIMLIFVILSIALCKWRMNKILGFIMFGLYFAFLVVSVLLEDKVLECPVSI

SEQ ID NO: 560 - DNA, 2170 bp, Homo sapiens
  ref <308>: DATABASE ACCESSION NUMBER: EMBL / AF177987
  ref <309>: DATABASE ENTRY DATE: 2000-02-15
tgaaagaaccatctggttgagtctaaagttggaagatcaccatatccaccagaagacccaggatggatctgcaacaaagcaccaccatcacttccctagagaaatggtgtttggatgagtcactgtctggctgcagaagacattatagtgtcaagaaaaaactgaagttaattcgagtcttaggccttttcatgggtctggtagccattagcactgtctcattttcaatcagtgccttttctgagacagatacacagagcacaggagaggccagtgttgtaagtggccctagggtagcacagggttaccatcagagaactctcttagatttaaatgacaagattctggattatactccacagccacctctttctaaggaaggcgagtctgagaatagtacagatcacgcccaaggagactacccgaaagacatcttttcccttgaggagagaagaaaaggtgcgatcattctgcatgtcattggaatgatctacatgttcatagccttagccattgtctgtgatgagttctttgttccttctttgactgtcatcactgaaaaactgggcatctctgatgatgtggctggagccaccttcatggctgcaggagggtcagccccagaacttttcacatctctcataggggtatttatcgctcacagcaacgttggcataggcacaattgtaggttcagcagtattcaacatcctctttgttattggcatgtgtgctctgttttctagagaaatcttaaacctgacatggtggccgctctttcgagatgtgtctttctacattgttgacttgatcatgctgatcatatttttcctggataatgtcatcatgtggtgggaaagcttgcttctcttaacagcttatttttgctatgtggttttcatgaaattcaacgtccaagtagaaaaatgggtgaagcaaatgataaaccgcaataaggtcgtcaaggtgacagcaccagaagcccaagcaaagccatctgcagccagggacaaggatgaaccgactctaccggctaagccgcgtctccagcgaggtggaagctctgcctccctccacaacagtctcatgaggaatagcatcttccaactcatgatacacacccttgacccactcgccgaagggaggttcagagaaaaggcttcaattctccacaagatcgccaagaagaaatgtcatgtggatgagaacgagcggcagaatggggctgccaaccacgtggaaaaaattgagcttccaaacagcaccagcacagatgttgaaatgacaccatccagtgatgcttcagaacctgtacaaaatggaaatctctcccacaacattgaaggtgcagaagcccagaccgctgatgaggaggaggaccagcctctcagccttgcctggccttctgaaacccgcaagcaagtcacgtttctgattgttttccccatagtgtttcctctctggattacgttacctgacgttcgcaaaccttcatcgaggaagttttttcccatcacgttctttggctccattacctggattgcagtattctcttacttgatggtctggtgggcgcaccaggttggagagacaattggcatcagtgaagagattatgggcctgaccatcttggctgctgggacctccatccctgatcttatcaccagtgtcatagtggcccggaaggggttaggggacatggctgtgtccagctctgttggaagcaacatttttgacatcactgtagggctcccactgccctggctcctgtacaccgtcattcacagattccagccagtggctgtcagcagcaatggccttttctgtgccatcgtccttctcttcatcatgctgctcttcgtcatcctctctatcgccctctgcaagtggcgaatgaacaaaatcctgggcttcatcatgtttggcctctactttgtgttcctggtggtgagcgttctcctagaagacagaattcttacatgccccgtctccatctagcaggaaaagccatatcttgcaccagcagcatgaatggtccctccacactctgggctctgggctccttgacctcttgagaagaggcagctggcacacagccctgggtgccaagtgtccctccttggtgaatttgaggagagatggattcacactgggcccattcacttcacagg

SEQ ID NO: 561 - protein, 661 aa, Homo sapiens
  ref <308>: DATABASE ACCESSION NUMBER: SWISS-Prot / Q9UI40
  ref <309>: DATABASE ENTRY DATE: 2002-06-15
MDLQQSTTITSLEKWCLDESLSGCRRHYSVKKKLKLIRVLGLFMGLVAISTVSFSISAFSETDTQSTGEASVVSGPRVAQGYHQRTLLDLNDKILDYTPQPPLSKEGESENSTDHAQGDYPKDIFSLEERRKGAIILHVIGMIYMFIALAIVCDEFFVPSLTVITEKLGISDDVAGATFMAAGGSAPELFTSLIGVFIAHSNVGIGTIVGSAVFNILFVIGMCALFSREILNLTWWPLFRDVSFYIVDLIMLIIFFLDNVIMWWESLLLLTAYFCYVVFMKFNVQVEKWVKQMINRNKVVKVTAPEAQAKPSAARDKDEPTLPAKPRLQRGGSSASLHNSLMRNSIFQLMIHTLDPLAEELGSYGKLKYYDTMTEEGRFREKASILHKIAKKKCHVDENERQNGAANHVEKIELPNSTSTDVEMTPSSDASEPVQNGNLSHNIEGAEAQTADEEEDQPLSLAWPSETRKQVTFLIVFPIVFPLWITLPDVRKPSSRKFFPITFFGSITWIAVFSYLMVWWAHQVGETIGISEEIMGLTILAAGTSIPDLITSVIVARKGLGDMAVSSSVGSNIFDITVGLPLPWLLYTVIHRFQPVAVSSNGLFCAIVLLFIMLLFVILSIALCKWRMNKILGFIMFGLYFVFLVVSVLLEDRILTCPVSI

SEQ ID NO: 562 - DNA, 1307 bp, Rattus norvegicus
  ref <308>: DATABASE ACCESSION NUMBER: EMBL / AF022742
  ref <309>: DATABASE ENTRY DATE: 2000-03-03
ccctgatctctgaaccatacaacacttgcacgacattctcaagcaactagataggtctggccttggcgatgcctgcccaagatcaggggattgctgtccagatgtcagaatggagaagaatggagaaggctttgaggttattagaccactccatcctcttgctgccctagtataatttccggcctcttctaaggtcatttgggacccaacccctctgctagtcacagcagccaggcttcctgagctcccatcagggatctagctaatccttctcagagtcttgcaagtttcagacacaccctctaccagactcttcctttttttcccccctgccccaactaccaggccatcctccaaactctggtagcatctatagggaagtgtgtgtgtacgtgtgcgtttgcttgtgtacgtgtgtagaggtttaaagacaggctacccgtgggctataccggagagtctgggacgggaactgtcgacttgctgacacaattcagttctgtggtggcgcctgcaggccacgccctagggcctccctacgcccggacagtgtttttaactcttcgcacagaggtgatcccaggctggagggcgggcacaaggcgtccggagaacccagtaatccgagaacgcagcatcagcccttcccactaggcacttccttccttttcccgaacctccagagagggagggccgcgcatttataaactggagcctcagctgagtggcatgtcagaggctgcctcgcagggactacgaacctgggctagaaaagtctaggctgagacagaggctaactgctgtcgccgcagacgtacgaaccctctgccgggactgggtgcctgcaccatcgcagtgctagcgtttctcgtagcttgcacggtgttctcctgaacagcatgcttggggttttccttctgggtgtgctggctccagctggcctggggatctctgcactagccaagctgcagcccaaaggcagtcaatgcgtggggaatgagtgcttcgcgcttttccaggaccccgtgaccttcctcgatgccagccaggcctgccagcgcctgcagggacatttgatgacagtgcgctcctcggtggctgcggatgtcatctcccttctggtgagcgacagtagtatggactcacggccctggatcggtttacagctccctcagggctgtggtgacccggtgcatctcgggcccctgcgcggcttccagtgggttactggggataaccacaccagttacagcaggtgggcgcggcccaacgaccagtcgcctccactttgcggtccgctgtgcgtc

SEQ ID NO: 563 - protein, 577 aa, Rattus norvegicus
  ref <308>: DATABASE ACCESSION NUMBER: SWISS-Prot / AAB80923
  ref <309>: DATABASE ENTRY DATE: 2003-02-01
MLGVFLLGVLAPAGLGISALAKLQPKGSQCVGNECFALFQDPVTFLDASQACQRLQGHLMTVRSSVAADVISLLVSDSSMDSRPWIGLQLPQGCGDPVHLGPLRGFQWVTGDNHTSYSRWARPNDQSPPLCGPLCVTVSTATEAAPGEPAWEEKPCENETKGFLCEFYFAAFCRPLRVNTRDPEGAHISSTYNTPLGVSGADFQTLPIGSSATVAPFGLELVCRALPGTSEGHWTREVTGAWNCSVENGGCEYMCNRSANGPRCVCPSGGDLQADGRSCAKPVAQLCNELCQHFCVNNSDVPGSYSCMCETGYQLAADGHRCEDVDDCKQGPNPCPQLCSNTEGGFECRCYDGYELVDGECVEQLDPCFRSKCEYQCQPVNSTHYNCICAEGFAPKLDDPDRCEMFCNETSCPADCDPNSPSFCQCPEGFILDEGSICTDIDECSQGECLTNECRNLPGSYECICGPDTALAGQISKDCDPIPVLEDSEDGGSGEHPSSNPTVVSSTVPPSARPMHSGVLIGISIASLSLVVALLALLCHLRKKQGTARAELEYKCTSSAKEVVLQHVRTDRTLQKF

SEQ ID NO: 564 - DNA, 3466 bp, Homo sapiens
  ref <308>: DATABASE ACCESSION NUMBER: EMBL / X05495
  ref <309>: DATABASE ENTRY DATE: 1995-03-21
caggggctgcgcgcagcggcaagaagtgtctgggctgggacggacaggagaggctgtcgccatcggcgtcctgtgcccctctgctccggcacggccctgtcgcagtgcccgcgctttccccggcgcctgcacgcggcgcgcctgggtaacatgcttggggtcctggtccttggcgcgctggccctggccggcctggggttccccgcacccgcagagccgcagccgggtggcagccagtgcgtcgagcacgactgcttcgcgctctacccgggccccgcgaccttcctcaatgccagtcagatctgcgacggactgcggggccacctaatgacagtgcgctcctcggtggctgccgatgtcatttccttgctactgaacggcgacggcggcgttggccgccggcgcctctggatcggcctgcagctgccacccggctgcggcgaccccaagcgcctcgggcccctgcgcggcttccagtgggttacgggagacaacaacaccagctatagcaggtgggcacggctcgacctcaatggggctcccctctgcggcccgttgtgcgtcgctgtctccgctgctgaggccactgtgcccagcgagccgatctgggaggagcagcagtgcgaagtgaaggccgatggcttcctctgcgagttccacttcccagccacctgcaggccactggctgtggagcccggcgccgcggctgccgccgtctcgatcacctacggcaccccgttcgcggcccgcggagcggacttccaggcgctgccggtgggcagctccgccgcggtggctcccctcggcttacagctaatgtgcaccgcgccgcccggagcggtccaggggcactgggccagggaggcgccgggcgcttgggactgcagcgtggagaacggcggctgcgagcacgcgtgcaatgcgatccctggggctccccgctgccagtgcccagccggcgccgccctgcaggcagacgggcgctcctgcaccgcatccgcgacgcagtcctgcaacgacctctgcgagcacttctgcgttcccaaccccgaccagccgggctcctactcgtgcatgtgcgagaccggctaccggctggcggccgaccaacaccggtgcgaggacgtggatgactgcatactggagcccagtccgtgtccgcagcgctgtgtcaacacacagggtggcttcgagtgccactgctaccctaactacgacctggtggacggcgagtgtgtggagcccgtggacccgtgcttcagagccaactgcgagtaccagtgccagcccctgaaccaaactagctacctctgcgtctgcgccgagggcttcgcgcccattccccacgagccgcacaggtgccagatgttttgcaaccagactgcctgtccagccgactgcgaccccaacacccaggctagctgtgagtgccctgaaggctacatcctggacgacggtttcatctgcacggacatcgacgagtgcgaaaacggcggcttctgctccggggtgtgccacaacctccccggtaccttcgagtgcatctgcgggcccgactcggcccttgtccgccacattggcaccgactgtgactccggcaaggtggacggtggcgacagcggctctggcgagcccccgcccagcccgacgcccggctccaccttgactcctccggccgtggggctcgtgcattcgggcttgctcataggcatctccatcgcgagcctgtgcctggtggtggcgcttttggcgctcctctgccacctgcgcaagaagcagggcgccgccagggccaagatggagtacaagtgcgcggccccttccaaggaggtagtgctgcagcacgtgcggaccgagcggacgccgcagagactctgagcggcctccgtccaggagcctggctccgtccaggagcctgtgcctcctcacccccagctttgctaccaaagcaccttagctggcattacagctggagaagaccctccccgcaccccccaagctgttttcttctattccatggctaactggcgagggggtgattagagggaggagaatgagcctcggcctcttccgtgacgtcactggaccactgggcaatgatggcaattttgtaacgaagacacagactgcgatttgtcccaggtcctcactaccgggcgcaggagggtgagcgttattggtcggcagccttctgggcagaccttgacctcgtgggctagggatgactaaaatatttattttttttaagtatttaggtttttgtttgtttcctttgttcttacctgtatgtctccagtatccactttgcacagctctccggtctctctctctctacaaactcccacttgtcatgtgacaggtaaactatcttggtgaatttttttttcctagccctctcacatttatgaagcaagccccacttattccccattcttcctagttttctcctcccaggaactgggccaactcacctgagtcaccctacctgtgcctgaccctacttcttttgctcttagctgtctgctcagacagaacccctacatgaaacagaaacaaaaacactaaaaataaaaatggccatttgctttttcaccagatttgctaatttatcctgaaatttcagattcccagagcaaaataattttaaacaaaggttgagatgtaaaaggtattaaattgatgttgctggactgtcatagaaattacacccaaagaggtatttatctttacttttaaacagtgagcctgaattttgttgctgttttgatttgtactgaaaaatggtaattgttgctaatcttcttatgcaatttccttttttgttattattacttatttttgacagtgttgaaaatgttcagaaggttgctctagattgcgagaagagacaaacacctcccaggagacagttcaagaaagcttcaaactgcatgattcatgccaattagcaattgactgtcactgttccttgtcactggtagaccaaaataaaaccgactctactggtcttgtggaattgggagcttgggaatggatcctggaggatgcccaattagggcctagccttaatcaggtcctcagagaatttctaccatttcagagaggccttttggaatgtggcccctgaacaagaattggaagctgccctgcccatgggagctggttagaaatgcagaatcctaggctccaccccatccagttcatgagaatctatatttaacaagatctgcagggggtgtgtctgctcagtaatttgaggacaaccattccagactgcttccaattttctggaatacatgaaatatagatcagttataagtagcaggccaagtcaggcccttattttcaagaaactgaggaattttctttgtgtagctttgctctttggtagaaaaggctaggtacacagctctagacactgccacacagggtctgcaaggtctttggttcagctaagccggaattc

SEQ ID NO: 565 - protein, 575 aa, Homo sapiens
  ref <308>: DATABASE ACCESSION NUMBER: SWISS-Prot / P07204
  ref <309>: DATABASE ENTRY DATE: 2002-06-15
MLGVLVLGALALAGLGFPAPAEPQPGGSQCVEHDCFALYPGPATFLNASQICDGLRGHLMTVRSSVAADVISLLLNGDGGVGRRRLWIGLQLPPGCGDPKRLGPLRGFQWVTGDNNTSYSRWARLDLNGAPLCGPLCVAVSAAEATVPSEPIWEEQQCEVKADGFLCEFHFPATCRPLAVEPGAAAAAVSITYGTPFAARGADFQALPVGSSAAVAPLGLQLMCTAPPGAVQGHWAREAPGAWDCSVENGGCEHACNAIPGAPRCQCPAGAALQADGRSCTASATQSCNDLCEHFCVPNPDQPGSYSCMCETGYRLAADQHRCEDVDDCILEPSPCPQRCVNTQGGFECHCYPNYDLVDGECVEPVDPCFRANCEYQCQPLNQTSYLCVCAEGFAPIPHEPHRCQMFCNQTACPADCDPNTQASCECPEGYILDDGFICTDIDECENGGFCSGVCHNLPGTFECICGPDSALARHIGTDCDSGKVDGGDSGSGEPPPSPTPGSTLTPPAVGLVHSGLLIGISIASLCLVVALLALLCHLRKKQGAARAKMEYKCAAPSKEVVLQHVRTERTPQRL

SEQ ID NO: 566 - DNA, 1582 bp, Rattus norvegicus
  ref <308>: DATABASE ACCESSION NUMBER: EMBL / AF022819
  ref <309>: DATABASE ENTRY DATE: 1999-01-28
gaaagggagcggcggcgggaggcgcggagcgcgggcgccgggaagatgctgcagtccctggccggcagctcgtgcgtgcgcctggtggagcggcaccgctcggcctggtgcttcggcttcctggtgctgggctacctgctctacctggtgttcggcgccgtggtcttctcgtccgtggagctgccttatgaggacctgctgcgccaggagctgcgcaagctgaagcggcgcttcctggaggagcacgagtgcctgtcggagccccagctggagcagttcctgggccgcgtgctggaggccagcaattatggagtgtcggtgctcagcaacgcctcggggaattggaattgggacttcacctcggcgctcttcttcgccagcacggtgctctccaccacaggctatggccacacggtgcccttgtcagatgggggcaaggccttctgcatcatctactctgtcattggcatcccgttcaccctcctcttcctgacggccgtggtccagcgtgtcaccgtgcatgtcacccgcagaccggtcctctacttccacatacgctggggcttctccaagcaggtggtggccatcgtccatgccgttctgctgggattcgtcaccgtgtcctgcttcttcttcatcccggccgccgtgttctccgtgctggaggatgactggaacttcctcgaatctttttacttctgtttcatctccctgagcaccatcggcctgggggactacgttccaggggaaggctacaaccagaagttccgggagctgtacaagatcgggatcacgtgttacctgctcctgggactcatagccatgctggttgtcctggaaaccttctgtgagctccacgagctgaagaaattcaggaaaatgttctatgtgaagaaagacaaggatgaagaccaagttcacatcatggagcatgaccaactgtccttttcctccatcactgagcaggcggccggcctgaaggaggagcagaagcaaaacgagccttttgtggcctcccagtcaccaccctatgaggatggctctgcaaaccattgagcatgggtcaccagaccccggacatgaggcagagcctagactgtgttcatttttacgagaaagtcaaagctaagatgatgttattttaagaaatatctactgttaacaatattttaaaaacacggaactttggatcctgggggagtgggttttaatctctgggcaaatgaggtgtgcacccataactcacaggcaatgtgatcacctgacatcatgcagctgtaactcacaggcgatgtcatcacctggcatcctgcacctgtaactcacaggtgatgtcatcgcctggcatcctgcacctgtaactcacaggtgatattatcacctggcatcctgcacctgtaactcacaggtgatgtcatcacctggcatcctgcacttgtaactcacaggttgatgtcatcgcctggcatcctgcacctgtaactccacagttgatgtcatcacctgggcattacacactggggaagaaatacttgaaacatgttactgcaccggaaatcccattctaaaaccaaacttacta

SEQ ID NO: 567 - protein, 336 aa, Rattus norvegicus
  ref <308>: DATABASE ACCESSION NUMBER: SWISS-Prot / AAD09336
  ref <309>: DATABASE ENTRY DATE: 2003-02-01
MLQSLAGSSCVRLVERHRSAWCFGFLVLGYLLYLVFGAVVFSSVELPYEDLLRQELRKLKRRFLEEHECLSEPQLEQFLGRVLEASNYGVSVLSNASGNWNWDFTSALFFASTVLSTTGYGHTVPLSDGGKAFCIIYSVIGIPFTLLFLTAVVQRVTVHVTRRPVLYFHIRWGFSKQVVAIVHAVLLGFVTVSCFFFIPAAVFSVLEDDWNFLESFYFCFISLSTIGLGDYVPGEGYNQKFRELYKIGITCYLLLGLIAMLVVLETFCELHELKKFRKMFYVKKDKDEDQVHIMEHDQLSFSSITEQAAGLKEEQKQNEPFVASQSPPYEDGSANH

SEQ ID NO: 568 - DNA, 1882 bp, Homo sapiens
  ref <308>: DATABASE ACCESSION NUMBER: EMBL / U33632
  ref <309>: DATABASE ENTRY DATE: 1999-07-02
gggcaggaagacggcgctgcccggaggagcggggcgggcgggcgcgcgggggagcgggcggcgggcgggagccaggcccgggcgggggcgggggcggcggggccagaagaggcggcgggccgcgctccggccggtctgcggcgttggccttggctttggctttggcggcggcggtggagaagatgctgcagtccctggccggcagctcgtgcgtgcgcctggtggagcggcaccgctcggcctggtgcttcggcttcctggtgctgggctacttgctctacctggtcttcggcgcagtggtcttctcctcggtggagctgccctatgaggacctgctgcgccaggagctgcgcaagctgaagcgacgcttcttggaggagcacgagtgcctgtctgagcagcagctggagcagttcctgggccgggtgctggaggccagcaactacggcgtgtcggtgctcagcaacgcctcgggcaactggaactgggacttcacctccgcgctcttcttcgccagcaccgtgctctccaccacaggttatggccacaccgtgcccttgtcagatggaggtaaggccttctgcatcatctactccgtcattggcattcccttcaccctcctgttcctgacggctgtggtccagcgcatcaccgtgcacgtcacccgcaggccggtcctctacttccacatccgctggggcttctccaagcaggtggtggccatcgtccatgccgtgctccttgggtttgtcactgtgtcctgcttcttcttcatcccggccgctgtcttctcagtcctggaggatgactggaacttcctggaatccttttatttttgttttatttccctgagcaccattggcctgggggattatgtgcctggggaaggctacaatcaaaaattcagagagctctataagattgggatcacgtgttacctgctacttggccttattgccatgttggtagttctggaaaccttctgtgaactccatgagctgaaaaaattcagaaaaatgttctatgtgaagaaggacaaggacgaggatcaggtgcacatcatagagcatgaccaactgtccttctcctcgatcacagaccaggcagctggcatgaaagaggaccagaagcaaaatgagccttttgtggccacccagtcatctgcctgcgtggatggccctgcaaaccattgagcgtaggatttgttgcattatgctagagcaccagggtcagggtgcaaggaagaggcttaagtatgttcatttttatcagaatgcaaaagcgaaaattatgtcactttaagaaatagctactgtttgcaatgtcttattaaaaaacaacaaaaaaagacacatggaacaaagaagctgtgaccccagcaggatgtctaatatgtgaggaaatgagatgtccacctaaaattcatatgtgacaaaattatctcgaccttacataggaggagaatacttgaagcagtatgctgctgtggttagaagcagattttatacttttaactggaaactttggggtttgcatttagatcatttagctgatggctaaatagcaaaatttatatttagaagcaaaaaaaaaaagcatagagatgtgttttataaataggtttatgtgtactggtttgcatgtacccacccaaaatgattatttttggagaatctaagtcaaactcactatttataatgcataggtaaccattaactatgtacatataaagtataaatatgtttatattctgtacatatggtttaggtcaccagatcctagtgtagttctgaaactaagactatagatattttgtttcttttgatttctctttatactaaagaatccagagttgctacaataaaataaggggaataataaa

SEQ ID NO: 569 - protein, 336 aa, Homo sapiens
  ref <308>: DATABASE ACCESSION NUMBER: SWISS-Prot / O00180
  ref <309>: DATABASE ENTRY DATE: 2002-06-15
MLQSLAGSSCVRLVERHRSAWCFGFLVLGYLLYLVFGAVVFSSVELPYEDLLRQELRKLKRRFLEEHECLSEQQLEQFLGRVLEASNYGVSVLSNASGNWNWDFTSALFFASTVLSTTGYGHTVPLSDGGKAFCIIYSVIGIPFTLLFLTAVVQRITVHVTRRPVLYFHIRWGFSKQVVAIVHAVLLGFVTVSCFFFIPAAVFSVLEDDWNFLESFYFCFISLSTIGLGDYVPGEGYNQKFRELYKIGITCYLLLGLIAMLVVLETFCELHELKKFRKMFYVKKDKDEDQVHIIEHDQLSFSSITDQAAGMKEDQKQNEPFVATQSSACVDGPANH

SEQ ID NO: 570 - DNA, 2552 bp, Rattus norvegicus
  misc_feature (1)..(2552): n=a, c, g or t
  ref <308>: DATABASE ACCESSION NUMBER: EMBL / AF023657
  ref <309>: DATABASE ENTRY DATE: 1997-11-25
cgggttttggtgagggcattcatacagccttcctaaaggcaatgctctccacagggtttaagatacctcagtcggggccaggaaaaacatgggagccttaatggcaacatattcagaggggatgatgggttgttccagtgtgggtagatgcttctcatcaacactctctccgatcatcaccttggtggccacatcaatgaagtccaccccaagagtcttggaaaacaaagccgacttccaaaggagtgatcgaatcgacatggaaacaaacaccaaggatttgaaaggggctggtgtgactgtgcacccacccagagcctctgaggtgaacctggaagaactgcctccactgaactattttgtacatgcattttattacagttggtatggaaacccacagttcgatggtaaatacgtacactggaaccatccagtcctggaacactgggaccctagaatagccaagaactatccccaaggaagacatagtcctccagatgacattggctccagtttttatcctgagttaggaagttacagctcccgagacccttctgtcatagaaactcacatgaaacaaatgcgctcagcctccattggagtactggccctgtcttggtacccacctgatgcaagtgacgagaatggagaagctactgattacttggtaccaactattttggataaagctcataaatataatctgaaggtcacttttcacatagaaccatatagcaatcgagatgaccaaaacatgcatcaaaatgtgaagtatattatagacaagtatggaaaccatccagccttttataggtacaagaccaggatggggcattctctacccatgttttatatctatgattcttatatcacaaagcctaaaacatgggccaatctattaacaccctcaggatctcagagtgttcgcggttctccttatgatggcttgtttattgcacttctagtagaagaaaagcataaatacgatattcttcaaagtgggtttgatggaatttacacatattttgccacaaatggctttacatatggctcatctcatcagaattggaataaactgaaatcattttgtgaaaagaacaacatgatatttatcccaagtgttggcccaggatacatagatacaagcatccgtccatggaacactcagaacacccggaacagaatcaatgggaaatattatgaagttggactaagcgctgcactccagacccagcccagtttaatctccatcacctctttcaatgaatggcatgaagggactcaaatcgaaaaggctgtccccaaaagaactgctaacacggtatacctggattaccggcctcataagccaagtctttacctagaaataactcgaaaatggtctgaaaaatacagtaaggaaagaatgacgtatgcattggatcaacagctgcctgcttcataatgtacctcttatagtctgtcaagactcctagcttcagtcaacacactatattatgagctatgaaaactgtcaaaatcaatgtgtgcttgctactgtaacctttatcagttatttcatttttactttttaaaagattcatttttctacaatggacagtaccttacagaaacatctaacaagataagttctgtcagtaacattcctgatggtatagttttctgaatttcggactattattgaaatcttaatggagttgccttgtttttgtttcccattaagaaaatgattgtattacattacaaaaagcagctaacagctaatgttcaggtaagtcatacttgtattctgggtccaaagacataggagtatgtacatgttaggtacatctggcaacagaaagttcagacctaaaggacagtaagtgaatgtgcttcatttctggactctttggtgaagtttgttaatattcagagtctggttggcttcccctggtgatccagctcacttttcaagtttgttgtgaacacagacctgtttaagtaaaaagtccttttatcacatttttctgtttctgttagccatggtctgttgaagaatgcctgtgtaggcatccatcagtgtcagtgttcgaagactcgggtgcctatggtgctaagtgcttttgcatgttgaatgctcctggattgtcctgctgaactaaaaactagaaacaataggtagtttgttaaatgttcatgactgtttctaatatatgagaaaaataattgtttaagaatggttaaaatttaatgttcaccagagactactgaacggactttgaaaggataatgtttaatactccaaattgttttcccttcaatattttaatttaattttactgtaatacagaaaatttgcatatcacttcaaaaatagagatacttttaaagtaacatcatgtatttcagtaatgtcctccactttaatgtcttacccttatatagtgggctattgggtttaaaaagaaagttaagttagtgatccatagctgtcaagtgggttacaaattgaataagttctatgcnaaaaataaatttttgtaaaaagtgaaaataaaaattgactgaat

SEQ ID NO: 571 - protein, 451 aa, Rattus norvegicus
  ref <308>: DATABASE ACCESSION NUMBER: SWISS-Prot / AAB86925
  ref <309>: DATABASE ENTRY DATE: 1998-11-01
MGALMATYSEGMMGCSSVGRCFSSTLSPIITLVATSMKSTPRVLENKADFQRSDRIDMETNTKDLKGAGVTVHPPRASEVNLEELPPLNYFVHAFYYSWYGNPQFDGKYVHWNHPVLEHWDPRIAKNYPQGRHSPPDDIGSSFYPELGSYSSRDPSVIETHMKQMRSASIGVLALSWYPPDASDENGEATDYLVPTILDKAHKYNLKVTFHIEPYSNRDDQNMHQNVKYIIDKYGNHPAFYRYKTRMGHSLPMFYIYDSYITKPKTWANLLTPSGSQSVRGSPYDGLFIALLVEEKHKYDILQSGFDGIYTYFATNGFTYGSSHQNWNKLKSFCEKNNMIFIPSVGPGYIDTSIRPWNTQNTRNRINGKYYEVGLSAALQTQPSLISITSFNEWHEGTQIEKAVPKRTANTVYLDYRPHKPSLYLEITRKWSEKYSKERMTYALDQQLPAS

SEQ ID NO: 572 - DNA, 2388 bp, Homo sapiens
  ref <308>: DATABASE ACCESSION NUMBER: Refseq / NM_024641
  ref <309>: DATABASE ENTRY DATE: 2002-11-05
attttattacagttggtatggaaatccacaatttgatggtaaatatatacattggaatcatccagtgttagagcattgggaccctagaatagccaagaattatccacaagggagacacaaccctccagatgacattggctccagcttttatcctgaattgggaagttacagttctcgggatccttctgtcatagaaactcacatgagacaaatgcgctcagcttcaattggtgtactagccctctcttggtacccacctgatgtaaatgatgaaaatggagaacctactgataacttggtacccactattttggataaagctcataaatataacctaaaggttacttttcacatagaaccatatagcaatcgagatgatcaaaacatgtacaaaaatgtcaagtatattatagacaaatatggaaatcatccggccttttacaggtacaagacgaagactggcaatgctcttcctatgttttatgtctatgattcctatattaccaagcctgaaaaatgggccaatctgttaaccacctcagggtctcggagtattcgcaattctccttatgatggactgtttattgcccttctggtagaagaaaaacataagtatgatattcttcaaagtggttttgatggaatttacacatattttgccacaaatggctttacttatggctcatcacatcagaattgggctagcctaaaattaatttgtgataaatacaacttaatatttatcccaagtgtgggcccaggatacatagataccagcatccgtccatggaacacgcaaaacactcggaaccgaatcaatgggaagtattatgaaattggtctgagtgccgcacttcagacacgccccagcttaatttctatcacctcttttaatgagtggcatgaaggaactcagattgaaaaagctgttcccaaaagaaccagtaatacagtgtacctagattaccgtcctcataaaccaggtctttacctagaactgactcgcaagtggtctgaaaaatacagtaaggaaagagcaacttatgcattagatcgccagctgcctgtttcttaatgcattgattaaagtttaatagttatcaaaatcacctaatttttaaaaatagctttcgttttgagttctggaaagaaaactgtcaaaatcagtatatactattagttatatttaaaaatatttttttaaattctttacagataatattatacttgttacccttcacaataccacatgagaaaatatctgagacaaaatgtatacaaatatattccttatggcataatttattgcatttctgactgaaatcaaaattctgatttgatggcaattgaattttcattttacaatagataaatgcttgtgttacctaaagcacttagcacacagttaaattatatttacatcctagacccaaataaataggattgtgtgtatatttgggatatctattgaagaaaaaaagaaaaccccttaaagataatgtacatgcttcatgtcatgtctttaaaataatttaatcaactttattgtcttagtatttagactctggataactctacaataatgaggaaattcttaagaataacaaaatcactgtaccttcctctcaattttgctgtgaacctgaaatggctttaaattaatactcttattttttatttaatttaattacataaattaaaccttaccatgaccaaattgtgttaggaaggcctgctatctacagcacagtgtgtcatttgcagatttgtggttacctataccacgctaggtgttttgacatgtttagtgtttctgctttacagtgctgaattccatattttagaagctatgaaagtccttttatgaaaaagttactgattgcttctcagttattaggaaaacagttgtttcacaattattatgtagatatgatgcccaaatatcatttttagtatatcttgtcgatctttaagttgttactattgtgttattcatgtctttaaatcagataccaaatattttttaggaaagaaaaatgttattactgtcattaggttgtcttttaatactttaagttattttgacgaaaagtaatagagaaaatttacttagcattttagattctagagacatggaaatgaaaattattttatgtctagagtaggtcctgaagtttggctttacattaagtttagcactgtatcagaatgaagaaactaatattttacataaaaactaatactttcaattttttatatagtaatatccccattttgtaaatgttagacttttatcatacctgtaagttaaaatacttgttatcaataacttgtcatattgtgacaaattgatcacttgtgtacgaaaaataaatctccttaaaaact

SEQ ID NO: 573 - protein, 290 aa, Homo sapiens
  ref <308>: DATABASE ACCESSION NUMBER: Refseq / NP_078917
  ref <309>: DATABASE ENTRY DATE: 2002-11-05
MRQMRSASIGVLALSWYPPDVNDENGEPTDNLVPTILDKAHKYNLKVTFHIEPYSNRDDQNMYKNVKYIIDKYGNHPAFYRYKTKTGNALPMFYVYDSYITKPEKWANLLTTSGSRSIRNSPYDGLFIALLVEEKHKYDILQSGFDGIYTYFATNGFTYGSSHQNWASLKLICDKYNLIFIPSVGPGYIDTSIRPWNTQNTRNRINGKYYEIGLSAALQTRPSLISITSFNEWHEGTQIEKAVPKRTSNTVYLDYRPHKPGLYLELTRKWSEKYSKERATYALDRQLPVS

SEQ ID NO: 574 - DNA, 4076 bp, Rattus norvegicus
  ref <308>: DATABASE ACCESSION NUMBER: EMBL / AF025308
  ref <309>: DATABASE ENTRY DATE: 2000-08-10
gggcttgcagccagcgcctcctcttaagagaagcgtctctccaccgcatccacaggcttgtgttgtgatgtattcgcgaagtggctttcttctgaagactccagggtctgacttctgaagagaagaaggaagaggagggtggaggagcacacagaaaggcctggaggcgtcccctggtgttcaggcagcttctgggtcagaacttggagacaccatgacaaacagcgtctgtcccacagcccaaggttcaggcaaagtcatagccaggcggtgtggtcaggggccgggctggggattccccatctccccagtttcacttctgcttctaacctgtgtcaggtccttctgcccggatactgatgacgcgctagcaattctctcattcctattgggtgccgtgattccggtgaaccaatcagcgttgcccagacactagatgtaaactccacgcagccgcgggactcagccgcgtccgggacctcggataggggcgatggcaccgcgcacgctgctcctgctgctggcggccgccctggccccgacccaggttcgcgcgggtgagtgcggggtcgggagggaaacggcctctgcggggaggcgcgggagcggcacggggaagcggtccccggtcgcacccaagaccccggccccttctccaccgcgtccggagccccggcccctgctccccgcgcgccggcagccgcccgggatcctgggaggaggtcgggatctcaccgcgcgccgcccccaggctcacactcgctgcggtatttccacaccgccgtgtcccggcccggcctcggggagccccggttcattatcgtcggctacgtggacgacacggagttcgtgcgctacgacagcgacgcggagaatccgagatacgagccgcgggttgggtggatggagcgggagggtccggagtattgggagcgggagacactgatggtcaaggaaaacgagcaggtttaccgagtgagcctgaggaccctgctccgctactacaaccagagcgagggcggtgagtgaccccgggtcggaggtcaggacccctccccgtccccacacggccggagacttccgggtccgaagtccaggttcgggaacagaaccgacccggaccggtttccctttcactttggaggagtccgcgggtgggcggaacgggtgggcggggcccggcctgaccgcggggtcccgcaggctctcacaccatccagtggatgtccggctgtgacgtggggtcggacgggagcctcctccgcgggtatgatcagttcgcctacgacggccgcgattacctcgccctgaacgaagacctgaaaacgtggatggcggcggacacggcggcacagatgacccgaaacaagtgggatcaggcaggtgaagcagagagacacaaggcctacctgcagggcacgtgtgtggagtggctccgcagatacctggagctcgggaaggagacgctgctgcgctcaggtgcgggggccgcgggcttctcctcctctgccctcgggctggggctcagtcctggggaagaagaaaccctcagctgggtgatgcccctgtctcagaggggagacagtgtccctgggtctccctgatccctcatcacggtgactgcactgcctctcccacagggcccagccttctccctggagagttctgagtccctctcaggagaaggagggaatttcccccttaacagcaggggctccctgctgtcagccatggcctctcccaggcatgttctctgcccacacccactctctgaggacactgactcctgtcctgctgagtgtgtcagcccttacacctcaggaacagaagtctcctttacctcacaggactccactactctaggctggttcccacagtttctaaaagattccccgggtttctcacagatccctccctgatgtggggttggcatcccttcaataccccatttctctctcttcctacagtggagaatggtaccatgagcccttatggggtaccctggaggaatataaattgtgggatttctttttcttttttctttttttctctctttttcttatcttttacttccttttttctttccttttttttttttttttttttttggaaggcattattttacttccagtcaggttttctctgcaaacacatattaaatcaattattttctattccctcttctgttctgtgaccacccatctcatgctataaaacacccgtaaaggacggccatgttgacccactcgctcatgtggattccctcttagcttctgagtccctcaggaaagtgtgcagttctgtgctgagggaaccagctctccctgcagctcactagggagatgacagttgaagtgtcagacacacacagttcagtgtcatccttgatttaactgtgtcctgtgtagatttcagtttgtcttgttaactgtgtgatttcttaaatcttccacacagatcccccaaaggcacatgtgacccttcaccccagacctgaaggtgatgtcaccctgaggtgctgggccctgggcttctaccctgctggcatattcctgacctggctgttgaatggggaggatctgacccaggacatggagcttgtggagaccaggcctgcaggggatggaaccttccagaagtgggcatctgtggtggtgcctcttgggaaggagcagaattacacatgccttgtggagcatgaggggctgcctgatcctctcaccctgagatggggtaaggagggtgtgggtatagagctggggtcaggaaaagctggagccttttacagaccctgagctggtcaaggctgagagctggtgttcctgacccccaccttcatttcctgtacctgtccttcccagaggctcctccatccactgaccccaacatggaaaccactgtcatttatgttgtcgttggagctgtggtcatcactggagctgtgaccatgattggagctctgctgactgttgtgagggggaggaagagaaacacaggtaggaaagggcagggtcttgtttcccctcagcttcctttagaagagcgctctgatcattaatgggaagcacagccacaccccacattgctgctgtctccaactgggtcctctgtcagttctggaaacttcctcctgtcaagaccttccttgaactctcacagcttttcttctcacaggtgggaaagtaggagtctacacccctgctccaggttagtgttggggcaggagtgtccctgagggtattggagtgaagctggagatgtggggaactcggggaatccatagtagctcctccatagaaatcttctgggggcctcagttgtaccgtgatgtgaatacatacatatacacatatacatatacagaacacaatacgtgtgtgtgtgtgtgtgtgtgtgtgtgtgtgtgtgtgtgtgtgtgtatgttttcttttaccctaggcaaggacagctccgagagctctgatgtgtctctcccagattgtaaaggtaactctgggtctgactggggaggggcaatgtggacatgattgcgtttcagggactcccagaatcccctgtgagtggagggttgttgggctgttgtcttcacagtgatggtttgtgactctcgttctctagcatgaagacagctgcctggagtggactgagtgacagacgatgtgttcaggtctctcctgtgacatccagagtcctcaggtctctttagacaccagtgtctgatgttccctgtgattctatggcttcagtgtgaagaactgtggagcccaggctgccctgcacacctggaccctgtccctgcactgcctgcattcccttccacattcaaccttgctggtccagcctggggttgggggggtggggacatatgcatcctgtcactcagtgctgctttgagctgcaactcctcacttctacactgagaataagaatctgagtgtgaacttgactgttcacatccttgacacaagtgttgattgctttttaaattactggattgaatacttagaggttctttgttttttatttttgttttgttttgttttctttgttttgttttaaaataaatggcaggtgga

SEQ ID NO: 575 - protein, 368 aa, Rattus norvegicus
  ref <308>: DATABASE ACCESSION NUMBER: SWISS-Prot / AAB82285
  ref <309>: DATABASE ENTRY DATE: 2003-02-01
MAPRTLLLLLAAALAPTQVRAGSHSLRYFHTAVSRPGLGEPRFIIVGYVDDTEFVRYDSDAENPRYEPRVGWMEREGPEYWERETLMVKENEQVYRVSLRTLLRYYNQSEGGSHTIQWMSGCDVGSDGSLLRGYDQFAYDGRDYLALNEDLKTWMAADTAAQMTRNKWDQAGEAERHKAYLQGTCVEWLRRYLELGKETLLRSDPPKAHVTLHPRPEGDVTLRCWALGFYPAGIFLTWLLNGEDLTQDMELVETRPAGDGTFQKWASVVVPLGKEQNYTCLVEHEGLPDPLTLRWEAPPSTDPNMETTVIYVVVGAVVITGAVTMIGALLTVVRGRKRNTGGKVGVYTPAPGKDSSESSDVSLPDCKA

SEQ ID NO: 576 - DNA, 6400 bp, Rattus norvegicus
  misc_feature (1)..(6400): n=a, c, g or t
  ref <308>: DATABASE ACCESSION NUMBER: EMBL / AF026504
  ref <309>: DATABASE ENTRY DATE: 1997-10-31
gaattcggcacgagaagaatttaaaggccacctcttgtgtgtttgtggaatgctggaggaggctgctctgcctctctcttcaggatgtacgcacccatgcaggattctgtgctcaagctctgtgcctgccgcctcctgcttgacgagcttctgaggaagttcgtcttactgtccgtcacctgggaaggatggtaacagtcctctgtaatctggtagaggacatggagccagctgccttgagcggtcttttgcttctgtcgtcgtcgttgtcatcatcataaatcagcactgatggggcggagggggccgctctgcttaaggaaacgcaggcattttgtgaattagtgaaaggcttccagctcagagtaaatggaagtcgggagatcttgggaagaagtggctgtgaatgctgggctcctgcagtgctcttcttgtggggggagcatgggattatggcaaccacagaaccccagtgatgccagttctgttcaatcttttctgaaggaagcctgctgttagagcacaggaactgttgtggattacaatgtttgaaagatacgggttctcagtggtctgaaaacacggcatcatttaaccttttaaatgacaaggcttaagatctcaacactactgctgtattttctggaagccattctctaaagcaaaagtgcacatttaaaatgcaaacatggtgatcctttctccagggatttaagtgatcactttttacgtcatgaccagcttgaagaggtcgcagaccgaaaggcctgtcactgctgacagagcctctgttgtcagcacagatggcacccccaaagttcacactgatgatttctacatgcgtcgcttccggtcccaaaatggcagcttaggatcatcagtcatggctgcagtagggccccctcgaagtgaaggtcctcaccatataacctcaacccccggagtccccaagatgggggttagggcaagaattgcagattggcctccaagaaaggaaaatgtaaaagaatctagccgttcaagccaggaaatagaaacctcaagttgccttgagagcctgtcctccaaaggcagtcctgtgagtcaggggagttctgttagcctcaattccaatgactcagccatgctgaagagcatccagaacaccctgaagaacaagacggggccagcggagagcatggactcgagattcctcatgcctgaagcctaccccagctcccccaggaaagcccttcgccgaatccgtcagcgtagcaacagtgatatcaccataagtgagcttgatgtggatagttttgatgaatgtatctccccaacctacaagtcggggccatcattgcacagggaatatggtagcacatcttcaatcgacaagcaggggacatccggagaaagcttcttcggtttgttaaagggctataaagacgacagagctgaccgaggtccaactccaaccaaactcagtgacttcctcatcactggtgggggcaagggttctggtttctccttggatgtgatcgatggacccatttcacagagagagaacctcaggctattcaaggaaagggaaaaaccactcaagcgacgttctaagtctgaaactggagactcatccatttttcgtaaattacgcaatgccaaaggtgaagaactcgggaagtcatcagaccttgaagacaacagatcagaggattctgtgaggccctggacatgtccaaagtgctttgcccactatgatgtccagagcatattgtttgacttgaatgaagccattatgaacaggcataatgtgattaagaggagaaacaccacaacgggagcttctgcagccgctgtggcgtccttagtctcgggacctttgtctcactcaaccagcttcagctctcctatgggcagcacagaggacttcaattccaaaggaagcctcggcatggaccagggagatgacaagagcaatgaactcgtcatgagctgtccgtactttcggaatgagattgggggagaaggtgagaggaaaatcagcctgtccaagtccaattctggctcattcagtgggtgtgagagcacgtcctttgagtctgccctcagctctcactgcacaaacgcaggagtggcggttctcgaagtgcccaaggagagcttgatgctgcatctagacagagtgagacggtacactgtggagcacgtggatcttggagcatactattacaggaagtgcttctaccaaaaggaacactggaactattttggggctgatgaaaacctcggtccagtggctgtgagcattcgaagggaaaaaccagaagacatgaaggaaaatggatctccctacaactaccgaataatttttagaactagtgagctcatgacactgagagggtctgtcctggaggatgccattccctccacagccaagcactcgacagccagaggattgccgctgaaagaggtgctggaacatgtgatcccagagctcaacgtgcagtgcctgcgtttggccttcaacacgcccaaagtcaccgagcagcttatgaaactggacgagcaagggctgaactatcagcagaaagtaggcatcatgtactgcaaagcaggccagagcaccgaggaggagatgtacaacacgcccaaagtcacggagcagtttatgaaactggacgagcaagggctgaattatcagcagaaagtaggcatcatgtactgcaaagcaggccagagcaccgaggaggagatgtacaataatgagtccgctggcccggcctttgaggaatttcttcagctactgggagagcgagttcgcctaaaaggatttgaaaagtatcgtgcgcagctcgacaccaaaactgactccactggaacccactctctgtacacaacctacaaagactatgagataatgttccacgtctccaccatgctgccctacacacctaacaacaagcaacagctcctgaggaagcggcacattgggaatgacattgtgacaatagttttccaggagcctggagcacaaccatttagcccgaaaaacatccgatctcactttcagcatgtttttgtcattgtccgggctcacaacccctgcactgagagtgtctgttacagtgtggcagtcaccaggtccagagatgtgccttcttttggacctcccatccctaaaggggtcaccttccccaagtcaaacgtgttcagggacttccttttggccaaagtgattaatgcagaaaacgctgctcataaatcagagaagttcagggccatggcaacaaggacccgccaggaatacctgaaagatctggcagaaaagaatgtcaccaacacacctattgacccttctggcaagtttccatttatttctctggcttctaagaagaaggaaaagtctaagccttacccaggagctgagctcagtagcatgggggccattgtgtgggcagtccgggccaaagactacaacaaggccatggaattcgactgcctccttggaatctccaatgagttcatcgtcctcattgagcaggaaacaaagagcgtggttttcaattgctcctgcagagatgtgatagggtggacttccagcgacagcagccttaagatcttctatgagcgtggagaatgcatttctgtggagagcttcatgagcagtgaagatatcaaagaaattgtcaaaaggctgcagtttgtttcaaaaggttgtgaatcagtggagatgacgctgcgaagaaatgggctaggccagcttggcttccatgtcaactatgagggcatcgtggcggatgtagaaccctatggctatgcatggcaagcaggtttgaagcagggcagccgcctggtggagatctgcaaggtggcagtggccaccctgagccatgaacagatgatcgatctcttgagaacgtcagtcacagtgaaagttgtcattatccctccccatgatgactgcacccctcggaggagttgctcagaaacctaccgcatgccagtgatggagtacaagatgaatgaaggcgtttcctatgagtacaagtttcccttccggagtaacaacaaatggcagcgtaatgccggcaagggtgcccattcgccccaggttccattgcagctgcagagccccatgatttcacgggtgaatgctgggaagggagatggaaagatgccccttccagaaagagccgccaacatccctcgaagcatctccagtgatgggcgcccactggaaaggaggctgtctcctggttcggacatctatgtgacagtctcatccatggctttggcgagatcccagtgccgtaactcccccagcaacttgtcatcgtccagcgagactggctctgggggtggcacttacagacaaaaatccatgcctgaagggtttggagtgagccgaagatccccagcttccatcgacaggcaaaacacccagtcggatattggtggcagtggaaaatccacacccagctggcagagaagtgaggacagccttgccgaccagatggagcctacatgccatctcccagcagtatctaaggtactgcctgctttccgagagagccccagtgggaggttgatgcggcaggatcccgtggttcacttgtctccaaacaagcaaggccattctgacagccactactccagccactccagcagcaacactctgtccagcaacgcctcgagtgcccacagtgacgagaagtggtacgatggagaccgcaccgagtccgacctcaacagctataactacctacagggcacatctgctgacagcggcatcgacaccgcctcatacggcctcagccatggcagcacggcctccctgggagcctccacatcctcacctcgttcagggccaggcaaagagaaggtggcacccctgtggcacagctccagtgaggtgctctccctggcagatcggaccttagagactgagggccatggcatggacaggaaaacagagtcctccctgagcctggacatccacagcaagagccaaggcggttcaagcccgctgacaagggagaacagcaccttcagcataaatgatgccacatctcacaccagtaccatgagctcccgacactctgccagcccagtggtgttctccagtgccagaagttcacccaaagaagagcttcaccccaccacgtcctcccagctcgcaccttccttctcttcctcttcctcatcttcctctggacctaggactttctatccccgccagggcgccactagcaaatacctgattggatggaaaaagccagaaggaaccattaactccgtgggatttatggatacaagaaagcgacatcagagtgatggtaatgagatagcccacactaggcttcgagcctcaaccagggaccttcgggcatccccaaagccaacttccaagtccaccattgaggaggatctaaagaaactcatcgaccttgagagcccaactcctgaatcacagaaaaacttcaagttccatggactgtcctccccacagtccccgttccccagcacccctacctcccggcgggccctgcacaggactctgtctgatgagagcatttacagcagccagagggagcatttcttcacctccagggcctcacttctagaccaagccctgcccaatgatgtctttttcagcagcacttacccatctctccccaagtcgcttccactgaggaggccatcttacacattgggaatgaagtcgctgcatggagagttctttgcttccgacagctcccttaccgacatccaggagacccggaggcagcctattcctgaccctggcctgatgcccctgcctgacactgcttcggacttggactggtccaacctagtagatgccgccaaagcctatgaggtccagagagcctcattttttgctgctagtgatgaaaaccatcgccccttgagtgcggcctccaacagcgaccagctagaggagcaggccctggtccagatgaagtcgtacagcagcagtaaggactcctctcccactctggcttctaaagtggaccagttggaaggtatgctgaaaatgcttcgagaagatttgaagaaggaaaaggaagacaaggcccacctgcaggcagaggttgagcacttgcgggaggacaacctgaggctgcaggaggagtcccagaatgcctcggacaagctgaagaagttcacagagtgggtcttcaacaccatagacatgagctagggccagctgaggggaaaggaggagggcaggctgctctgtatgggcaccctaaagcacccattcatgccttggaaagtattctcagagtcccagcttcccagtctgctcatattggacagtgcacaatacaacaactgcagatcaacaatcattatctgccttttatagaaaagaaaaaacaaaacncgtgccgaattc

SEQ ID NO: 577 - protein, 1822 aa, Rattus norvegicus
  ref <308>: DATABASE ACCESSION NUMBER: SWISS-Prot / AAB81526
  ref <309>: DATABASE ENTRY DATE: 2003-02-01
MTSLKRSQTERPVTADRASVVSTDGTPKVHTDDFYMRRFRSQNGSLGSSVMAAVGPPRSEGPHHITSTPGVPKMGVRARIADWPPRKENVKESSRSSQEIETSSCLESLSSKGSPVSQGSSVSLNSNDSAMLKSIQNTLKNKTGPAESMDSRFLMPEAYPSSPRKALRRIRQRSNSDITISELDVDSFDECISPTYKSGPSLHREYGSTSSIDKQGTSGESFFGLLKGYKDDRADRGPTPTKLSDFLITGGGKGSGFSLDVIDGPISQRENLRLFKEREKPLKRRSKSETGDSSIFRKLRNAKGEELGKSSDLEDNRSEDSVRPWTCPKCFAHYDVQSILFDLNEAIMNRHNVIKRRNTTTGASAAAVASLVSGPLSHSTSFSSPMGSTEDFNSKGSLGMDQGDDKSNELVMSCPYFRNEIGGEGERKISLSKSNSGSFSGCESTSFESALSSHCTNAGVAVLEVPKESLMLHLDRVRRYTVEHVDLGAYYYRKCFYQKEHWNYFGADENLGPVAVSIRREKPEDMKENGSPYNYRIIFRTSELMTLRGSVLEDAIPSTAKHSTARGLPLKEVLEHVIPELNVQCLRLAFNTPKVTEQLMKLDEQGLNYQQKVGIMYCKAGQSTEEEMYNTPKVTEQFMKLDEQGLNYQQKVGIMYCKAGQSTEEEMYNNESAGPAFEEFLQLLGERVRLKGFEKYRAQLDTKTDSTGTHSLYTTYKDYEIMFHVSTMLPYTPNNKQQLLRKRHIGNDIVTIVFQEPGAQPFSPKNIRSHFQHVFVIVRAHNPCTESVCYSVAVTRSRDVPSFGPPIPKGVTFPKSNVFRDFLLAKVINAENAAHKSEKFRAMATRTRQEYLKDLAEKNVTNTPIDPSGKFPFISLASKKKEKSKPYPGAELSSMGAIVWAVRAKDYNKAMEFDCLLGISNEFIVLIEQETKSVVFNCSCRDVIGWTSSDSSLKIFYERGECISVESFMSSEDIKEIVKRLQFVSKGCESVEMTLRRNGLGQLGFHVNYEGIVADVEPYGYAWQAGLKQGSRLVEICKVAVATLSHEQMIDLLRTSVTVKVVIIPPHDDCTPRRSCSETYRMPVMEYKMNEGVSYEYKFPFRSNNKWQRNAGKGAHSPQVPLQLQSPMISRVNAGKGDGKMPLPERAANIPRSISSDGRPLERRLSPGSDIYVTVSSMALARSQCRNSPSNLSSSSETGSGGGTYRQKSMPEGFGVSRRSPASIDRQNTQSDIGGSGKSTPSWQRSEDSLADQMEPTCHLPAVSKVLPAFRESPSGRLMRQDPVVHLSPNKQGHSDSHYSSHSSSNTLSSNASSAHSDEKWYDGDRTESDLNSYNYLQGTSADSGIDTASYGLSHGSTASLGASTSSPRSGPGKEKVAPLWHSSSEVLSLADRTLETEGHGMDRKTESSLSLDIHSKSQGGSSPLTRENSTFSINDATSHTSTMSSRHSASPVVFSSARSSPKEELHPTTSSQLAPSFSSSSSSSSGPRTFYPRQGATSKYLIGWKKPEGTINSVGFMDTRKRHQSDGNEIAHTRLRASTRDLRASPKPTSKSTIEEDLKKLIDLESPTPESQKNFKFHGLSSPQSPFPSTPTSRRALHRTLSDESIYSSQREHFFTSRASLLDQALPNDVFFSSTYPSLPKSLPLRRPSYTLGMKSLHGEFFASDSSLTDIQETRRQPIPDPGLMPLPDTASDLDWSNLVDAAKAYEVQRASFFAASDENHRPLSAASNSDQLEEQALVQMKSYSSSKDSSPTLASKVDQLEGMLKMLREDLKKEKEDKAHLQAEVEHLREDNLRLQEESQNASDKLKKFTEWVFNTIDMS

SEQ ID NO: 578 - DNA, 31737 bp, Homo sapiens
  ref <308>: DATABASE ACCESSION NUMBER: EMBL / AC004974
  ref <309>: DATABASE ENTRY DATE: 1999-12-23
gatctcttacctgttgtttgttgttgggtgtgtatggcagcatggtagaaacatggaacataatttcataatctttgtatgttgtgtacagagaatgggttccagtggagtcagctacagttaaaaaaaatataatgatgagatgactataacaggaaaaataatttatttaagagaaatatctcaaaaaagaaaagagaagaaaagaaaatgatttaggatgaaaagattctagacaagacaggtgttcttcctttttttttttgtatttgatcctctttggcagtctagtgaagcctacggatcagatcccttctcagaataatatttgtaaaagtataaaataaaaaacataagatttcaaaagaaattatatcgaagcgcacagtatcaaataattttaaatatgaatgcacaagatttatataacaagatttagcagttggtctaatatctactgtaatgctgaagacatgatgagcacaaacactcttgagatgtctgcaacaacaaataatataatacgaaaatatctgtgctttctattggcaatgaaatcacaggtaaatgaattactgtggtttactgcctatggccataatgaacagaaatgctaaatttcaacttggggtcagtgaaaataaagaaaatcttatttcccatccaagttcacagacccctgaattctgtcgacacatcaagttaggaaacatttttctaatacttccaattcaagcaagagacttgttttgttcttaaaaaaaaaaaaaaagacaataatttaacaagaccattaacactgaagaacaaagttgacacagcaacgtctaacaatttttttaagacttaagcatgttgtgttctcactttccttaagaaaaaaaaaacctctactgcctttatcttaacaaagtttcagaatcagtgttcccacaagtacctggaagctgcagaaaaaagttattaacttcccaactcaaagggaatacctgtttagactcaaaggatctggacttaggggttgcaaaaggaacagaagtacattcactgtaggtaaactcaaccctctatcaacccaattttttttttttttttttttttgagacagtctcactctgtcgcccaggctggagtacaatggtgcgatctcggctcactgcaacctctgcctcctgggttcaagcgattctcctgcctcagcctcctgagtagctgggactataagtgcatgccaccatgcctggctaatttttgtagttttagtagagacggggtttcaccatgttggccaggatggtctcaatctcctgaccttgtgatccacccaccttggcctcccaaagtgctgggattacaggcgtgacccaacatacctggcctcgaccctattttttgaggaccaaaacacttgatggcattttagagaacgatgctctcagacaaagtctctgacacataccaaaaggcaacagtagttctgaaaacttagtatgcacagcatcagctgtggagctaaattaagaggcagattcccagggcccaccccccaaaatactcctcagtgggtatagggcctcacaggggaatctattcttcacagacactcccaggtagctctaatgcagtaactccgctgccgttaggtactgctctaagaatagactacaactgtggcttgcagacagctttctaaagatattctagagctctgagtttcaagcttgagcttgttggagaatcttaattttgaagctgacataaaatgcgaaggcttaaaaatagtcaaaaatagaacaaagcaaagactacttttcaaaaattggaaaactatgtaacaacatataaatatccaagaaaaatatcttctaagtattaatgaccatcacaacaaaaaaactgtgtattactacaacaaaggattcaactgaactatttaagacaggtcttgaacgtgaagaacttatctattgtcaagaaccctttctataaatatgtatagaacagatcagcacattttaaaactttaaagtgaatgtgtcaccactgacgtgtacttatacatgtgtttcaagtcaattttaagcaaaattaatgaaacagaaaaaaaaaatgtcattggtattcatttattacactgtgctttatatgcctgctagttctaaaaggattactgccagagaggaaaactgctggggaagaaaacactgaagatcatttatttttctacttctagccccttctctctgtcctccacgtctcatttcacacaatgtatgctatctgaccagcctttttctgaggtcttttagattcatagagttttgctgataattttcaacagtttgggaatagtttcagaagtttcagagatgaaactagggctaaaataatgaaacttttctttccaagaagaaaagaattccaaaatcctgaaattactatgcacttcatagaggtattaaactttaccagaaagaatgaaaaaagaatgtttgctataaagaaataattaacagagtaaacagacaacctacagaatgggagaaaatatttgcaaaccatatacccaacaaaagactaatatccagaatctctaagaaacttaagcaaatcaacaagaaaaaaacaaacagccccattaaaaagtgggtaaataacacaaatagacacttctcaaaagaagacatacacgtagccaacaaacatgaaaaaatgctcaacatcactaatcactggagaaatgtacattaaaaccacaatgagataccatctgatatcagacagaatggctatcattcaaaagtcaaaaaataacagatgttggcaaggattttgagaaaagaaaatatacatacactgttcatgggaatgtaaattaatacagccactatggaaaacagtatggagatttctcaaagaactaacaatagaactaccatttgacccagcagtctccctactgggtatctactcaaaggaaaagaaataattttatcaaatggcacctgcactaatttgtttattgcagcactgttcacaatagcaaaggcatggaatcgacctaagtgtctatcaatggtagactggataaaggaaacatggtacatatacatcatggaatggtacgcagccataaaaaagaacatcatcatctccctggcaacaacacacatgcagctggaggccattatcctaagtgaattaacgcagaaacagaaagtcaaatactgcatgttttcacttacaagcaggagctaaacaatgggtacacatgaacataaagatgaaaacaacagacattggcgagtccaaaagtggggaggaaggttgagaggaagggttggagaaccctactccacctcaaaatctccacctactgggtactatgctcactatttggctaatagattcactagaagctcaagccccagcattatgcaatatacccctgttaacaaacctggacatgtcctcccgaatctaagactgtttactatattactaaggaataaagcatccaatgctcttattataatatttttagtgaccatgaaaccctgaaactatgaaagttttaatagaatgactatcaggaaaatgaaaaaaaaaatgcttttttatctggttgaagagcgtattgagcaactctaaagggacaatgtgcttgtagaaggaggatgaaagaatgatgctacttcatatttgtatagagctttaattaataagtaaattcaggcattatataggtcaccttgacaatcacatgatctgcctccttgacaatcacatgatctgcctccaaatctttctttatgaaaagtcttatatctcttttaagatcttgaacctcaactgcatttataacactgctgaaaaatggaggagaaaacaaacagtcactaacattgcagcaaattaatgaaggcagggctttgaaggaaagcttttacaaacggcttctaagtctcctgtgtactgacgtgacaaacaagcctcagtcaggaaataattcccccaaataatccacgtacgtagctaaaaatgaggatggtctccagctttcaaataacaaactgcttggtgggaagtttattgtatttattgtagtgtgagagaatggtaattatctaggttatatcatccaaataagaaaacaaaaaagaaggaaaaatcccctattaaaaatttcttcattgcagaattgttccagcctgtgacatatttatttgtagcttgcttgtttgctacaaatccttatttttgaaatgtgtagatggtctttgcacagataactgggaaaaagaagaaatggttcaatagttcattacttccctgagcctcgtcctcctttacaaaaatactaagaaatgaatatgatgataatgcatgaagtagagctatctcatgagctggtttgagtactgttagctcaagggcttaagagggaggaagacataggctaaaggccggtcttggggctttgctatacttcattctacatttatgctttctctgaacacttcattaaccacactactgggatctattctactttcctaatgcttgctagctatctaaccatgggcatgttacttaatctaaagaagccaattctgtaaagtggggataattggtatctagcaggtttgtcggaattaaacgagacggcatacatatcaaaagtatctgggacttctgcttccagccataatgaagtgcttgatacagcacttaccatgccattgtgaataactagaaaaaatgatataatagctgaaacaactgtttgcagacattggagaacaggcagccttggatagtgatccttgagaaaaaagaatacagaagatgagccctatgacccctgggctttctacctagaggtacttgtgggacagttgacacagagcaaggtactgaagggggaagccaagacagactcgagttcaggaagtctgaggtgactgatatttgctaggcagaataccaaagagaaagaaatatcagatgaaaggttcagaaatctgaataggggtccctttgagtcttgagttggacagtaagctgcatatgcatatgcataaattccaaaagccaagcaaagacaaaatattagggaaagaacaactaccaacgaattataagccaaacaattccacagttcacactgggttgggagacattaatgagttctgaacagccacagtagacacttcattgaatattcaagtactgaggtgcaagaaaagtcatgccttagtagtagggctaagttagccagagtaaaagctactctaggtatgctttaacaaagcttaaaaataagactcataaaaatcaagctgttctgcaacttcactgcctgccaaaacaaaactcaacacttaaagaagataacaaaattaagacactgaacaatgaaacatttacaatatccaacatcttatcaaaaacaaccagacatgtgaggaagtaaaatatatacaaaggaaccccattaaaaaaagaaactgaaaatgagagaaatgatgaaattagcagatgaacattttgaaacaactattataaatgtgtttagggatctaaaggacagcgtgaacctaaaaaggtgagaatagaagacatttaaaaagattatcaaatgcaacttttggccctgaaatataatatcttaaatggaaatttcactggacgggattaacaatgaattaagataccatggaagaaaagaaaaacacaaggagctttaagatatattaatagaaattatccaaactgaagcacagaaggaaaaaaaaaggttagggggaaaaaaaaaagaaccagggcctcattaacctgtggtacaccagtgagtgatataacatatgtgtaattggagtctcagagagatgggaggttaagacagaaaaaataaagaaataacagcagatagtactttaatttgataaaaactacaaacccatagattcaagtgacatctacagtgggaatgatccttgaacatttgttctgaaaagcacttttttagaaaaagaattatattcaaagtttcttgacacaacataaagttagattaagtatggtgagattacatcacagcacacagaacgaagtcttatctctagtagtgtccagcccagtaggaggcagctgaggtgtacagaggctggctgttgcctattttggtggtctatgattatttaatgcaggtttaaatggcatagtgaatagactctagtttttgcccctattaataagcttggagtaaaagagatgattttgcgtactgtcttctttggggcttcagagtaggaatacttccctacttttcgttcattttaggaaatgcgacattttaaaaggacagaaggattctttgaatccttctcaggaaatatgccctgaaaggtcagacatgcctcataaagttgaactacttaaaggagagtagttcagtgaaaaagaatctttccctgttgaaggtattatataattccaaaactacattaagaggctgtttggtaatccaggctcatccccctctagcctttgcagttgttgggataattggacaaactgtgcacaaagtgcttattttgtgtattccactgccttactacatgtcatgttgcttaacgataccctagctatacatttctcacatcacccttcatcacagataacacacaatcttatcaactcccagtctgaccattcatttatagtatcactgagcttattacacattctcttcccagatcctttcaataactgtttgtggtagtgataatttatacagcacaacaaatgggggcaacatgaatgaactgtaccaggtgaatatcagaatagctggataaaaagagtttaaggacatactgaaatttaacatctttatgcagttgcaagcagagtacagaatgttaaaataatatttaagcagctaggctatttatgggttttaatagtctctcttgcatgtcgtttccaagttggcaacagcaaaaccatggcaacaggaaattcttccctgcagtggagtttatgaatgcttttctgttttcatgactcaactccttatttaatttcctgtacagaaaatcagagagattactatagactgcaatacagatgtgctaatcccaagaccctctcaaagaaaaacaggtcacaggtgtctatggatgaatttaaagataaaatttaaaactgctttcacacagacacatagcaaaagtcaacacactctttgattagtcccagctaaccaaaataggcatttgagaatgttaactattttactgacaacttggggactggacatggacaaccttttaggttcatgcaccatagttaaacagattgtttcattatcatgcttttaatcaacacattttatgagctaaactaataccaaagctaaaaagcctattttctcagagattaagtagactgtgaataataataatagaaacaaaaaccctagatgtaaaaagaatacaaaaaaacaaaaacaaaggctgactacatagataaacatgaagactatgaaatgaattaatggaagtcaaaaattccaggcttacactcagacagttgtaagtttccggagtttttaatcaccctaacatttggctaaatgtaatgaaatttacacaatgctcacccaggagcaattctgcacgatctgtgtcactgccccactccatgcacacacctctgacaacactatttttttagagtctaattctagctactttggttatgatcttcaactgttctggtgctacatcctccctctctggctttctctcccccatcaccagcagtgttctgcgataaatggcaatgttgctttacggataatttagcagatgcacaacagcacaacagggggaaaataagcctagtaggagggtgtaagtatttcttacttttggtatcaagctgtgctcgatacttctcaaatcctttgagccgaactcgctctcccaatagttgaagaaattcttcaaaggctgggccagctgactcattgttgtacatctcttcttcagtgctctgtccagctttgcagtacatgatgcctactttctgctggtagttcagctgtgaaggcaggtaatacgatgcatataaatataggcagatccactttgtcccagtcaaatgctaaaaggtcctatagggcacatgcccagaaaatagctaacacctttcttctcttgaaatccttctgtattttccgtctttgatccaaaattaagtggagcaagtatctacgaacttcatgaactgagaaaaggccagaaaaataaatgaaaatttcctgtatgtaaagatcatgcaccattaaacagatctgttggtactataggaaatttctgttaatcaattacaaagtacaaaatgaggttattaaaaaatcctggtaactaaaggcaattctttttttatggtgtccccccttttaaaagggaggtctttacaaatttaaaagcagaggtctactttataaaacatattttaaaataaactgttttgcactaaaaggtccactaatatttttgcagttttttttttgtaaaattagaaaagacttatctcccaatacccttttcccaatatattaaattataaaccttgcctatatctttgttacagcactactatcatcaatactgtacttagagcaacttctctttcaaatagttttccaaaggatgagtgtctgcagagaaactttaaaagaggcctcacaatggcaaatcagctaatggcaaatatttcttcctcaaatgcagttaaaatgaaggattaagagatttacttataacattaatcaaaacatttattcatcattgaaaagtccagtcattttgcaaagaaattttaaggtgttactgatcatttaacaagcaatgagttttcaacataaaaatgtgtactttgggctgggcacagtggctaatgcctgtaatcccagcactttgggaggctgaggggggcagatcacttgaacctaggagttccagacaagcctgggcaacatggcaaaaccctgtctctacaaaatgtacaaaaattagccaggtgtggtggtgcacacttgtagtcccagctactcgggaggttgaggttcgaggatcatttgagcccgggagattgatgttgcagtgagtcatgactgtaccacatactccagcctgggcaacagagcaaaactctgtctcaaaaaaaaaaaaaaaaaaaaattggactttgaattctccaatgacattgggacaattcttatcacttaatcctatttccagagtgtcattacaaccaccacatcagtaaggttttatctaataaaagggggaagagaagaggtgaaattttaatagctaacatttattgaatacctatcatatgccaggcactacgtgcagtgtttaacatacattaaattcttactctcacaatagcccacaaggcaaatattacccctgtttgacagatgagcaaagagatcagagaatgcaagagagaggaactagtacagtagggagagacacaagatcataaagagtcagttctgtgactcagctccattaactatcaccagaactcaaccaggtttgtctttggacaaccgctgcaacatatgtctacaacttcttatttgcaattctgaagttgaaaggtagaaagcaaatttaggcaaacatatttggcagcaaaacttgacatggggctgacattagtacttttaatttattcatctttgtgtgaatattcatgtttcccctgcataattgattgtggggtactgccccagatctcactgggaatattactatatgggtcatacattttattatccctctaaaatctgaaaattcctcaattctgaaacacagccagccctgccactttatattaagggactacgaacctgaactaccattttcagctttccaaatcaaatggttcaaatcgtgataacggaaaatgtcacaggggagaaaacaaatgaacaaacaaaaaaacacctttgcttgctttgtctccctcccctgcaccctgcttagctgacaagaaagctcaacagcctttgcattgtgcatagacaggagggttcctggatatatatatatatttttgagatggagtttcgcttcgctcttgttgaccaggcgggattgcaatggcgcaatcttggctcactgcaacctccgcctctggagttgaagcgattctccctcctcagcctcccaagtagctggtattacaggcatgcgccaccaggcctggctaatttttgtatttttagtagagatggggtttcaccatgttggtcaggctggtcttgaactcctgacctcaggtgatccacctgcctcggcctcccaaagtgctgggattacaggcatgagccactgtgcctgtcctggaatatttttaaaacagcatacaatctgacctactgctaccttgattatgaacaggcacacattcgggacttagttcatttttgtatagcacacataagaaaaaaaaatcagggtaaaacttgctgcacactactgacatttaacccctttcttagcgggcctgcttctaatggctgaatgtggctaatgcttagaagggaacgctcccacaggtaaaggtttcatcttggctttagaattgagctaagtaccctattaggtctcaacaaataaaaagggagagatagtctcgatgtctattacaaaagaagtccttaatacagccagattccagggctgaacattacctgactctctccctccagggagaacaaaaagatcaagcaatctgtagacaggaaggggctttaagttacatgctgtctggctatgccttccagaacagccttcgcttgcaacagggtaaaacaaaactcaccctgactaatggaaagcattacagcgacactgaatttgtgggtgcctatttaaaacttcatagatagaggcctaagatttcactgtgcaacactcaaaaggattaatttatttagattcatttattaaaaaaaaaaaagtttcctgcagaaagaagataagaaaacatcccccaaagtagtggacaagcagaattcaaggacaggacaatgtgcctcttttgactgaattctataccctagtgagctccacctgctgacagaacaaaccggttttgccagttgtgaaaggaatgatcctttaagaggattaggaaattccttacaatgtcaagtttcctctggtttgaaactgtgtcaaatatcacttgctgtatcctcaaaggtgacaatgtgactgtatcttgatttctactccaattagatcaaaggtaggtagcattctccgaactcaggctcctagaatccttagcagccatgctcccagatagaatgagatgttgacaagcagaagttaagtaaatgtaatcaggaacattctaagagaaggagctaatgtacatggagttgtaaagccatgatgtggggattttggattgctttgaggttatataaaacagtatttattgtctcagaaacacacaaacatacctacgtgggcttatggatctacatatacaatactttaaggtaatgatcaaaatagagttatgatgacaccagaagccctcctatccacagtttagcattttgctttggataacctctgggtcatttagcaatggtaccataattcatgcctgcagatcagctgttcatatgaagcactgagggaagtgctgggcactcaataaatgtttgtacatacaaaagtgatggtggtcagtccaatgggacaagggctatatttgagatgaaggtcttaaatctcaacaaagtaaaggggtctttcaacacttactaaaagtgttgtgagcttccacagctgggaaacaacagtacataaatttgctcttcctctcatacaataggcactttaacacagagttaagaaacagacactgcaggctcacgcctgtaatcccagcactttgggaggccgaggcgggtggctcatgaggtcaggagattgagagcatcctgactaacacggtgaaaccccgtctctactaaaaatacaaaaaattagccgggcgtggtggcgggcacctgtagtcccagctactcgggaggctgaggcaggagaatggcgtgaacccgggaggctgagcttgcagtgagccgagatagcgccactgcactccagcctgggagacggagcaagactccgtctcaaaaaaaaaaaaaaaagtagaaagaaagaaacagacagtgcaatctgacttaaacagccataacttcctggaaagatggacgataaagtcacagccctgtaccagaagaaagagatgtgaataaccaagttctcagtcttcttcagaagttttgcattttacctcatcttccctggtatcatggccagaaagcggccactggggtagaacaaacgatgagaacaactcaattcttacattcttatgaaacctctactattgcctaattaaatttagaaatttaaaatagtcactatgaggtatttcattgtgcaacagttcttgaagtgtggactgtgaactcttgagcatctctgagaaccttcttgtggggagtgatggatcatgacatcaaaactatcttcaaaacactattaagagtcaatctggtattttccacggacatatgcactcatggtgagtcaaactgctggcacttttgcatgaatcaagcagtggctccaaactataccagcactccttgcattctttttctccgctatacactcaccccttccccaaataaaaacccagttaagaatgtccttgatgaagcagtaaaatattaacttgtattaaatctagacacttgagtatatgctttttaatattccatgtgatgaaatgcagcgtatatataaagcatctgttgcctactaaagtgctttatgatagctttctcaaggaaaagcacttgttcaactgagttgcaagatgaactttgtgtctttttcatagaagactggcaggcagagtaatttctcctcaaacccacctacttcctaatccctagatcctgtgaatacgtaatgttaatggtaaaggggagcatagattatagaaggacttaagattgccaattaacagatggggagagtagccaggattatccagatgggcccaataactgaaaggtccttaaaagtggaagaggaagacaagatgatcatcagaaaaagacaacggagacaaaagagaaaagacaatggaggcagggtcaaagggaggcaacactgctggctttggagatggaggaagggccatgagccaaggtgcacgggcagccaccagaagttgaaaaggccaaacacagattcacccttagagcccccggaaaggacacagtttgattttagcccagtgacaccaatatttaatttttaacttacagaactgtaaaataacaaatctatgttgttttaaggcactgagtaggagtaatttgttacagcagcaataaaaacctaactaaaatcactattttcatatgaaagaacaaacaagagacaaactatagtcattcaggcttgtgtatttgggagatattgtcttgaaaatataaaggggagcctgttacttcaggaaaaacaactcacagtatttcctgacataatagaatttaagctctaaagcaaaatttaaatttttggaaacttacacctatcaccatgagcctaagggtttcccaacacttaactctttttctaataagatcaatggaatattttcattattgtaaactaaacaaacacttataaaatctccataagagaaccaatttttccaaatgactgctgtatgaaattacaaaatcatgcatgaataaaagattcattcaaggccaggcatggtggttcatgcctgtaatcctagcactttgggaggccaaggtgggaggatcacttgaggccaggagttcaagaccagccagagcaacacagtgagaccctgtctctgtaaaattaaaaaatcaggtgggtatggtggcatgggcttgcagtcccaggatttggaagctaaggtgggaggatggcttaagcccaagagggcaaggctatagtgagccatgattacatgattgtgccactgcactccagcctgggcaatagagtgcaaccctgtctcaaaaaaaattaaagaaaaaggaaaagaaagattcattcaaagtgcatgaaagtcaatgaatttttcatttaacagaatgatttcagattaactcatgatttcagattccacatagctatcaacctttaagaaactaccatttgttggccaggcatggtggctcacgcctgtcatcccagcactttgggaggccgaggtgtgcaaatcacaaggtcaggagtttgagaccagcctgactaacatggtgaaatcccgtctctactaaaaatacaaaatttagctgggcgtggtggtgggcgcctgtaatcccagctacttaggaggctgaggcatgagaattgcttgaacctgggaggcagaggttgcagtgagccaagatcgtgccactgcactccagcctgggcgacagagtgagactccatttcaaaagaaaaaaacacacacacaaaaactaccacttgttgagttttggtgttatatcaaaggaaaatatccacaattatctgaaaaggccgtatgaaagtccttctttctccaagtacataaactctgtgaggacagattttcttcatttactccaaccaaaacaacatattgcagcagactgacagcagatgcacatatgtgagtccaagtgccttctattaagccagacattaaagagatctgcaaaaacgatactttctttgcactagtttttcattttagaaaacttttttcacaaacatgttacttatattaacatgtaaaatgtaatcattttatttaaaaataacattttaaaatttgttttgattgtaatgtggtaaacacacaaaaaagtcttatgaacaaaagctctttgggatctttaacttttaaaagggtgaagggactctgagacgtaaacatctgagaactgtattgctatgctttcttctggatttctctaacgactaaaaaagtcatctaacttttcctatgttcattgtttattttgataacctttcttctgaaaatcaagatttttccctttggctgctgttaggagtttctctgtatcacgggtttgaaacaatttgattatgatatctgttggtgtcattttctgcatgcttcttattcttagggctcattgagtttcttgggtctgcttgcatcatatgtggaaaatctggaactatttcctcaactactttttcaggtagttcctaactcctctggggtctccaattatatgaatattaggtcaggtgaagttgtctcacagtatattgatgttgggttttttgtttttttttttttggcaattgtttctattgctatgtcatcaagttcactaatcctttcttcgacaatgtctaatctgctgttaattctgtccagtgtacttttcaactcagatattgtagctttcatatccataaatacaaagcttttctttttccagatttctacttaatgttcaatctttcctcctgcttcttaaacattaaaaagacatcagagtcatttttgtggttttaattgtttaattattttatcccctccccaactataggtcatatgctcctgcttgtagtttttaattaaatgattgactgtcagacattatgaatattaccttgttgggtgctggatattgttgtattcctataaagtatttttgactttgttctggattcatagttaaattacttggcaagagtttgagccttgtagttcttgcttttaaactcttggttgtacgacagcagtgtttagtctaaggataattctgccccactattgaggcaaaagcattgtgaggctctactcaatgccatgtcaattatgaagttttccagtctggtttgtaggagttgaaactattcgcaccagaggtagactgtttacggctctctcctccctgattctctgtgctctgcgaattctagcctccctggactcacatctcaatctcaatcagggaggcttctggcctttaactgggtaccccctgcctgtactgtagcctggaaactctcttcaggcagaaagctggtgcaatcttagggttcacctcatttgtttcccatctcccaagcaatcaatgtccttcaatgcctgatgtccaacattataaaaaccattgtttcattgttttgtctagtttttaagttgtttcaggtggaaagttaaatgcagtccctcttacttaatcttagcaagaagcagaaatttgccttcagtttttaaatcaactttattgatgtatgatttctgaagagtaaatgcaaggcgtataatttaataacttctgacaaacccccaacacaatcaaaatacagaacactgccattaccccaatagctcctggttcctctttgcagtccatccctgcatcatctaacagcttcaggcaaccactgtactaattttgttttttttactataaattagttttgcctacattttaaagaaaatttttggtgtaaaatccattgtgagggttactctttcagcactttagaaatgtcttctgccttctactttttttgtttgtttttgagacggagtctcgctctatcacccaggctggagtgcagtggctccatctcggctcactgcaagctccgcctcccaggttcacaccattctcctgcctcagcctccagagtagctggtactacaggaacctgccaccacacccagctaatttttttgtgtttttagtagagatggggcttcactgtattagccaggatggtctcgatctcctgacctcgtgatctgcccgcctcggcctcccaaagtgctgggattacaggcatgagccaccacgcccggcctctactttttctttaggctttatagcccagcaaatgtttaacagtcttgttgttctttaaaggtatttttccatctggctatttttaaagatttttctctttttcttttattttcagcaatttttactatgagcctatatttgattttttttttttttttagattatcttgtttagggtggacagaactccttgtttttatcttaatgcttgtctttcatcagttctggaaatctctaccagcatttcctcaaatactgcttttattcccaaataatgcataaatatcttctcttctggaaattcaatcatatatatattttgctgttacccacatgcctttcagacatttttctgtatttttctatgttttcttgtctccgttctttagttaaaatttttctggtaatctgtcttcatcagttctctctcctactgtgtccagtatgttcttaaacatatctacttttaaatgagtctaactttaggggttttttagttttagagtttcaatataggctgggtgtggtggctcatgcctgtaatcccagcactttggaaggccaaggcaggtggatcacttgaggtcaggagttcgagaccagcttggccaacacagtgaaaccccgtttctactaaaaatacaaaagttagccgggcgtaggggcacacacttgtaatcccagctctgcgggaggctgaggcacaagaatcacttaaactcaggaggcggaggttgcagtgagccaagactgcaccactgcactccagcctgggcaatagtgtgagactccgtctcaaagaagaagaaaaaaaatgaatttcaatataattgttttacagatttgagttctctagtaagccttgaattcaatttgtaacctccaaagccctatacaagctctgatttgatctgatcactgaaagctctgatctgtctcctaactttttatctgctgctttatgctagatggaaaagccccaagattcttaacctatcagcaaatgtctaagagaaaaagcactgtaagatattgttaatcttgatagactacaatttctcaaattttttttttctttctagatcaagctcttggtgccacatctaagaattcttaaccaagctgaaggtcccaaagattttctcctatgtttttctcaaaaaaatttaatacttgtagatttcaatctatgatccatttgaattaattgttgatgcttaaaagtcaaggtttaggccgggggcctggtggctcacacctgtaatcccagcactttgggaggctgaggtgggcagatcacttgagatcaggagtttgagaccagcttggccaacatggtgaaaccccgtctctactaaaaatacaaaaattagccgggtgtggtggtatgcacctgtaattccagctactcgggagactgaggcacgagaattgcttgaatctgggaggcggaggttgcagtaagccaagatcatgccactgcactccagcctgggcaacagagcaagactcagtctcaaaaaaacaaaaaaacaaaaaaacccaaaaagtcaaggttcattattttgtttatggatgtccagttgtcccagtactgttggaaaagcctatccttcctccactgaattacttttacacctatgccaaaaatgagctagatatatttgtgtggggctatttctggtttctctattctgttccaccgatccacatgtctatctttccagcaatgccacacagtcttgactactggagctatataacatgtcttgaaatcagacagaataacttctcccacattaattcctctttctcagattgttttaggtattccagttcctttgttttttcatgtaaactttagaataatcttgtctataaccacaaaaaaaccttggcggaattttgataaaaattaagaagttaaactttgtatcagtttggagaacactgacatgattaatatatgttaacgctctcaatttgtgaatatagtatgcctctccatttatttaggtctttggtttcttagagacaggacttaatctgtcacccaggctagagtgtagcaggatgatcatagctcatggcagccttgaaatcctgggctcaagcgatcctcctgccttagcctcctgagtagttggagctacaaatgcacaccaccatgcctggttaaatttttaaaatttttttgcagaaacaggatctcactatgttgcccaggctggccttgaactattggattcaagcaatcctccttccttggcctctcaaaacgctaggattacagaagtgagccatcatgcccaacattagggttttgattcgttcatcagggttttgtagttttcaaaatacaagtcctattcatgttttgttagatgcatgcccaagcttttgtttatgtttttagatgacatctcactgtgttgcctgggcttgtcttgaactcctaggttcaagtgatctttctgcttcctgactatctgggattataggcacaggctatcatgtttggctccaagttttgtttgtttgtttagggattgcaaatggtgtattttaatttcagtgtccacatattcactgaaagaaatctaactgatttttgtaagttgatgttgaatcatacaagcttgctaaacacattttgcagttccaggttgtttatctatagattccttagggttttgcaaacagaccagcatgtcatctgaaatagggagttttatttttccactgctgcgtctacatgccttttcttttacttgccttactgcactgactagaacttcttgtactatgttgaatagcagtgttaacagcacatatccttccctttctccagtctcttaccattaagaataatgcaagctatagaagttttgtagatgttcttcatcaagctgagaaagttcctctgtattactagtttttatcataaataagttcaaattttatcaaatgctttttctgcaccaattgatattaccacgtgatttttcttctttagtctgttagtacgatgggctacattaattgatttttcaatactgaatcagccttgcatctctagaataaatccaactaggtcatggtctacaaaatttttttctactttattatatttgctaatttttttttcaaggaattttacatgtatattcatgagggatgtggtcagtagttttcttttttcctacctttgtctggctttggtattagggcttcataaagttaaatttaaaatgtttcttatcttgtattttctggaagcaattgtgcagaactggtgataattctttaaatgttaggtagacttcccaggaaaaccatctggcccagtagatttcatttttggagttttaaaattatgaattcaatttttttcaataatcatagggctattcaaatattctgtttcagttagctgagttgtgactgttttctgaggagttctcccatttcatcttgtcaaaattgtatgtattcagctgtatacagtatttctttaatacattgttgctattgggggcgttggtggtaatatctaatttcattcctgatagagtagtacccctgtattcatgagggatatgttccaagaccttcagtggatgcctgaaaccatggatagtaccgaaccctatataactatataccatgtttttccctctacctaaaaatctatgataaagttcttatttttttttttttaagagtctcactctgtcaaccaggctggagtacagtggcttgaccatggttcactgaagcctccaacttctggacttaattgatcctcctgattcagcctcttaactacagacatgagccaccaagcctggatactttttttttaaattttttgtagagacagtgtctcactatgttgcccaggctaatgctgaccttctggcctcaaatgatcctcccacctcagcctcctgagttgctgagattataggtgtgtcactgcgcccaactcgataaagtttaatttataaatcagacatagtaagaaattaacaactagttataaaatagaacgattatgacaatacaatgtaataaaagttaagtgaatgtacaatgtactctctctctctcaaaatatcttattgtattgtactctcctatttttagagcacagttgactgcagaaagcgaaaccatgaatactgagggactaccgtgttgacaagatttgtattgtctgtttttctttgtcagtcttgttagaggattttcaattttatcatcttttcaaagatctagcgtgtgtgtgtgtgtgtgcacgcgtgcacacacaggatctgggttttatgaaaaaaaaaaaatttttttttaaaccccaaagatgtagctgttttttttttttttttaaagatggagtctcattctgtcactcaggctggagtgcagtggcgccatctcagctcactgcgacccctgcctcccgggttcaaataattctcctgcctcagcctcttgagtagctgagattacaggcatgcaccaccatgcccggctaatttttgtatgtttagtagagtcgtggtttcaccatgttggccaggctggtctcaagtgatccactcacctgatcgcaagtgatctgcccacctcggcctcccaaagtgttgggattataggcgtgagccacctcgcctggccagatctagcctttcatttcattaatttcctcaaatgtttttctatttttaatttcattgatttctgatctataccatttccttctttctagttgctttggatttattttgctcttctctttctagtcatataaggttatgagcttagattactggtttgagatgttttgtcttttctaacgcagcatttcatactgtcaatttccccctcagcctgctttaattgcatcccacaaagtttcatatgttgtcttttcctttccattcagtttacatacattttttcatttcccttgaagtgttttctttgacctactggttacttagaaatctgtttttttagtttccaagtgcttagagatttttccattatgtttctgttatttctagtttgattccagtttgattagaaaatatactttttgttatttcacttcttttaaatttgaggatgtttatttcatgggacaggatgtctatcttggcatacattccatgtgcaactgaaaagaacatgtattctgctgttgtgagtaaagtgctttatgtcaattagatcctattggttgatgttgtgaagttctatgtctttgctgattttctgtctagttttcctttccattgttgaaggagagatgttaaaatcaccaactataattgtgtatttacctatttctccttttagtttcatcagtttttttccttcacatttacagctctgtttgatgcacatatacctaggattgctgtcttcttggtggattgacctcttcatcattatgcaatgatcctctctgtctctgttaactttctttgctctgaagtttactttacctgacattactaagccctatagctttcctttgattcatgtttgcatggtctttttccattctttcctttcaactacttatatttcaagtaactctatagtttatataattagataatgctttttaaaatccagtctaccaatctctgtcctttaattggtatatttagatcttttgcttttaatgaactaatttctgcattagagtttaagtctgtcattttatctttcatttattttatctttctgagaattacttgagtgctctttagaattcttttctgatttatctatagggcttttgaatgtatctcttagaacttaagtattattagtgattgctctatgtattactatatatatctttatctatgtagttgatatctacatgcaccgttttaccaattgaagcgaagtgtagaaactttacctctctttagtctctttactctctgccatttataaaacacttacattaaaaaattcttgtacatatgtttgaaaagcacatttgacattgttatagcatttgcttcaaatggcaaaataatttagaaaactcattaagaaaagtatttacccatatttttactctttccttctctctgaagttccaagatccctttttttctgtttgtttgtttgttttgagatggagtttcgcttttgttgcccaggctggagtgcaatggcgtgatctcagcttactgcaatgtccacctcctgggttcaagtgattatcttgcctcagcctcccgagtacctgggattataggcacccaccatcacacctggctaattttttgtatttttagtagagacggggtttcaccatgttaggcaggctggtctcgaactcctgatgtcaggtgacccacccgcctcggcctctcaaagtgctgggattacaggtgtgagccaccgtgccctcccaagatccattcttttatcacttcctttctgtttagataacttagctatttttttttttttgagacggagtctcactctgttgcccaggctggagtgcagtggcacgatctctgctcactgcaagctccgcctcccaggtacccaccattctcctgcctcagcctcctgagtagctgggactacaggctcctgccaccacgcctggctaattttttgtatttttagtagagatggggtttcaccatgttagccaggatggtcttgatctcctgaccttgtgatccaccctcctaagcctcccaaagtgctgggattacagacgtgagccaccgcgcccggccaacttagctactttttaagggtaggtttcctggtaacaagttctcttaattttcctttatctgagaatgtctcaatttcattcctgaaggatattctccctgaacacagaattctgggttgacagttcttttcttccatctcctgaaaaattatcatgccacttccttctggcctccatgatttctgataaaaaaaaaaaatctgtgattcaaattgttcttcccttataggtgggttttttttttttttttgaaatggagttttgttcttgtcacccaggctggagtgcagtggcgtgatcttggctcactacaacctccgtctcctgggttcaagcaattctcctgcctcagcctcccgagtagctgggattacaggtgcccgccaccatgcccagctgattttttgtatttttagtagacacagggtttcgccatgttgggcagtctggtctcaaactcccaacctcaggtgatccacctgcctctgcctcccaaagtgctgggattacaggcatgagccaccgtgcccagccgttcttcccttataggtaacatgtcatttatcttttgcttctttcaagttttttttttttttgtatttagtgttcaaaaattttactatgatgtctcttgctgtggacttctttggatttatactgtttgggatttgctcagtttctgtcatgtgtgggtttacacctttgaccaaatttgggaaacttcttaccaaatatttctttgaatactttttcaaggcctgccatctttctcctcttcttccaagacacaattgttaaatattttattatagccccacaaaccgtgaagctctgttcatttgtttcccccagtctactctttgttgctcagatttggtgattcctatttgttttatcttcaagttcactgattttttcctctgtcccttccattttgtctctggggacaggggcttctagggtgtctagcccattgaagtaccttacatttcagaatttataatttttggtagactgctaatggcccatattcagggtccactagcatcctaaaaacctatctactgagttttacattttgactgttctatttttcagttctaacatttccatttgttccttaataccttcaattttttgctaagactttctattttttcatttttaaaaatcatgcttgtggctgggtgctgtggctcacgcctgtaatcccagcactttgggaagcctaggcaggaggatcatgaggtcaagagatcgagaccatcctagccaacatggtgaaaccccgtctctactaaaaatacaaaaattagctgggcgtctctaataaaaatacaaaaatactaaaaatacacacattactcaggaggctgaggcaagagaatcgcttgaacccggagggtggaggttgcagtgagccgaaatcaagccactgcactgcagcctggcgacagagtgaggccccatctccaaagaacagaacagaacagaacataacataacataacataacataacataacataacataacataacaatcatgcttgtaattgctcattgaaacattttcatgatggctgtcagaaaatcattgttagataattctaacaactgtgtcatcttagtgttggcatgtgttgatcaaattttcccttaagttgagattttcccaattgttggtataagcagtgattttaaattcaattttggacattttggatattaacttacgagactctggatcttatttaaatcctctatttagcaggccttctttattaccattctggtatggaaaaaatgacactgctaggtggggttgaacatcaagttccctccatgacacctaagggaaagcaacacctctgtattgctaggcagtggcaacaattccagctccctgctgagtctctcctgatactgccctggttggtatcaggcatgcatgattactactccccacgtggctttcactgacactttggtaagaagaccccgttattgctgggtgtgcaaaaatgtcctgactctccaccaggcctcttctgatgccacacagtggggagctggaggggcacttcattaccactccaccgtgatgaaagttccagttcctcacttagccttctctaacaatgcctcagcaaggattagggaggagggaaggctgtgggttttttgttgttgttgttgttagcttctttttgtactgtgcagttggagtagagagattcctgttttaaagttttctaagtttgttttttttggtccttttgctaaaaagaacagacatttgggggacattttggctgtgcctataggcatttccagtttgctgacttcttcagcccaagactgggatatatgagcaaagagaaaacccagggacctcacagctatgccattccagagatctcaaggtccctaaccagcctgctgcttctctccacctttcagattcattttatgtttgttttatatatgtgtccaaggttgttggctgtacctagcaggaagaacgcagagaaatacatctactccatctttccagaatccagagtccaaacttagttttaaaaatattttgttcaattttcctggttattctcaatggatgggccggtctgcaataagcaactttgccattactgaaagtaaagaccttggtcattaaaataaaacaaaaaaaattgttctaattcacattatttgctttgatttgttcttcatatacataactctcttaactacttcctgaagataaatttctatactgtcctccaaaaagaatgacaaagaaactggaaaaattccgtattgagagcaaaaaatgccagttagaaaatgtatatcctcattgggaattactaacaaaaatccaactgttttaaaaaaatgacatatggatactaaatagtaaagttgtaaaaagaaaaaacctgacagatgctttcaaaattatttatatataagtacacagacatattctaacctatttttatctttggcataatgtaaaggaaataatccacacacaataattttacctaataatgttattgtgcaaaatttctcacaaagataaaaagtttcatattgggtattaagttgataataaaggtacctgatttttttgacattgagatgaatttcaattctacagaaaaagtcttcattgcagtactgtttgtaagagaaaaggacttaaatctacacatacatgcccatcaatagagaaactgatgaaataaactatggcacagcagtacaacaaaatactatgctactatgcagtagtaaaaatactgggaaacctttctatgtactgacgaaaaaaatctcaaaaatatattcctaaatgaaaaaagcaagtgtctacagcctgttatatcttgtataagaaaggggtgaaatgcatggaatactatgcagccataaaaaaggatgagttcatgtccttttcagggacatggatgaagctggaaaccataattctcagcaaactatcacaaggacagaaaaccaaacactgcatgttctcactcataggtgggaactgaacaatgagaacacatggacacaaggtggggaacatcacacacaggcctgtcaggggctggggggctgggggagggatagcattgggagaaatgcctagtataaatgacaagttgataggtgcagcaaaccaacatggcacatgtatacctatgtaacaaaccttcatgttgtgcacatgtaccctagaacttaaagtatatatatatgtatatatataatatataaaagaaaggggtgaaataaagctgcatatgcatatttggtggtatctgcataatgaaacagaaatacagaaactgcataatgaaacagaaatactacaccttgtagttaataaggtgattaactacaaggcaggggagaaaagggtcataggaacaggtagaaatggaacccctgaatgtaaacatagtcatactgctttgattttgggaccatttgaaactattgcctagtttagataaatcctataggaaagaaattggtttaacttttattttaaagctgaatttaaaacacaatccacaattcaaaatccagaagacaaatgtttgccaccagttcctgcatccttctgaatcgtgatccaagtcctcacgtgtgatcttagtcttgctgtgttctctcactgcaaactgcagtcctaccacagccgcatgtcttccaaatgctaatgctatcagtcccattaatcacaaaatcttctcattggaagggactctatcctgtcatccaatccagcctcagccaggcaaaagaacagcgataggccagcacagggtgatcactacttgtgaacacacaagacaaagctacagatgccactgatttcttcccctgactagatggccatggtggatatctccttcctgaaaatgtacatacggatccaccagttgtctggaatcaatttggtagccatctgaactctaaacatgcattagctaatatcataatctaagagacgattaaaattctaggaatggcaattgttctgccaaagcttcatttagagaaaatcagttttggaaaaaatatttcccctatggatcatttttcaaaactagctgcctgaatcaaagagaaaatggctagtcaaactcatttatcctcacaataaaataacgcagcaaggcaatgaataggcgaagtcagcagagaatttcattcatgtccttaatcaaagggtcagtgctattcattaccacataaacattgctcatttccttatatccattcttgagatatttattgcagagttaaattaaatatgatcactttctcccttactctgactttaataacctgaaggataacttcttaaaatttgaaactcaataaatattttcatttcactgcatttttaataatctagaaaaacagtgaagattcatttaggcaaagtcactaccatttacatgaaacctgacatttcctaatgaaaacagaactaccaattttctctactgcaaactagcaactgtaccttaaatatttataaaccagacccattccaattttatttgggtttaacatattacactgaataccgggcactgaagtctgcagcaatataattccagtttcttcttccattcatggggagggaaaagaggacagggtggctgatgtactggttgagaatgcaggctctagagtctgagtgcctggattcaagaccagcctgcacagactctaattgtgactggtctttgtgtctcagtgctcttagctataaaacaggaacaataatagtatcaaagcattctgaggattaattaaaataattcatggaaactgtttcacacagtgcctggcctagtcactgtcaataaaaatcatctacttttggccaagagcagtggctcatgcctgtaatcccagcactttgggaggctgaggcaggcggaccacgaggtcaggagatcgagattatcctggctaacacggtggaaccccgtctctactaaaaatacaaaaatttagctgggcgtggtggcgggtgcctgtagtcccagctacttgggaggctgaggcaggagaatggcgtgaacctgggaggtggagcttgcagtgagccgagatcgcaccactgcattccagcctgggcaacagagtgagactccgtctcaaaaaaaaaatcatctacttttattactcccttacatgtgcctcacactcctgctcagcgggattccttgctgcctcatgaacgcactgtgtgcttctgtccttccgagtctcgttcttattgttctgagtatggaccacccaactgcttattccctggcctgatgaaatcttcttcccctccaaggcccatctcattctgatccagttaaccattatgacttgtccccactggcttgtacctccatgctctttgtttgcaattctcttattagatttattatattaaccctgacatccattacagtaatttatgaccctgtctccttcatggataaggactatgtcttactagcctattttgttctctacagtatttaacaacctgcagagtcatacttaaaaagcatttattggatttgaaacagtcctgcttacttgtgaaagtgagcataatgtatcaactacaacagaagctctctcataggatatgtataaagattaaatgagataatgtatgtaaagggctactaacaagttattatcttattatcaacagctcctatttcttcaacgttttatcacatgctcagcactgtactaagtgctttacatgtgggaacgccttaaaccagggcttgacataatcatctttcattccccttgcacagagtagatgaaatataggtatttttaaatgactgttgaagaaaaatggctctgatatggcaaatttaaaagtatctgaattttctacattatttaaaagctgacttgattaaataacaaaattcctaatacttcacagtgtagttttttaaattatttatttttttagagacgggggtctcattatgttgcccaggctggtctcgaactcctgggctcaagcaatcctcctgcctcagcttcccaaagtgctgggattataggtgtgaatcacatcacccagcctacagcatagttttaagcatcagaatattccaatattctacactgaattcctagttagaaattaaaaaaataaagatgacagatttttaaaaaagaaattaaaaagaaagtaattcgagatatgtaaatgggatcttggaaatcttaaaattgaagagctgtattatgcaaatttatatccagtgctcagggctattaagggatgacaggtaagaaaaacagctctgggaatttctgtatgccttaatccccttgactgtaaaataggccaatagttggaatctattgcacagggttgctgtgaggattaaatcagattatgccagtaaagtgattagaacatagtaaaatgaaatatgtatttatttcatttgtttttatcatgagatgcccccaactgtactgtaagtgaagatcaaggtgcctgacagtaagaacacaaattttctaaagcatcaagtgttataaattcttattggtgtgaaaatattaggaggttagttttgtcttctcattgccattttaacaactgacatgggcatcactaagtagtgaaaggcgggcgtggtggctcacatctgtaattccagcactttgggaggccaaggagggtggatcacctgatgtcaggagttcgagaccaccctggccaatgtgatgaaaccccatttctactaaatatgcaaaaattagccaggagtggtggtgcatcccagtaatcccagctgaggtggaagaactgcttgagcccgggaggcagaggctgcagtgagccgagatcgcgccactgcactccagcctgggtaacagaaacagagaccctgtctcaaaaaaaaaaaaaaaaaaaaaaaaaaaaaaaaaaaaaaaaaaagtagtgaaagtcccagaaaggcatcaggatggagaatgtaaaagcttggataagctaaaaaaattagttcgttttctaaaataagtttcttcaggaattgaaatgcatacttcagctcccacatatatatcactgtcaagttaaataaaaaaattattagatttttgtgcagtgctttcttttatatttaatagataaaattttaatttttctgttcactttagcttttgatagtggtaaaatgaggaattaaagcaccaaagatttgaaaggcaaaatgccacaatataggaaataaattgtgtcttcttttacaaagcatggttatgtaagacagttaataaaaacataaaatatattaaaagaatcatttaaaccaaatataaaaagagatttaaagctccttctgatgagtccagttt

SEQ ID NO: 579 - protein, 699 aa, Homo sapiens
  ref <308>: DATABASE ACCESSION NUMBER: SWISS-Prot / AAC83179
  ref <309>: DATABASE ENTRY DATE: 2002-10-01
MTSLKRSQTERPLATDRASVVGTDGTPKVHTDDFYMRRFRSQNGSLGSSVMAPVGPPRSEGSHHITSTPGVPKMGVRARIADWPPRKENIKESSRSSQEIETSSCLDSLSSKSSPVSQGSSVSLNSNDSAMLKSIQNTLKNKTRPSENMDSRFLMPEAYPSSPRKALRRIRQRSNSDITISELDVDSFDECISPTYKTGPSLHREYGSTSSIDKQGTSGESFFDLLKGYKDDKSDRGPTPTKLSDFLITGGGKGSGFSLDVIDGPISQRENLRLFKEREKPLKRRSKSETGDSSIFRKLRNAKGEELGKSSDLEDNRSEDSVRPWTCPKCFAHYDVQSILFDLNEAIMNRHNVIKRRNTTTGASAAAVASLVSGPLSHSASFSSPMGSTEDLNSKGSLSMDQGDDKSNELVMSCPYFRNEIGGEGERKISLSKSNSGSFSGCESASFESTLSSHCTNAGVAVLEVPKENLVLHLDRVKRYIVEHVDLGAYYYRKFFYQKEHWNYFGADENLGPVAVSIRREKPDEMKENGSPYNYRIIFRTSELMTLRGSVLEDAIPSTAKHSTARGLPLKEVLEHVVPELNVQCLRLAFNTPKVTEQLMKLDEQGLNYQQKVGIMYCKAGQSTEEEMYNNESAGPAFEEFLQLLGERVRLKGFEKYRAQLDTKTDSTGTHSLYTTYKDYEIMFHVSTMLPYTPNNKQQ

SEQ ID NO: 580 - DNA, 6331 bp, Rattus norvegicus
  misc_feature (1)..(6331): n=a, c, g or t
  ref <308>: DATABASE ACCESSION NUMBER: EMBL / AF026505
  ref <309>: DATABASE ENTRY DATE: 2000-03-03
gaattcggcacgaggaaaaatctttggagagaagagagccacagtgagcacgctagtgcacaattattgcagccacgtgtgcccgcaagctggccctgcgacaagctgttgagtgctgttgcaattagctgattggagaacggggactgcagggtgataatgctgcgtctccgctcgcgggcaccaggaaagggttttgtctcgggaaggcaagtcttccctgcacagttatctcagcagctccctagctgaagagaactgggggctctaaagggagggggtcgcactgtgcgagcacagattctgtgccaggctgttgcttatgaaccgcacgtctgggaaagcaggtgtgtgctcggacgggcactgggctggaacgcaggcggcggctctcgggttcacctgcttcctgttaacagactgttggctcacagagcatctgctcttacacgctgaaactgcggctgagaaagggttcccggcatcccacttgactgacggaggcacttggattggacttaatcttaaacctctggaggtcaagaccttttaaaaagggctaaataaacaatctacatgttaaaggccagcgactcctacttcctctgttggagcaactgtgaagtccagcctcttctaggaaaactgaagactttaataacacaccgttcaaggtgaaaatgaatacagatagcggtgggtgtgctcgcaaacgtgccgccatgtctgtcacgttaacatctgtgaagagagttcaaagttctccaaacctattggctgcagggcgtgagtctcactctccggactcagcttggagatcttacaatggtcgaaatccagagacactgaacggagatgccacatattcctctcttgcagcaaaaggttttagaagcgttcgaccaaacctgcaagacaaaaagtcaccaacccagagccatatcactatcaacggcaactctggtggcgccgtgagtccagtgagttactatcagaggccattctccccttctgcatactccctcccagcctcactcaactccagcattatcatgccacacggcaggtcgcttgattctgcggagacatattcccagcatgcccagtcgctagacggcaccatgggaagctccatcccactctacagatcctccgaggaagagaagagggtcacagtcatcaaagccccgcattacccagggatcggccctgtggatgagtctggaatccccacagccattagaacgacagttgaccggccgaaggactggtacaagacaatgtttaaacaaattcacatggtacacaagccggatgaggacacagacatgtataatactccttacacatacaatgcaggtctgtacaactcgccctacagtgctcagtcacatcctgctgcaaagacccagacctacagacctctttccaaaagccactcggacaatggcaccgatgcttttaaggaggcaccctcaccagtgcctcccccacacgttccaccacgaccaagagatcagtcttcaacagaaaagcatgactgggatcccccagacagaaaggtggacaccaggaaatttcgatcggagccaaggagtatttttgaatacgagcctgggaagtcatccatcctgcagcacgaaagacccgtctccgtctaccagtcttccatagacagaagcttggaaagacccagcagctctgcaagcatggcgggtgactttagaaaacggaggaagagtgaacctgcagtgggcccgcccaggggcttgggggatcacagttcaagcaggaccagccccggccgggcagacctcccaggatcaagttccacctttaccacgtctttcattagttcttctccttcctctccctcgagagcacaaggtggggatgatagcaaaatgtgtccgcccctttgcagttactcggggctcaatggctcgccctctagtgagttagagtgctgcggcgcttatagaaggcacttggacgtcccccaggactctcaaagggccatcactttcaagaacggctggcaaatggcccggcaaaatgcagagatctggagtagcactgaagaggcggtttcccccaaaatcaaatcacgaagctgtgacgatctcctgaatgatgactgcggcagcttcccagaccctaaaaccaagtcagaaagcatgggttctctgttatgtgacgaaggctccaaagagagcgaccccatgacgtggacttccccctacatcccggaagtgtgcgggaacagcagatctaggctcaaacataggtcagcccataacgccccaggcttcctcaaaatgtacaagaaaatgcaccgcatcaaccgcaaggatttgatgaactcggaggtcatttgctctgtgaaatccaggatccttcagtacgagaaggaacagcagcacagggggctgctccatggatggagccagtcgtccaccgaggaggtgcccagggacgtggtacccactcgcatctcggagtttgagaagctgattcagaagtcaaagtctatgcccaatctaggagatgaaatgttatctcctgtaaccctagaacccccacaaaatggtttgtgccccaagaggcgattttctattgagtctctgctggaggaggaaactcaggtccgacacccttctcagggtcagcgaagctgcaagtcgaacaccctggtacccatccacatcgaggtcaccagcgatgagcaacctagaacacatatggagttttccgacagtgaccaagatggggttgtgtctgaccacagcgataacgtccacgtcgaaaggtcgtccttttgtagtgaaagtgacttcgaccacttttcattcacatcctctgaaagtttctacggatccagccatcaccaccaccatcaccaccaccatcacggacacttcatcagttcctgcaaaggccgatgccccgcttcttacactcgatttaccacgatgttaaaacacgaaagagctaagcatgaaaatattgaccgacccagaaggcaagacatggatcctggcctatctaaactcgcgtttctagtcagccctgtgcctttccgaaggaaaaaagttttgactccccaaaaacaaactgagcaggcaaaatgcaaagcctcggtagttgaggctctggactctgcccttaaagacatttgcgaccaaataaaagctgaaaagcggagaggaagcttgccggacaacagcatcctgcacaggcttattagtgaactgctgccacagattcctaagaggaattcatctcttaatgctctaaaaaggagccccatgcaccagcctttccacccactgcctcaagatggtgctattcattgtcccctgtaccaaaatgattgtgggagaatgcctcacagtgcctctttcccagacgtggacacgaccagcagctaccacgcacaggactatggtagtgtgctgagtctccaagatcacgagtcccctagaagttactcgtctactctgactgacttgggaagaagtgtatcacgggaacgaagaggaactccagaaaaagaggtaaaattgcctgcaaaagctgtctatgatttcaaagctcagacttctaaggagctgtcatttaagaaaggagacaccgtctacatcctcaggaaaattgaccagaactggtatgagggggagcaccacggaagagtgggcattttcccaatctcatacgtagagaaactaacacccccagaaaaagcgcagcccgcgagaccaccacccccagtccagccgggagagattggagaagccatagccaagtacaacttcaatgcagacacaaatgtggaactctccctgagaaagggtgacaggattattcttctcaaaagagttgatcaaaactggtatgaaggtaaaatcccaggaaccaacagacaaggcatcttccctgtctcctacgtagaagttgtcaagaggaacacgaaaggttctgaggattaccccgaccctcctctaccccacagctactccagtgatagaatttacagcctaagctccaataagccacagcgtcctgtgttctctcacgaaaacattcaaggtggaggagaaccgtttcaggctctgtataactatactcctaggaatgaagatgagctggaactcagagaaagtgatgtcgtagatgtcatggaaaagtgtgatgacggatggttcgtgggaacttcaagaagaaccaaattctttggtacttttcctggaaactatgtcaaaaggctgtgactcacctcactcctaatttatgccacatttcagccacacatctgcattaacccacctgaaacgtcccaggaggcctgttgctgcctcgccttatggtttcccaatagcccattaccatctccatctgctgccaccaaatcaccagcagagggactgccgctgtgagccttagggaggctgggagccttagagaaaagtggcaaaacttacacccacataaatattcagtctcctgctttctgccctgaactttgaaatgcctgtatatggaatcagaatgaaaatgatcatactttcaaaaaagtgaaataattaaggaagaaagaaagagaaaagaaatagagagactcttcaggaggctgtctggcctcatggctgaatctccacctctctggaaggtgtactgtcctcaggaagcctgaagattgttttttttctgaaatgctatggttccagttctcactctcatctaggcggtatattttcctttcacgagtttgcctagcgctcgggtttacactacatgacaactatacttcggctgttgtttgcttgcacttattattccttgtttcatgcacagtgatcacaaaatccagagtgcctagggaaggttcactggttccactggttcgagtgtgatttttgttgactgcattatattttcacacggggaggggggtctttcccctgcccacttttttgtgcttattagaagtgcaaacagtgagcaactgagagctcagccacaccacaggacaaatccgtgttgtgaattcgcattgctgttttgtgtattaaggtgtaatcatcagcttcatggacaacaagctattagtgatttctttacctgttaaaacttacaggcagtgctagtgagttaggcagaaagntgacagtaataccagtaggtgagcttcactgcgtgcatgctcacacgtttgagnttgtatgaggacatataattcatatgctatgttgtacattttatggaaatataagagaatcccacattattttatagagtacttcaggagcatcctaagtgttaaggctggctttagcaaggattatgatcaatacaactatttttactacaataattatttttcttctatgagacccagaatcctgactccacttgcagacaggaatatatatgttgagcctgacttttttttctggtatatgtaaaatacttcccaggaatacattgggcacttttgggaataatggttaaatcattcaggttgtgcttcctgcccccaaaacagatctacaaaatgataccaaacctgaaagatttaacggatttacggtgcctgcattccacacaacctcacacttagctttgtatttcaaatgaatttgcataaaanctgttcactttancaccttatagtcaaaactttttatggctttcctcccatgggcaatgcttgatcttcccaacatataaactctggcatattttgttcatatgtttgttcctttttggttgtacagactatttacttgttcagaaaacatcgagatctcccaatttgttctttaccccgcccttaaaaggaatttaaactctttcagaagatcgcccttcaccacatctccacagatcacaagctaaggtgaatctggaatatancgtctgcacaaaattttgtgactcagaaaganctttgtaactacnctgaaatacatataataacaatgttccagttacagaggaatattgttggggcaggaagtgaagaaacancttcaagaaacccactttacnctccagttcacaactagctttatattagaaaaacttgggattggaaagtcagccagccagccggccacctgcagcnttgttgataaatgaatactttttcacaccatttatgaaaacaaancttcaactctgttgcctgttatatttaagaaaaattgctgtttctactcnctgtatctgattttaaaaggaaaaaaatattcacgcctggctttcaggacattgactttgaatncttacgagcaaaggncgttgtgtttttcttgcncgtgccgaattc

SEQ ID NO: 581 - protein, 1196 aa, Rattus norvegicus
  ref <308>: DATABASE ACCESSION NUMBER: SWISS-Prot / AAB81527
  ref <309>: DATABASE ENTRY DATE: 2003-02-01
MNTDSGGCARKRAAMSVTLTSVKRVQSSPNLLAAGRESHSPDSAWRSYNGRNPETLNGDATYSSLAAKGFRSVRPNLQDKKSPTQSHITINGNSGGAVSPVSYYQRPFSPSAYSLPASLNSSIIMPHGRSLDSAETYSQHAQSLDGTMGSSIPLYRSSEEEKRVTVIKAPHYPGIGPVDESGIPTAIRTTVDRPKDWYKTMFKQIHMVHKPDEDTDMYNTPYTYNAGLYNSPYSAQSHPAAKTQTYRPLSKSHSDNGTDAFKEAPSPVPPPHVPPRPRDQSSTEKHDWDPPDRKVDTRKFRSEPRSIFEYEPGKSSILQHERPVSVYQSSIDRSLERPSSSASMAGDFRKRRKSEPAVGPPRGLGDHSSSRTSPGRADLPGSSSTFTTSFISSSPSSPSRAQGGDDSKMCPPLCSYSGLNGSPSSELECCGAYRRHLDVPQDSQRAITFKNGWQMARQNAEIWSSTEEAVSPKIKSRSCDDLLNDDCGSFPDPKTKSESMGSLLCDEGSKESDPMTWTSPYIPEVCGNSRSRLKHRSAHNAPGFLKMYKKMHRINRKDLMNSEVICSVKSRILQYEKEQQHRGLLHGWSQSSTEEVPRDVVPTRISEFEKLIQKSKSMPNLGDEMLSPVTLEPPQNGLCPKRRFSIESLLEEETQVRHPSQGQRSCKSNTLVPIHIEVTSDEQPRTHMEFSDSDQDGVVSDHSDNVHVERSSFCSESDFDHFSFTSSESFYGSSHHHHHHHHHHGHFISSCKGRCPASYTRFTTMLKHERAKHENIDRPRRQDMDPGLSKLAFLVSPVPFRRKKVLTPQKQTEQAKCKASVVEALDSALKDICDQIKAEKRRGSLPDNSILHRLISELLPQIPKRNSSLNALKRSPMHQPFHPLPQDGAIHCPLYQNDCGRMPHSASFPDVDTTSSYHAQDYGSVLSLQDHESPRSYSSTLTDLGRSVSRERRGTPEKEVKLPAKAVYDFKAQTSKELSFKKGDTVYILRKIDQNWYEGEHHGRVGIFPISYVEKLTPPEKAQPARPPPPVQPGEIGEAIAKYNFNADTNVELSLRKGDRIILLKRVDQNWYEGKIPGTNRQGIFPVSYVEVVKRNTKGSEDYPDPPLPHSYSSDRIYSLSSNKPQRPVFSHENIQGGGEPFQALYNYTPRNEDELELRESDVVDVMEKCDDGWFVGTSRRTKFFGTFPGNYVKRL

SEQ ID NO: 582 - DNA, 1569 bp, Homo sapiens
  ref <308>: DATABASE ACCESSION NUMBER: EMBL / AF396457
  ref <309>: DATABASE ENTRY DATE: 2001-07-31
atgaaagcaacaacacctttgcagacagtcgaccggcccaaggactggtacaagacgatgtttaagcaaattcacatggtgcacaagccggatgatgacacagacatgtataatactcctacacctcacatgaaatatacatacaatgcaggtctgtacaacccaccctacagtgctcagtcacaccctgctgcaaagacccaaacctacagacctctttccaaaagccactccgacaacagccccaatgcctttaaggatgcgtcctccccagtgcctcccccacatgttccacctccagtcccgccgcttcgaccaagagatcggtcttcaacagaaaagcatgactgggatcctccagacagaaaagtggacacaagaaatttcgggtctgagccaaggagtatttttgaatacgaggacagaaaagtggacacgagaaaatttcgatcggagccacggtctatttttgaatacgagcctgggaagtcatccatcctgcagcacgaacgacccgtctaccagtcttccatagacagaagcttggaaagacccagcagctctgcaagcatggcgggtgactttagaaaacggaggaagagtgaacctgcagtgggcccgcccaggggcttgggggatcacagttcaagcaggaccagccccggccgggcagacctcccaggatcaagttccacctttaccacgtctttcattagttcttctccttcctctccctcgagagcacaaggtggggatgatagcaaaatgtgtccgcccctttgcagttactcggggctcaatggctcgccctctagtgagttagagtgctgcggcgcttatagaaggcacttggacgtcccccaggactctcaaagggccatcactttcaagaacggctggcaaatggcccggcaaaatgcagagatctggagtagcactgaagaggcggtttcccccaaaatcaaatcacgaagctgtgacgatctcctgaatgatgactgcggcagcttcccagaccctaaaaccaagtcagaaagcatgggttctctgttatgtgacgaaggctccaaagagagcgaccccatgacgtggacttccccctacatcccggaagtgtgcgggaacagcagagaattcatgttaagcaaatggatattcgtggaatctctggatggaggaccattttggaaagtgctaaaggaatatctagagcgagtgaggaatctatgagaaagatgtaaagtgcaagacgtaaattttttggttgaggagatgatcactgatttaaatgtataacagagtagatgccccccccctcaaaaacgcataaccccccccttaccctgacatttagctttgaatatgcacaaaatagtttgtggggagaatagaaccctatgtctgaaagtatatgtgttgggatttcatcccatatatggtggtagccgccaactcagagataggtcgttctgtaagattctcacaacaaaatgtataacacaaacattcctgagtcaaaatgtacaacacaaggtcacgaaaccgcaagcagggcgccgtgataagtcc

SEQ ID NO: 583 - protein, 1100 aa, Homo sapiens
  ref <308>: DATABASE ACCESSION NUMBER: Refseq / NP_066547
  ref <309>: DATABASE ENTRY DATE: 2001-12-18
MSYYQRPFSPSAYSLPASLNSSIVMQHGTSLDSTDTYPQHAQSLDGTTSSSIPLYRSSEEEKRVTVIKAPHYPGIGPVDESGIPTAIRTTVDRPKDWYKTMFKQIHMVHKPDDDTDMYNTPYTYNAGLYNPPYSAQSHPAAKTQTYRPLSKSHSDNSPNAFKDASSPVPPPHVPPPVPPLRPRDRSSTEKHDWDPPDRKVDTRKFRSEPRSIFEYEPGKSSILQHERPASLYQSSIDRSLERPMSSASMASDFRKRRKSEPAVGPPRGLGDQSASRTSPGRVDLPGSSTTLTKSFTSSSPSSPSRAKGGDDSKICPSLCSYSGLNGNPSSELDYCSTYRQHLDVPRDSPRAISFKNGWQMARQNAEIWSSTEETVSPKIKSRSCDDLLNDDCDSFPDPKVKSESMGSLLCEEDSKESCPMAWGSPYVPEVRSNGRSRIRHRSARNAPGFLKMYKKMHRINRKDLMNSEVICSVKSRILQYESEQQHKDLLRAWSQCSTEEVPRDMVPTRISEFEKLIQKSKSMPNLGDDMLSPVTLEPPQNGLCPKRRFSIEYLLEEENQSGPPARGRRGCQSNALVPIHIEVTSDEQPRAHVEFSDSDQDGVVSDHSDYIHLEGSSFCSESDFDHFSFTSSESFYGSSHHHHHHHHHHHRHLISSCKGRCPASYTRFTTMLKHERARHENTEEPRRQEMDPGLSKLAFLVSPVPFRRKKNSAPKKQTEKAKCKASVFEALDSALKDICDQIKAEKKRGSLPDNSILHRLISELLPDVPERNSSLRALRRSPLHQPLHPLPPDGAIHCPPYQNDCGRMPRSASFQDVDTANSSCHHQDRGGALQDRESPRSYSSTLTDMGRSAPRERRGTPEKEKLPAKAVYDFKAQTSKELSFKKGDTVYILRKIDQNWYEGEHHGRVGIFPISYVEKLTPPEKAQPARPPPPAQPGEIGEAIAKYNFNADTNVELSLRKGDRVILLKRVDQNWYEGKIPGTNRQGIFPVSYVEVVKKNTKGAEDYPDPPIPHSYSSDRIHSLSSNKPQRPVFTHENIQGGGEPFQALYNYTPRNEDELELRESDVIDVMEKCDDGWFVGTSRRTKFFGTFPGNYVKRL

SEQ ID NO: 584 - DNA, 6331 bp, Rattus norvegicus; identical to SEQ ID NO: 580
  misc_feature (1)..(6331): n=a, c, g or t
  ref <308>: DATABASE ACCESSION NUMBER: EMBL / AF026505
  ref <309>: DATABASE ENTRY DATE: 2000-03-03

SEQ ID NO: 585 - protein, 1196 aa, Rattus norvegicus; identical to SEQ ID NO: 581
  ref <308>: DATABASE ACCESSION NUMBER: SWISS-Prot / AAB81527
  ref <309>: DATABASE ENTRY DATE: 2003-02-01

SEQ ID NO: 586 - DNA, 1569 bp, Homo sapiens; identical to SEQ ID NO: 582
  ref <308>: DATABASE ACCESSION NUMBER: EMBL / AF396457
  ref <309>: DATABASE ENTRY DATE: 2001-07-31

SEQ ID NO: 587 - protein, 1100 aa, Homo sapiens; identical to SEQ ID NO: 583
  ref <308>: DATABASE ACCESSION NUMBER: Refseq / NP_066547
  ref <309>: DATABASE ENTRY DATE: 2001-12-18

SEQ ID NO: 588 - DNA, 1242 bp, Rattus norvegicus
  ref <308>: DATABASE ACCESSION NUMBER: EMBL / AF026529
  ref <309>: DATABASE ENTRY DATE: 2000-03-03
ggcacgagaagagaacagatcgctttggaaaccggactgcaggattgtgatccagttctgagctggtgataaacactccttgtgacttttggtcaattcagctaccagattccagccaacatgaccctcgcagcctataaggagaagatgaaggaactcccactagtgtctctgttctgctcctgttttctgtctgatcccctgaataaatcatcctacaaatatgaagcagatacggtagacctgaactggtgtgtcatctctgatatggaagtcatcgagctgaataagtgtacctcgggccagtcctttgaagtcatcctgaagccaccttcctttgacggggtgcctgagtttaatgcctccctcccaagacgtcgagacccatcgctagaagagatacagaagaagctagaagcagcagaggagcgaaggaagtaccaggaagctgagctcctaaaacaccttgcagagaaacgagagcatgagcgtgaggtaatccagaaagctatcgaggaaaacaacaacttcatcaagatggcgaaagagaagctggcccagaagatggagtccaataaggaaaaccgggaggcccatctggctgccatgttggagcggctgcaagagaaggagccgcctgctgcgcggtgactcccgggaccgatcggtggcctcgtcccatggacaagcacgcagaggaggtgcggaaaaacaaggagctgaaggaagaggcctccaggtaaagcccagaggccaaggaagtttccaggacagccggacagctcccgcagcaacctggttccagcagcatcggccgctggctgctctcccagcactggggttcggggggaggggggtggccaaaggggcgtttcctctgcttttggtgtttgtacatgtaaaagattgaccagtgaagccatcctatttgtttctggggaacaatgatggggtggagaggggacagagagtgtgtggaaaaggaggtgaagatgacccgaggactttgtacactgtccactgactgcagacttgccaaggcccccgcttttcagcctctgcctggacattcggcctccaggttcctagtggagagaagatgtgacagaagttcagagtgaagggccgagtcctggtggggtggtgtgcagggccagcaggacgagcccgtctggatggagtgaaacctacctgagcgggtgggataaggtctgtgtgcgtctgttcattgtcatcttttct

SEQ ID NO: 589 - protein, 189 aa, Rattus norvegicus [sequence omitted]

SEQ ID NO: 590 - DNA, 694 bp, Homo sapiens
  ref <308>: DATABASE ACCESSION NUMBER: EMBL / AJ303455
  ref <309>: DATABASE ENTRY DATE: 2001-01-16
ttggtgacagcgtcccaagctggtgacagacccactctgtaactttcagctagattcagccaccagatcccagaaacatgacccttgctgcctacaaagagaagatgaaggagctcccgctggtgtccttgttctgctcctgcttcctggccgatcccctgaataagtcgtcctacaaatatgaagcagacacggtggacctgaattggtgcgtcatttccgacatggaagtcatcgagctgaacaaatgcacctcgggccaatcctttgaagtcatcctgaagccaccctcctttgatggggttcccgagttcaacgcctccctgccaaggcggcgagacccatccctggaagagatccagaagaaactagaagcggctgaggagcgaaggaagtaccaggaagcggagctcctgaaacacctagcagagaaacgggaacatgagagagaggtgatccaaaaggccattgaggaaaacaacaacttcatcaagatggctaaggaaaaactggcccagaagatggaatccaacaaggagaacagggaggcccacctcgccgccatgttggaacggctgcaagagaaggacaagcacgccgaggaggtgcggaaaaacaaggagctgaaggaagaggcctccaggtaaagcctagaggccaaagaactttccaggtcagccggacagctccagca

SEQ ID NO: 591 - protein, 189 aa, Homo sapiens
  ref <308>: DATABASE ACCESSION NUMBER: SWISS-Prot / Q9H169
  ref <309>: DATABASE ENTRY DATE: 2002-06-15
MTLAAYKEKMKELPLVSLFCSCFLADPLNKSSYKYEADTVDLNWCVISDMEVIELNKCTSGQSFEVILKPPSFDGVPEFNASLPRRRDPSLEEIQKKLEAAEERRKYQEAELLKHLAEKREHEREVIQKAIEENNNFIKMAKEKLAQKMESNKENREAHLAAMLERLQEKDKHAEEVRKNKELKEEASR

SEQ ID NO: 592 - DNA, 3091 bp, Rattus norvegicus
  ref <308>: DATABASE ACCESSION NUMBER: EMBL / AF026554
  ref <309>: DATABASE ENTRY DATE: 1998-04-06
gttcgccacgtgtggagagaagggaaaaactgagccgagagaggggggaaaaaaaccaatgctgatttcggaaagaacgaaggaacttcggtagccctggccgaaccaccgacgcaaggaaggtagcgcttccgcagagcggcagcagttctgactggaggggcgctcgctgggagagacccatcacacctaaggggacagctattgctctgggtgacgactcctaaaaagagaatcggtgcctctacctctccacgtagctctgcttcagaacggggattgcttctccagctccccctggaccatgccactgggtggaagaggaacgctgagaggctgagcgaggaaccagctaggtgacaactcagagcccaggagtaccaagtcactgtaaagcataggcaccgtgaggatgactgtggcgagcactgcggctccctcctatacaacctcagacaccaaccgggttatttccaccttttctgttgtggactatgtggtgtttggcctgttgctggttctctcccttgtcattgggctctatcatgcttgccgaggctggggccgccatactgttggtgagctgctgatggcagaccgaaaaatgggctgccttcctgtggcactgtccttgctggccaccttccagtcagccgtggcgatccttgggggaccagctgagatctaccgatttggaacccagtattggttcctggggtgctcctacttcctggggcttctgatccctgctcacatcttcatccctgtcttctaccgcctgcatcttaccagcgcctatgagtacctagagctccgcttcaataaagcagtccggatctgtgggactgtgaccttcatctttcagatggtggtctacatgggagtggctctctatgcaccgtccctggccctcaatgcagtgactggatttgatctatggctgtcagtcctggccctaggaattgtctgcaacatctacactgcactgggtgggctgaaggctgtcatctggacagatgtgttccaaacgttgatcatgttcctagggcagctggtggttatcattgtaggagcggccaaagtgggcggcttggggcatgtatgggctgtggcttcccagcatggcctcatctctgggattgagctggatcctgacccctttgtacgtcatactttctggactttggcctttggcggcgtcttcatgatgctctccttatatggagtgaatcaggctcaggtgcagcgctacctcagttcccactcagagaaggctgctgtgctctcctgctatgcagtgttcccttgccagcaagtggccctctgcatgagctgcctcattggtctggtcatgtttgcctattataagaaatatagtatgagcccccaacaagagcaagcagcccctgaccagttagtcctctattttgtgatggacctcctgaaagacatgccagggctgcccgggctcttcgttgcttgcctcttcagtggatctctcagcaccatatcctccgcattcaattcactggccactgtcacaatggaagacctgatccagccctggttccctcagttgactgaaacccgggccatcatgctctctcgaagccttgcctttgcctatgggctagtttgcctgggaatggcctatgtttcctctcatctgggatcagtgctccaggcagcactcagcatctttggcatggttggagggccactgctgggactcttctgccttgggatgttctttccgtgtgccaaccctcttggtgccattgtaggcctgttgacgggactcaccatggccttctggattggcattgggagcatagtaagcaggatgagttctgctgcagcatcccctccccttaatggatccagctccttcctgcccagcaatctaactgtcgccactgtgaccaccctgatgccttctaccctgtccaagcccacaggactgcagcagttctattccctgtcctatttatggtacagtgcgcacaactccaccacagtcattgcagtgggcctgattgtcagtctgctcactgggggaatgcggggccggtccctgaaccctggcaccatttaccctgtgttgccaaagctccttgcactcctgcccttatcctgccagaagcggctttgctggagaagccacaaccaggatatccctgtggtcaccaacctgtttccagagaagatggggaacggagcgctgcaggacagcagagacaaagagaggatggctgaagatggccttgtccatcagccatgcagccccacctacattgtccaagagacgtccctgtgacctgtgacggacctctcactgcagagcagtggccagagatactctggagtgcagagctgagtcactgcatgagttccgcagcactggggtggatgacctagctcacagcaaaggaccttgatctttaatgtttcaccgccgtgggagctgtcgcatgcaagggacagacagtttttccttatcccttgccagtcttcttttaggatcaggtttgcaaggtacagaatcacagcacacgtggggaaatatactgaggaaagggtggcttttgattaagtgaccagggttctttggggtgaataggaacatttcttacaactccccttgagcaagtttggcaggattgaccagctccagcatttagcatgaagtcctcagccctctggtgattccctcactctcatgtcaacctgggttatctcaagccagtgtgggcctgtggtcttcaggttctctgtaagactcaagtctcctctcattctacctacctctgtttgtgagagggaggctttggagcgcttgggtctcagcacttagtgcatctacttggtgtatagaccctcgctctcttcaggtggtacatgagagacaggtacatgagagaggtcaccaggacctcttatgcagtgtgctatcctctaaactcctaagctaggccaccctggtgtcattctgtcatctgtgcaattcttatttcctttgggagtttcctcctcatgcattttgttcctagggaataaaaatagccattagacctgaaaaaaaaaaaaaaaa

SEQ ID NO: 593 - protein, 634 aa, Rattus norvegicus
  ref <308>: DATABASE ACCESSION NUMBER: SWISS-Prot / O70247
  ref <309>: DATABASE ENTRY DATE: 2001-10-16
MTVASTAAPSYTTSDTNRVISTFSVVDYVVFGLLLVLSLVIGLYHACRGWGRHTVGELLMADRKMGCLPVALSLLATFQSAVAILGGPAEIYRFGTQYWFLGCSYFLGLLIPAHIFIPVFYRLHLTSAYEYLELRFNKAVRICGTVTFIFQMVVYMGVALYAPSLALNAVTGFDLWLSVLALGIVCNIYTALGGLKAVIWTDVFQTLIMFLGQLVVIIVGAAKVGGLGHVWAVASQHGLISGIELDPDPFVRHTFWTLAFGGVFMMLSLYGVNQAQVQRYLSSHSEKAAVLSCYAVFPCQQVALCMSCLIGLVMFAYYKKYSMSPQQEQAAPDQLVLYFVMDLLKDMPGLPGLFVACLFSGSLSTISSAFNSLATVTMEDLIQPWFPQLTETRAIMLSRSLAFAYGLVCLGMAYVSSHLGSVLQAALSIFGMVGGPLLGLFCLGMFFPCANPLGAIVGLLTGLTMAFWIGIGSIVSRMSSAAASPPLNGSSSFLPSNLTVATVTTLMPSTLSKPTGLQQFYSLSYLWYSAHNSTTVIAVGLIVSLLTGGMRGRSLNPGTIYPVLPKLLALLPLSCQKRLCWRSHNQDIPVVTNLFPEKMGNGALQDSRDKERMAEDGLVHQPCSPTYIVQETSL

SEQ ID NO: 594 - DNA, 2310 bp, Homo sapiens
  ref <308>: DATABASE ACCESSION NUMBER: EMBL / AL096737
  ref <309>: DATABASE ENTRY DATE: 2000-02-18
gtcacataggagtgaggacttggtgggaggaagctggggcgtgatgtaatatgccttttgtttccagagagacagaggtggtagtttggctgggcagggagccttgctttaccccattgcttgtgttaactcacaccttcttgtttcctctcctgtccttttcccccagcctttggctatgggctgctttgtctaggaatggcctatatttcctcccagatgggacctgtgctgcaggcagcaatcagcatctttggcatggttgggggaccgctgctgggactcttctgccttggaatgttctttccatgtgctaaccctcctgtgagtgatgcatctggatccacagtcatgtgtagcaggatggacctgggggttggcagggctgtcaccaggagagctgaggactgccgtgagggctggcaggactggccttgtgacaggcctgcactgtgtctcggcagggtgctgttgtgggcctgttggctgggctcgtcatggccttctggattggcatcgggagcatcgtgaccagcatgggcttcagcatgccaccctctccctctaatgggtccagcttctccctgcccaccaatctaaccgttgccactgtgaccacactgatgcccttgactaccttctccaagtaaggcagggcttgctatcttcttgttttctcaaagtcctcctttgagggctttcacaggggtcttgctaagggatgggccaccagaggccccagggaaatgttgggtattgggtcccaagaccctgggaccatgcgggcaagtagagattggtgcccaaggaatgccctgccaacgaattgctaattgttctcacctctgctcttcccaggcccacagggctgcagcggttctattccttgtcttacttatggtacagtgctcacaactccaccacagtgattgtggtgggcctgattgtcagtctactcactggtaagggtgtgggattgcggtgcagatgagcaccgagggttaacagagggccctaagggactctagggagaaaggctcctgccctctgagctcttgggtgtccgtagctgtcaggcttttctgctgggatgtaggaggtgggtgggggctggggtctctgggggccaagggaggacatggggcccgctgctgtggatggttccacccagagactcagaagcacatttccattcagggagaatgcgaggccggtccctgaaccctgcaaccatttacccagtgttgccaaagctcctgtccctccttccgttgtcctgtcagaagcggctccactgcaggagctacggccaggaccacctcgacactggcctgtttcctgagaagccgaggaatggtgtgctgggggacagcagagacaaggaggccatggccctggatggcacagcctatcaggggagcagctccacctgcatcctccaggagacctccctgtgatgttgactcaggaccccgcctctgtcctcactgtgccaggccatagccagaggccaccctgtagtacagggatgagtcttggtgtgttctgcagggacaggcctggatgatctagctcataccaaaggaccttgttctgagaggttcttgcctgcaggagaagctgtcacatctcaagcatgtgaggcaccgtttttctcgtcgcttgccaatctgttttttaaaggatcaggctcgtagggagcaggatcatgccagaaatagggatggaagtgcatcctctgggaaaaagataatggcttctgattcaacatagccatagtcctttgaagtaagtggctagaaacagcactctggttataattgccccagggcctgattcaggactgactctccaccataaaactggaagctgcttcccctgtagtccccatttcagtaccagttctgccagccacagtgagcccctattattactttcagattgtctgtgacactcaagcccctctcatttttatctgtctacctccattctgaagagggaggttttggtgtccctggtcctctgggaatagaagatccatttgtctttgtgtagagcaagcacgttttccacctcactgtctccatcctccacctctgagatggacacttaagagacggggcaaatgtggatccaagaaaccagggccatgaccaggtccactgtggagcagccatctatctacctgactcctgagccaggctgccgtggtgtcatttctgtcatccgtgctctgtttccttttggagtttcttctccacattatctttgttcctggggaataaaaactaccattggacctagaaaaaa

SEQ ID NO: 595 - protein, 635 aa, Homo sapiens
  ref <308>: DATABASE ACCESSION NUMBER: SWISS-Prot / Q9Y289
  ref <309>: DATABASE ENTRY DATE: 2001-10-16
MSVGVSTSAPLSPTSGTSVGMSTFSIMDYVVFVLLLVLSLAIGLYHACRGWGRHTVGELLMADRKMGCLPVALSLLATFQSAVAILGVPSEIYRFGTQYWFLGCCYFLGLLIPAHIFIPVFYRLHLTSAYEYLELRFNKTVRVCGTVTFIFQMVIYMGVVLYAPSLALNAVTGFDLWLSVLALGIVCTVYTALGGLKAVIWTDVFQTLVMFLGQLAVIIVGSAKVGGLGRVWAVASQHGRISGFELDPDPFVRHTFWTLAFGGVFMMLSLYGVNQAQVQRYLSSRTEKAAVLSCYAVFPFQQVSLCVGCLIGLVMFAYYQEYPMSIQQAQAAPDQFVLYFVMDLLKGLPGLPGLFIACLFSGSLSTISSAFNSLATVTMEDLIRPWFPEFSEARAIMLSRGLAFGYGLLCLGMAYISSQMGPVLQAAISIFGMVGGPLLGLFCLGMFFPCANPPGAVVGLLAGLVMAFWIGIGSIVTSMGFSMPPSPSNGSSFSLPTNLTVATVTTLMPLTTFSKPTGLQRFYSLSYLWYSAHNSTTVIVVGLIVSLLTGRMRGRSLNPATIYPVLPKLLSLLPLSCQKRLHCRSYGQDHLDTGLFPEKPRNGVLGDSRDKEAMALDGTAYQGSSSTCILQETSL

SEQ ID NO: 596 - DNA, 3091 bp, Rattus norvegicus; identical to SEQ ID NO: 592
  ref <308>: DATABASE ACCESSION NUMBER: EMBL / AF026554
  ref <309>: DATABASE ENTRY DATE: 1998-04-06

SEQ ID NO: 597 - protein, 634 aa, Rattus norvegicus; identical to SEQ ID NO: 593
  ref <308>: DATABASE ACCESSION NUMBER: SWISS-Prot / O70247
  ref <309>: DATABASE ENTRY DATE: 2001-10-16

SEQ ID NO: 598 - DNA, 2310 bp, Homo sapiens; identical to SEQ ID NO: 594
  ref <308>: DATABASE ACCESSION NUMBER: EMBL / AL096737
  ref <309>: DATABASE ENTRY DATE: 2000-02-18

SEQ ID NO: 599 - protein, 635 aa, Homo sapiens; identical to SEQ ID NO: 595
  ref <308>: DATABASE ACCESSION NUMBER: SWISS-Prot / Q9Y289
  ref <309>: DATABASE ENTRY DATE: 2001-10-16

SEQ ID NO: 600 - DNA, 2304 bp, Rattus norvegicus
  ref <308>: DATABASE ACCESSION NUMBER: EMBL / AF027571
  ref <309>: DATABASE ENTRY DATE: 1999-03-12
ttgccatctcctaatgacctcaaaagaaaaatactcatcaaaaataaaaggctgaagcctgaagttgaaaaaaaacagctggaggctttgaaaagcatgatggaggctggagaatcagctgccccggccagcatcttggaagatgacaatgaggaggaaatagaaagcgctgatcaagaggaagaagcccaccctgaatacaagtttggaaatgaactttctgccgatgacttcagtcacaaggaagcggttgcaaacagcgtcaagaagggcctggtcaccgtagaagatgaacaggcatggatggcatcttataaatacgtaggtgctaccacgaatatccatccgtacttgtccacgatgatcaactatgcacagcctgtgaagtttcaaggtttccatgtggctgaagagcgcaacattcattataacatgtcttcttttaacgagtcggttggccttggctacttgaagacgcacgcgattgagtttgtaaattacaataagcgacaaatgagccgcatttaccccaagggaggccgagttgattccagtaattacatgcctcagattttctggaacgctggttgccaaatggtttcactgaactatcaaaccccagatttagcgatgcaattgaatcaaggaaaatttgagtataacggatcctgcggatacctcctcaagccagacttcatgagacggcctgatcggacatttgatcccttctctgaaacccctgtggacggggttattgcagccacatgctcagtgcaggttatatcagggcagttcctgtcagataagaagatcggcacatacgtggaagtcgatatgtacgggctgcccaccgacaccatacggaaggagttccgaacccgcatggttatgaacaatggactcaacccagtttacaatgaagaatcgttcgtgtttcggaaggtgatcctgcctgacctggctgtcctgagaatcgctgtgtacgacgacaacaacaagctcattggccagaggatccttcctctggatggcctccaggcaggctaccgacacatctccctgagaaatgagggaaacaaaccgttatcactgccaacaattttctgcaatatcgttcttaaaacatatgtgcctgatggatttggagatattgtggatgctctatccgatccaaagaaattcctttcaatcaccgagaagagagcagaccaaatgagagcaatgggcattgaaactagtgacatagcagatgtgcccagtgacacttccaaaaatgacaagaaaggcaaggccaacccagccaaagcgaatgtaacccctcagagcagctctgagctcagaccaaccaccacagctgccctgggatctggccaggaagccaagaaaggtattgaacttatccctcaagtgaggatagaagatttaaagcaaatgaaggcttacttgaagcatttaaagaaacaacaaaaggagttaaactctttaaagaagaaacacgcaaaggagcacagtaccatgcagaagttacactgcacacaagtggacaaaatcgtggcccagtatgacaaggagaagtcgactcatgagaaaatcctagagaaggccatgaagaagaaggggggaagtaattgccttgaaataaaaaaagaaacagaaattaagattcagaccctgacatcggatcacaaatctaaggtcaaggagattgtggcgcagcacacaaaggagtgctcagaaatgatcaacacgcacagcgccgaggagcaggaaatccgggacctgcacatgagccagcagtgtgagctgctgaggaagctgctcatcaacgttcatgagcagcagacccagcagctgaaggtctcccatgacagggaaagcaaagagatgcgagcccatcaggctaagatttgtatggaaaatagcaaagccatcagtcaagataaatctatcaagaataaggcagaacgggagaggcgagtcagggagttgaacagcagcaacactaagaagtttctagaagaaagaaagagactggcaatgaagcagtcgaaagaaatggatcagctgaaaaaggtccagctggagcacctagaattcctagagaaacagaatgagcagcttttgaaatcctgtcatgcagtgtcccaaacacaaggcgaaggagatgcagcagatggtgaaattggaagccgagatggaccgcagaccagcaacagtagtatgaaactccagaatgcaaactgaagctggaagaccatagaacaccagaagatcacgcccagcttcagaggacagactccatgg

SEQ ID NO: 601 - protein, 1175 aa, Rattus norvegicus
  ref <308>: DATABASE ACCESSION NUMBER: SWISS-Prot / Q9QW07
  ref <309>: DATABASE ENTRY DATE: 2002-06-15
MAKPYEFNWQKEVPSFLQEGAVFDRYEEESFVFEPNCLFKVDEFGFFLTWKSEGKEGQVLECSLINSIRLAAIPKDPKILAALESVGKSENDLEGRILCVCSGTDLVNIGFTYMVAENPEITKQWVEGLRSIIHNFRANNVSPMTCLKKHWMKLAFLTNTSGKIPVRSITRTFASGKTEKVIFQALKELGLPSGKNDEIEPAAFTYEKFYELTQKICPRTDIEDLFKKINGDKTDYLTVDQLVSFLNEHQRDPRLNEILFPFYDAKRAMQIIEMYEPDEELKKKGLISSDGFCRYLMSDENAPVFLDRLELYQEMDHPLAHYFISSSHNTYLTGRQFGGKSSVEMYRQVLLAGCRCVELDCWDGKGEDQEPIITHGKAMCTDILFKDVIQAIKETAFVTSEYPVILSFENHCSKYQQYQMSKYCEDLFGDLLLKQALESHPLEPGRLLPSPNDLKRKILIKNKRLKPEVEKKQLEALKSMMEAGESAAPASILEDDNEEEIESADQEEEAHPEYKFGNELSADDFSHKEAVANSVKKGLVTVEDEQAWMASYKYVGATTNIHPYLSTMINYAQPVKFQGFHVAEERNIHYNMSSFNESVGLGYLKTHAIEFVNYNKRQMSRIYPKGGRVDSSNYMPQIFWNAGCQMVSLNYQTPDLAMQLNQGKFEYNGSCGYLLKPDFMRRPDRTFDPFSETPVDGVIAATCSVQVISGQFLSDKKIGTYVEVDMYGLPTDTIRKEFRTRMVMNNGLNPVYNEESFVFRKVILPDLAVLRIAVYDDNNKLIGQRILPLDGLQAGYRHISLRNEGNKPLSLPTIFCNIVLKTYVPDGFGDIVDALSDPKKFLSITEKRADQLRAMGIETSDIADVPSDTSKNDKKGKANPAKANVTPQSSSELRPTTTAALGSGQEAKKGIELIPQVRIEDLKQMKAYLKHLKKQQKELNSLKKKHAKEHSTMQKLHCTQVDKIVAQYDKEKSTHEKILEKAMKKKGGSNCLEIKKETEIKIQTLTSDHKSKVKEIVAQHTKEWSEMINTHSAEEQEIRDLHLSQQCELLRKLLINAHEQQTQQLKLSHDRESKEMRAHQAKISMENSKAISQDKSIKNKAERERRVRELNSSNTKKFLEERKRLAMKQSKEMDQLKKVQLEHLEFLEKQNEQAKEMQQMVKLEAEMDRRPATVV

SEQ ID NO: 602 - DNA, 3707 bp, Homo sapiens
  ref <308>: DATABASE ACCESSION NUMBER: EMBL / L41349
  ref <309>: DATABASE ENTRY DATE: 1999-07-02
gtgtgtccctccagtgccgcttgccccttgttctcccaagcaccagggggacccctgtcttagattcaagttgcatcactagactaacagctctgggaacagaggacactgaggactagtttgggaaatgaaaaacatctgcaatgagaggtaattttattctcctcttccttttaccctagtctcactctccatagtaggacctggatctttgcatcagagaaaacataatgaacaataactggaatgtgtgtttctttcttttctgccctagtattactagaacatttgcatcgggaaaaacagaaaaggtgatctttcaagcactcaaggagttaggtcttcccagtggaaagaatgatgaaattgagcccacagcattttcttatgaaaagttctatgaactgacacaaaagatttgtcctcggacagatatagaagatcttttcaaaaaaatcaatggagacaaaactgattatttaacggtagaccaattagtgagctttctaaatgaacatcaacgagatcctcgattgaatgaaattttatttccattttatgatgccaaaagggcaatgcagatcattgagatgtatgaacctgatgaagatttgaagaaaaaaggccttatatcaagtgatgggttttgcagatatctgatgtcagatgaaaacgccccagtcttcctagatcgtttagaactttaccaagaaatggaccatcctctggctcactacttcatcagttcttcccataacacttatctcactggcagacagttcggcgggaagtcttcggtagaaatgtacagacaggttctcctggctggttgcagatgtgttgaacttgactgctgggatggaaaaggtgaggaccaagaaccaataataactcatggaaaagcaatgtgtacagatatcctttttaaggatgtaattcaagccatcaaggaaactgcatttgtcacatcagaatatcctgtaattctctcctttgaaaatcactgcagcaaatatcaacagtacaagatgtccaaatattgcgaagatctatttggggatctcctgttgaaacaagcacttgaatcacatccactggaaccaggcagacctttgccatcccccaatgacctcaaaagaaaaatactcataaaaaacaagcggctgaaacctgaagttgaaaaaaaacagctggaagctttgagaagcatgatggaagctggagaatctgcctccccagcaaacatcttagaggacgataatgaagaggagatcgaaagtgctgaccaagaggaggaagctcaccccgaattcaaatttggaaatgaactttctgctgatgacttgggtcacaaggaagctgttgcaaatagcgtcaagaagggcctggtcactgtagaagatgagcaggcgtggatggcatcttataaatatgtaggtgctaccactaatatccatccatatttgtccacaatgatcaactatgcccagcctgtaaagtttcaaggtttccatgtggcagaagaacgcaatattcattataacatgtcttcttttaatgaatcagtcggtcttggctacttgaagacacatgcaattgaatttgtcaattataacaaacggcaaatgagtcgcatttaccccaagggaggccgagtcgattccagtaattacatgcctcagattttctggaacgctggctgccagatggtttcactgaactatcaaaccccagatttagcgatgcaattgaatcagggaaaatttgagtataatggatcgtgcgggtaccttctcaaaccagatttcatgaggcggcctgatcgaacatttgaccccttctctgaaacgcctgttgatggggttattgcagccacttgctcagtgcaggttatatcaggtcaattcttatcagataagaaaattggcacctacgtagaggtggatatgtatgggttgcccactgacaccatacgtaaggaattccgaactcgcatggttatgaataatggactcaatccagtttacaatgaagagtcacttgtatttcggaaggtgatcctgccggacctggctgtcttgagaatagctgtgtatgatgataacaacaagctgattggccagaggattcctccgcttgatggcctccaagccggatatcgacacatttcccttcgaaatgagggaaataaaccattatcactaccaacaattttctgcaatattgttcttaaaacatatgtgcctgatggatttggagatatcgtggatgctttatcagatccaaagacatttctctcaattacagaaaagagagcagaccaaatgagagctatgggcattgagactagtgacatagccgacgtgcccagtgacacttccaaaaatgacaagaaaggaaaggccaacaccgccaaagcaaatgtgacccctcagagtagctctgagctcagaccaaccaccacggctgccctgccgtctggtgtggaagccaagaaaggtattgaacttatccctcaagtaaggatagaagacttaaagcagatgaaggcttacttgaagcatttaaagaaacagcagaaggagctaaattctttaaagaagaaacatgcaaaggaacacagtaccatgcagaagttacactgcacgcaagttgacaaaattgtggcacagtatgacaaagagaagtcgactcatgagaaaatcctagagaaggcaatgaagaagaaagggggaagtaattgtcttgaaatgaagaaagaaacagaaattaaaattcagacgctgacatcagatcacaaatctaaggtcaaggagattgtagcacagcacacaaaggaatggtcagaaatgatcaatactcacagtgctgaggagcaagaaatccgagacctgcacctcagccagcagtgtgagctgctgaaaaagctactcatcaatgcccacgagcagcaaacccagcagctgaaactgtcccatgacagggaaagcaaggaaatgcgagcacaccaggctaagatttctatggaaaatagcaaagccatcagccaagataaatctatcaagaataaagcagaacgggaaaggcgagtcagggagttaaacagcagcaacactaaaaagtttctggaagaaagaaagagacttgccatgaagcagtccaaagaaatggatcagttgaaaaaagtccagcttgaacatctagaattcctagagaaacagaatgagcaggcgaaggagatgcagcagatggtgaaattggaagccgagatggaccgcagaccagcaacagtagtatgaaactccaaaatgcaaactgaagcagcaaacccacaaagcatcaaaagactcactcacaaaacttctgaacacaaactccatggatgaaagctgtttattttgtttcctttatgtgtaaacaagatgatatctgaaaccagagagacttggaatgtctgactgacttctatttaacagcttgagtattgcatttccttggccaaacaaaaatagctacaaatccacaaaaatttactattccagtaaggcagagtccaaccattgataatacaacttaaacatgtttgctataaaataccatcacaagtaaatgagcttggtgtgaacaactcttcctttgtgatgccttaggacatgttgtaactgcaggcaaaacaaacaaaacagtgcattagcaatttcatagca

SEQ ID NO: 603 - protein, 1175 aa, Homo sapiens
  ref <308>: DATABASE ACCESSION NUMBER: SWISS-Prot / Q15147
  ref <309>: DATABASE ENTRY DATE: 2002-06-15
MAKPYEFNWQKEVPSFLQEGAVFDRYEEESFVFEPNCLFKVDEFGFFLTWRSEGKEGQVLECSLINSIRSGAIPKDPKILAALEAVGKSENDLEGRIVCVCSGTDLVNISFTYMVAENPEVTKQWVEGLRSIIHNFRANNVSPMTCLKKHWMKLAFMTNTNGKIPVRSITRTFASGKTEKVIFQALKELGLPSGKNDEIEPTAFSYEKFYELTQKICPRTDIEDLFKKINGDKTDYLTVDQLVSFLNEHQRDPRLNEILFPFYDAKRAMQIIEMYEPDEDLKKKGLISSDGFCRYLMSDENAPVFLDRLELYQEMDHPLAHYFISSSHNTYLTGRQFGGKSSVEMYRQVLLAGCRCVELDCWDGKGEDQEPIITHGKAMCTDILFKDVIQAIKETAFVTSEYPVILSFENHCSKYQQYKMSKYCEDLFGDLLLKQALESHPLEPGRALPSPNDLKRKILIKNKRLKPEVEKKQLEALRSMMEAGESASPANILEDDNEEEIESADQEEEAHPEFKFGNELSADDLGHKEAVANSVKKGLVTVEDEQAWMASYKYVGATTNIHPYLSTMINYAQPVKFQGFHVAEERNIHYNMSSFNESVGLGYLKTHAIEFVNYNKRQMSRIYPKGGRVDSSNYMPQIFWNAGCQMVSLNYQTPDLAMQLNQGKFEYNGSCGYLLKPDFMRRPDRTFDPFSETPVDGVIAATCSVQVISGQFLSDKKIGTYVEVDMYGLPTDTIRKEFRTRMVMNNGLNPVYNEESFVFRKVILPDLAVLRIAVYDDNNKLIGQRILPLDGLQAGYRHISLRNEGNKPLSLPTIFCNIVLKTYVPDGFGDIVDALSDPKKFLSITEKRADQMRAMGIETSDIADVPSDTSKNDKKGKANTAKANVTPQSSSELRPTTTAALASGVEAKKGIELIPQVRIEDLKQMKAYLKHLKKQQKELNSLKKKHAKEHSTMQKLHCTQVDKIVAQYDKEKSTHEKILEKAMKKKGGSNCLEMKKETEIKIQTLTSDHKSKVKEIVAQHTKEWSEMINTHSAEEQEIRDLHLSQQCELLKKLLINAHEQQTQQLKLSHDRESKEMRAHQAKISMENSKAISQDKSIKNKAERERRVRELNSSNTKKFLEERKRLAMKQSKEMDQLKKVQLEHLEFLEKQNEQAKEMQQMVKLEAEMDRRPATVV

SEQ ID NO: 604 - DNA, 4969 bp, Rattus norvegicus
  ref <308>: DATABASE ACCESSION NUMBER: EMBL / AF029240
  ref <309>: DATABASE ENTRY DATE: 1998-07-17
aagcttacacagaccctacaacaagacttggtgaaaccgtgtgcccaagagcacaagtgcggttccgtgcggtttagtgcggtttacacgacaggaggtcgtgtaaacagctcctgctgctttctctttcataaagacacaagtgatacagtctcgcctctcgttcctgttggacgcaggcgtctgtagaagccaatcagcagcacagaagttccaaagtacgagtcaacagaaacacaacccacattcatgtttttcacagtccctgggcgtgaggatgttacctcctgcctatttgctccaactactggcaggcaccatggtcctgacccagactagtaagtgcggggaggggtcgggaaagaaaagactctgagaggtgaaagggggtggggtgtggggccaggggtggtggcgggggggggcagcaccctagggtctgtcaccctatcccagtccctcctctgccagcacctgagatcctgagcctagaggagctcagggtctcactgcgcgccgcccccaggctcacactcgctgcggtatttctacaccgccctgtcccggcccggcctcggggagcccaggttcattgtcgttggctacgtggacgacacgcagttcgtgcgctatgacagcgatgtggagaatccgaggatggagccacgggcgcggtggatggagcaggaggagccggcatattgggagcgggagactcggaaagccagggacaccgggaggaacttcaaagtgaatctgaggaccctgctccgctactacaatcagagtgacgacggttgagttgactgccggagggatcacaaacaggatccctccatgttccctgagactggcctgggtcatcttgaacccggccgggtcaaagtatcatccaaacgcctacctagaaatcccagacaagaaagccccggcagagttctgcttaggtttcggttgcacttttgtttctaaaaattctggcatatctactgacagcgggcaagatggccacgagggggcgctgaaccggcgtttcccctttcagaatctcacacgctgcagtggatgtacggctgcgacgtggggcccgatgggcacctgctccgcggttattgtcaggaggcttatgacggccgggattatatctccttgaacgaggacctgcgctcctggaccgcgactgacatggcctcacaggcctctaagatcaagtcagaggaagttggtgaggcccatcaccagagggcctacctgcaaggtccttgcgtggagtggctccacacatacctacatctgggaaaggagacgctgctgcgctcaggtgccctggagacccctccttagttttcctctgggggtttgggggggaaaggcttggggtatagctcaggggcagaacgctgtccagcagccacagtgctgaagagaagggagaaagactcccaaggctgcttttcctctgtcaggaagactaagccttaatcaagcagatcagcttgacaatgtccctggacccattaggggcattttcctcaggcctccctctatgccctactcagtgtctctgagagtcagactccagcgttgttctcagtctctaggccctcacccaggctcaggacgagaaggcccatgcccaggagtcctggccagagaccctggagtctcctgccccatagttgtcagactcacatcctaaagcagacaaaggaacagcgccgggaggtgcatgtgctcctgctggtgtctggattgtggacaccctaatcccatcccaggtctcctgaccatcccaggatggtcacatggacaatactgtgtccctggaagaaagctagatgcctcagtcttacaagtctctccctcagaccccccaaaggcacatgtgacccttcaccccagacctgaaggtgatgtcaccctgaggtgctgggccctgggcttctaccctgctgacatcaccttgacctggcaattgaatggggaggacctgacccaggacatggagcttgtggagaccaggcctgcaggggatggaaccttccagaagtgggcagctgtggtagtgccttctggggaggagctaaagtacacatgccatgtggagcatgagggactgcctgaacctctcgccctgagatggggtaaggagggtgtgggtgcagatctggggtcagggaatgtggagccttctgcagaccctgagctggtcagggatgagaatcatgactcttccttcccagagccttctccattcaccgactccagcatgccagtgattgttgtccttggagctgtggccatcattggagctgtggccatcattggagctgtggccatcattggagctgttgtgaggaggaggaagagaaacacaggtaggaaagggcagggtctgactcttctctcagcctctttgaagtgtgctgtgctcattaaggggaaacacagccacaccctgcattgcctagtctctaacctggactgctgtcagtgctggaaacttcctagggctggtgtttccctgacttctcatgactttccttctcgacaggtgaaaaaggcagctatgctcatgttctaggtaggtgtgggtggggttggccgtggagtggggtgcacccttgtacccagaggcccttgggatgggagctggcgcttatggaggagttctgccaggcccataattccctcttgccatattggtcacctgaatatacctgcatttataattcctctactcaggcagcaaggctttccagatctctgactggcctcagaaggcatgaaaaggtatgaaaacccatgggggcctgggatcggacctgaggcaaagggaagaacagggccttgtgggatgatgtcacaggtgaggcaggtacaagatagaaggaggcctgttattggatgagaaagaaggatgggtgggagacaagtttgaaggaagaagaggatactggaacagagagagaggaggagaggagggagagggagagaagccttggcaggcaatatatcaggtgacgttaagattctcctctgtgtacttagaggttgttattaatgttcctaagggatggatggtaccgggctttgtatgtttaactcggcaattatatcttatcaattggctctaagattattgttggtgtgttcttttatgtgatggtttgagtgtaggaaagtgtgcagtgacaggagacgatgggccagcacagagttgggatgtgtttccacccaagatatctaacagatatcttggggcactgcagtgcagacctagcggggtaaaagacaactatactttttttactttttatatttttacaacaacagggtctctcagatttagacatttgaatgactgagcatctttacaatgacttcaggactcttgttctattgcgttcagacagttgcctcgtggggctgagcgacaagttctgactaaacatctgagggagctgcttcccctgaggacaatgtgaagaactggcaatcccagaccttcttgcctccctggacacctgacttcacaacagaaaataatctgactctgggctgggtgtttcctattgcttttatctgcactgagtggaaatgcgatttccaacagtgtaacgcagcaccgttgtgtggtggtagtgacattgcacacaggtttgtgagctgggggtgtgatgtgcttttcttactgtaggcagaacaagctagaagtccaccattcctcttatggtcattgttttaaaacaaaacaaatgctggagagatggctcagtgttaagagcactgacttctcttacagaggtcctggttcaaatcccagcaaccacatggtggctcacaaccatatgtaatgagatctgatgctctcttctgatgtgtctgaacacagctatatatgataaataaatctaaaaaatattttttaaatggccagacagatggcatgagtagggcacaccatggtcaactctgctgtctgtgtatctctagacatccagtgctctttagagtccacacaaggtcattaaaaggactggggtggatggtgactggagagatagctcagtggttaagagtgtttgctgcttcatgggtggtggtggtggcacaagcctttaatccaaacactcaggaggcagaggcaggtggatctctgagttcaaggccagcctggcctataaggcaagttccaagatagccaaggatacacagagaaaccctgtttgaaaaaacccaagcctagacctggagagttggctcaatggttaagagcactgactgcttttccagaggtcctgagttcaaggcccagcaaaggcacatggtggctcacaaccatctgtaatgggatctgatgcacttttctggtgtgtctaaagcgacatggtaactcgctgtctgtaactagtaggcaaacagttcatatctcacacagacatgaatgcagatagagcaccaacacatataaaattaaatctttaaaaaatgaaaggtctgggggctggatgaatggtgtttgtctttgaaatgtctgacagtgctgtgactcacagcctgcatagcagctcctattgcctggtgttcaccatctgtcttggttataaaaaggtttcgtaatgtgaaacccttcaaatgagctggtgcccttctcaccagtttgcatcttgacaggattcctgaagggcttatattctgggccttcccattgtggaggattaggttttacacaacgtatcctctctagcattgcaatttccctgagccttaaaatcccttcatcgacgctgagccaagggatatctggcatctgcaactccttttccgtaggccgtcatttgatgaacgcttcagccaaccattcaaacaaactttctgacacttttttttaactgtgtggccttccatattaaacccagaatctccactcaaagggcccatgtcaataaactcagcctgatctatt

SEQ ID NO: 605 - DNA, 1665 bp, Homo sapiens
  ref <308>: DATABASE ACCESSION NUMBER: EMBL / M20022
  ref <309>: DATABASE ENTRY DATE: 2000-03-04
cgggatcatggtagatggaaccctccttttactctcctcggaggccctggcccttacccagacctgggcgggctcccactccttgaagtatttccacacttccgtgtcccggcccggccgcggggagccccgcttcatctctgtgggctacgtggacgacacccagttcgtgcgcttcgacaacgacgccgcgagtccgaggatggtgccgcgggcgccgtggatggagcaggaggggtcagagtattgggaccgggagacacggagcgccagggacaccgcacagattttccgagtgaacctgcggacgctgcgcggctactacaatcagagcgaggccgggtctcacaccctgcagtggatgcatggctgcgagctggggcccgacaggcgcttcctccgcgggtatgaacagttcgcctacgacggcaaggattatctcaccctgaatgaggacctgcgctcctggaccgcggtggacacggcggctcagatctccgagcaaaagtcaaatgatgcctctgaggcggagcaccagagagcctacctggaagacacatgcgtggagtggctccacaaatacctggagaaggggaaggagacgctgcttcacctggagcccccaaagacacacgtgactcaccaccccatctctgaccatgaggccaccctgaggtgctgggccctgggcttctaccctgcggagatcacactgacctggcagcaggatggggagggccatacccaggacacggagctcgtggagaccaggcctgcaggggatggaaccttccagaagtgggcagctgtggtggtgccttctggagaggagcagagatacacgtgccatgtgcagcatgaggggctacccgagcccgtcaccctgagatggaagccggcttcccagcccaccatccccatcgtgggcatcattgctggcctggttctccttggatctgtggtctctggagctgtggttgctgctgtgatatggaggaagaagagctcaggtggaaaaggagggagctactctaaggctgagtggagcgacagtgcccaggggtctgagtctcacagcttgtaaagcctgagacagctgccttgtgtgcgactgagatgcacagctgccttgtgtgcgactgagatgcaggatttcctcacgcctcccctatgtgtcttaggggactctggcttctctttttgcaagggcctctgaatctgtctgtgtccctgttagcacaatgtgaggaggtagagaaacagtccacctctgtgtctaccatgacccccttcctcacactgacctgtgttccttccctgttctcttttctattaaaaataagaacctgggcagagtgcggcagctcatgcctgtaatcccagcacttagggaggccgaggagggcagatcacgaggtcaggagatcgaaaccatcctggctaacacggtgaaaccccgtctctactaaaaaatacaaaaaattagctgggcgcagaggcacgggcctgtagtcccagctactcaggaggcggaggcatggagaatggcgtcaacccgggaggcggaggttgcagtgagccaggattgtgcgactgcactccagcctgggtgacagggtgaaacgccatctcaaaaaataaaaattaaaaaataaaaaaagaacc

SEQ ID NO: 606 - protein, 623 aa, Homo sapiens
  ref <308>: DATABASE ACCESSION NUMBER: SWISS-Prot / P29401
  ref <309>: DATABASE ENTRY DATE: 2002-06-15
MESYHKPDQQKLQALKDTANRLRISSIQATTAAGSGHPTSCCSAAEIMAVLFFHTMRYKSQDPRNPHNDRFVLSKGHAAPILYAVWAEAGFLAEAELLNLRKISSDLDGHPVPKQAFTDVATGSLGQGLGAACGMAYTGKYFDKASYRVYCLLGDGELSEGSVWEAMAFASIYKLDNLVAILDINRLGQSDPAPLQHQMDIYQKRCEAFGWHAIIVDGHSVEELCKAFGQAKHQPTAIIAKTFKGRGITGVEDKESWHGKPLPKNMAEQIIQEIYSQIQSKKKILATPPQEDAPSVDIANIRMPSLPSYKVGDKIATRKAYGQALAKLGHASDRIIALDGDTKNSTFSEIFKKEHPDRFIECYIAEQNMVSIAVGCATRNRTVPFCSTFAAFFTRAFDQIRMAAISESNINLCGSHCGVSIGEDGPSQMALEDLAMFRSVPTSTVFYPSDGVATEKAVELAANTKGICFIRTSRPENAIIYNNNEDFQVGQAKVVLKSKDDQVTVIGAGVTLHEALAAAELLKKEKINIRVLDPFTIKPLDRKLILDSARATKGRILTVEDHYYEGGIGEAVSSAVVGEPGITVTHLAVNRVPRSGKPAELLKMFGIDRDAIAQAVRGLITKA

SEQ ID NO: 607 - DNA, 4969 bp, Rattus norvegicus; identical to SEQ ID NO: 604
  ref <308>: DATABASE ACCESSION NUMBER: EMBL / AF029240
  ref <309>: DATABASE ENTRY DATE: 1998-07-17

SEQ ID NO: 608 - DNA, 1665 bp, Homo sapiens; identical to SEQ ID NO: 605
  ref <308>: DATABASE ACCESSION NUMBER: EMBL / M20022
  ref <309>: DATABASE ENTRY DATE: 2000-03-04

SEQ ID NO: 609 - protein, 623 aa, Homo sapiens; identical to SEQ ID NO: 606
  ref <308>: DATABASE ACCESSION NUMBER: SWISS-Prot / P29401
  ref <309>: DATABASE ENTRY DATE: 2002-06-15

SEQ ID NO: 610 - DNA, 3312 bp, Rattus norvegicus
  ref <308>: DATABASE ACCESSION NUMBER: EMBL / AF030050
  ref <309>: DATABASE ENTRY DATE: 2000-03-03
atggacattcggaaattctttggggttatatcaagtggaaaaaagcctgtaaatgagacagtaaagaagaatgagaagacaaaaccttcggagggaactgtcaaaggaaagaaaggagtaaaggttgccaaggttaataatccctgcaaagaggatgcctccagaccaaagcagcacacagaaaaacgaggatcatctatgactcagattcagaatcagaggagacacgtgcaagtgaaagatgctaaaaagaaatcagaaaaattgccacgtgtgcttgtaaacctggtaaatctctcggaaggatcctcgttacctcatatttctgagacagatgaagacgcagtgactttttatgtaaaaaggcagcctccaaatcaaaagagaatggagtatctacgaaacagttaccttggagcatcaaacgtgaaaaagaatgaagaaaacactaagactaagagtaaaccgttatcaccaataaaactaacaccgacatcagtgcttgattattttggaactgaaagtgtccagagatctgggaagaagatggtggcgagcaaaaagaaagagtcttctcaaaccccagatgattccagattaaatgatgaggccatcgccaagcagctgcagcttgatgaagatgcagagctggagaggcagttgcatgaagatgaagaatttgcaagaacactggccttgttggatgaagaacctaagaccaaaaaggctcgaaaggactctgaagagggagaatcattttcacctgccaaagctgagttaagcaaagcagcaaagcagaagagccctgctaacgagcatttctcaattggaagaaagacctacagtcctgctaagtacggcaagggtagaggctcagaaggcaccaagcagccctgcagatcagctcaccagacggaagcctgctcctctctcaaggccagctccaagctggctcttatgaaagcacaagaagaaaactctcacacagacacagaactgctggctgcaaaaagagaaagtgccattgagcccaaaggagagaaaacaactcctaggaaaacgaaaggctctccaactaaaagagagtctgtaagcccagaagattctgaaaagaagcgcaccaattatcaagcttatcgaagctacttaaatcgagaaggtcccaaagccctgggctccaaagaaatacccaagggagctgaaaactgcttggagggcctgacgttcgtgatcaccggagtgctggagtccatcgaacgagaagaagccaagtctctaattgaacgttatggggggaaagtaacaggaaacgtgagcaagaaaaccagctacctcgtcatgggccgggacagcaggcagtccaagagtgacaaggcagcagctctgggaacaaaaatccttgatgaagacggcctgttggatctgattcgaactatgccgggcaaaaaatccaagtacgaaatcgctgctgaggctgagatgaagaaagaaaagtccaaattggagagaacaccccaaaaaaatgatcagggaaaaagaaaacttagtccaaccaagagggagttggagcctaaaaagagcaagctgactccccttaagcacagccctcggaaggcagtgaaggaggaggaacgtgtgtgtccgaggggcttggacgccaaggagcctcatggcagccacagtgccagcagagaggagtgcctgctctgggtggataagtacaagcccacctcactcaagaacataatcggacagcagggtgaccagagctgtgccaacaaactgctacgctggctcagaaactggcacaagagttctccagaagagaaaaagcatgcaaaatttggcaaagttgccagcaaagatgatggctccagtttcaaggcagcactgctgtctggccctccaggtgttggcaaaaccactacagcttctcttgtgtgtcaggaattgggctacagttatgtggaactaaatgcgagtgatactcggagtaagaacagtctgaaagcaattgttgctgagtcattgaacaacaccagcatcaaaggcttttatacaagtggagcatctccttctgtaagtgcgaggcatgctctcatcatggatgaagttgatggcatggcgggcaatgaggacaggggtggaattcaggagctaataggcctgataaagcatacgaaaattcccatcatttgtatgtgcaatgatagaaatcaccccaaaatccgctcattggttcattattgttttgatcttcgtttccaaagacctcgagttgaacagattaagagtgcaatgctgtctattgcatttaaagagggattaaagatcccacctccagctatgaatgaaataattttgggagctaatcaagatgtcagacaggttttacacaatctcagtatgtggtgtgcacagagtaaggtcctaacctatgaccaagccaaggctgattctcagagggccaagaaggacatcagattgggcccatttgatgtcacccggaaagtgtttgcagctggagaggagactccacacatgtcactgatggacaaatcggatctctttttccatgactattccattgcacccctctttgtccaggagaactacctccatgtaaagcctgtggctgcagggggtgacatgaaaaagcacttgatgcttttaagccgggcagcagatagcatatgtgacggtgacttagtggccaatcagatccggagtaagcaaaactggagtctctcccacacaggccatttacgccagcgttgttcctggagagttgatgaggggctacatgtctcagtttcccagcttcccaaggctggctgggaaagcactcgtctatgggcaagcactgatcggactgttcaggacctgtccttgcacatgagtcttagaacttactccagcaaaaggacagtgaacatggattacctgtcacacatcagagacgcacttgtacgacccttgacctcacaaggagtagaaggggttcagcgtgttgtcacacttatgttggtgaaagaagattttgacaacatcatggaagttagcagcgatacatactattgggggggcaagcccagtaccttttccaagctggaccccaaggtgaaagcagccttcacaagagcctataataaggaggcccacctgaccccatactcacttcaggtggtaaaggcatcgaggcccagcataggtccagcactggattctgagtacaatgaagagtcacaggaagatgccactcagtctgatgagaaagagcaggatgccctagagactgacgccatgatcaag

SEQ ID NO: 611 - protein, 1104 aa, Rattus norvegicus
  ref <308>: DATABASE ACCESSION NUMBER: SWISS-Prot / AAD01890
  ref <309>: DATABASE ENTRY DATE: 2002-06-01
MDIRKFFGVISSGKKPVNETVKKNEKTKPSEGTVKGKKGVKVAKVNNPCKEDASRPKQHTEKRGSSMTQIQNQRRHVQVKDAKKKSEKLPRVLVNLVNLSEGSSLPHISETDEDAVTFYVKRQPPNQKRMEYLRNSYLGASNVKKNEENTKTKSKPLSPIKLTPTSVLDYFGTESVQRSGKKMVASKKKESSQTPDDSRLNDEAIAKQLQLDEDAELERQLHEDEEFARTLALLDEEPKTKKARKDSEEGESFSPAKAELSKAAKQKSPANEHFSIGRKTYSPAKYGKGRGSEGTKQPCRSAHQTEACSSLKASSKLALMKAQEENSHTDTELLAAKRESAIEPKGEKTTPRKTKGSPTKRESVSPEDSEKKRTNYQAYRSYLNREGPKALGSKEIPKGAENCLEGLTFVITGVLESIEREEAKSLIERYGGKVTGNVSKKTSYLVMGRDSRQSKSDKAAALGTKILDEDGLLDLIRTMPGKKSKYEIAAEAEMKKEKSKLERTPQKNDQGKRKLSPTKRELEPKKSKLTPLKHSPRKAVKEEERVCPRGLDAKEPHGSHSASREECLLWVDKYKPTSLKNIIGQQGDQSCANKLLRWLRNWHKSSPEEKKHAKFGKVASKDDGSSFKAALLSGPPGVGKTTTASLVCQELGYSYVELNASDTRSKNSLKAIVAESLNNTSIKGFYTSGASPSVSARHALIMDEVDGMAGNEDRGGIQELIGLIKHTKIPIICMCNDRNHPKIRSLVHYCFDLRFQRPRVEQIKSAMLSIAFKEGLKIPPPAMNEIILGANQDVRQVLHNLSMWCAQSKVLTYDQAKADSQRAKKDIRLGPFDVTRKVFAAGEETPHMSLMDKSDLFFHDYSIAPLFVQENYLHVKPVAAGGDMKKHLMLLSRAADSICDGDLVANQIRSKQNWSLSHTGHLRQRCSWRVDEGLHVSVSQLPKAGWESTRLWASTDRTVQDLSLHMSLRTYSSKRTVNMDYLSHIRDALVRPLTSQGVEGVQRVVTLMLVKEDFDNIMEVSSDTYYWGGKPSTFSKLDPKVKAAFTRAYNKEAHLTPYSLQVVKASRPSIGPALDSEYNEESQEDATQSDEKEQDALETDAMIK

SEQ ID NO: 612 - DNA, 4952 bp, Homo sapiens
  ref <308>: DATABASE ACCESSION NUMBER: EMBL / L23320
  ref <309>: DATABASE ENTRY DATE: 1999-07-01
tcagtctggtactcttttttgaatgttgtcaaaactagttaattggaagttaacggtactatttatactaaaagagtaccagactgtcttcgccttcttgcacttcgcgggagaagttgttggcgcgaatggatcctgagcctcgataacagattcctcaaccggcccacccgccagccagccagcgccttcatcctggggctgcgatggacattcggaaattctttggagtaataccaagtggaaagaaacttgtaagtgaaacagtaaagaagaatgagaaaacaaagtctgatgaagaaactttaaaagcaaagaaaggaataaaggaaatcaaggtaaatagctcccgtaaagaggatgacttcaaacaaaagcaaccaagcaagaaaaagaggatcatctatgattcagattcagagtcagaggagacgttgcaggtaaaaaatgccaaaaagccaccagaaaaactgccagtatcttctaaacctggtaaaatttcacggcaggatcctgttacatacatttcagaaacagatgaagaagatgactttatgtgtaagaaggcggcctctaaatcaaaagagaatggaagatctacaaatagtcatcttggaacatcaaacatgaaaaagaatgaagaaaacactaagaccaagaataagcctttatcaccaataaaacttacacccacatcagtacttgattattttggaactggaagtgtccaaagatctaataagaagatggtggcaagcaaaagaaaagagctttcacaaaatacagatgagtctggattaaatgatgaagccatcgccaagcaattacagcttgatgaagatgcggagctggagaggcagttgcatgaagatgaagagtttgccagaacattagccatgttggatgaagaacccaagaccaaaaaggctcgaaaggacacagaagcgggagaaacgttttcatctgtccaagccaatttaagtaaagcagaaaaacataaatatcctcataaagtaaaaacagcacaagtttcagatgaaagaaagagctacagtcctaggaagcaaagtaaatatgaaagttcaaaagaatctcagcaacattccaagtcatcagctgacaaaataggagaagtctcttctcccaaggccagttctaagctggcaattatgaaaagaaaaaaagagagctcttataaagaaatagagcctgtggcctcaaaaagaaaagaaaatgccattaaattgaaaggagagacaaaaactcctaagaaaaccaaaagttctccagctaaaaaagagtctgtaagtcctgaagattctgaaaagaaacgcactaattatcaagcttatcgaagctacttaaatcgagaaggtcccaaggctctgggctccaaagaaataccaaagggagctgaaaattgcttggaaggccttatatttgtaatcacaggcgtgctggagtctattgaacgagatgaggccaagtctctaattgaacgttatgggggaaaagtaacaggaaatgtcagcaagaaaacaaattatcttgtcatgggtcgtgatagtggacagtccaagagtgataaggccgcagccttggggacaaaaattattgatgaagatggcctgttgaatctgattcggactatgccaggcaagaaatccaagtatgaaatagcagttgaaactgagatgaagaaagagtccaaactggagagaacaccccaaaaaaatgtccaaggaaaaagaaaaattagtccatctaaaaaggaatcagaatctaaaaagagcaggccgacttccaaaagggacagtttggcaaagacaataaaaaaggaaacagatgtgttttggaaaagcctggatttcaaggagcaggtggctgaggagacaagtggtgacagcaaggctaggaatttggctgatgacagcagtgaaaacaaagtggaaaatttgctctgggtggataaatataagccaacctcgctcaagaccataattggacagcaaggtgaccagagctgtgccaacaaactcctacgctggctccgaaactggcaaaagagttcttccgaagataaaaaacacgcagcaaagtttggtaaattttccggcaaagatgatggctctagttttaaagcagcgttgctgtcaggccctcctggtgttggcaaaaccaccacagcttccctggtgtgtcaggagttgggatacagctacgtggaactgaatgcaagtgacacccggagtaagagcagtttgaaagcgattgttgctgagtcactgaacaataccagcatcaaaggcttttattcaaatggagcagcctcttcagtaagcacgaaacatgctctcatcatggatgaagtagatggcatggcaggcaatgaggataggggaggaattcaggaattaattggcctgataaaacatactaaaattcccattatttgtatgtgcaatgatagaaatcatcccaagattcgctctctggttcattattgttttgatcttcgttttcaaagacctcgggttgaacagattaagggtgctatgatgtctattgcatttaaagaaggtttaaagattccccctccagctatgaatgaaataattttgggagccaatcaagatatcagacaggttttacataatctgagtatgtggtgtgcacgaagtaaagcattaacctatgaccaggccaaagctgattctcacagagccaaaaaggatatcaaaatgggcccatttgatgttgcccggaaagtgtttgcagctggagaggagactgctcacatgtcacttgtggacaagtcagatctcttttttcatgattattcaatagcacccctcttcgtccaggaaaattacatacacgtgaagcctgtagcagcagggggtgacatgaaaaagcacctgatgcttttaagcagagcagcagacagcatatgcgatggtgacctagtggacagccagatccggagtaagcaaaactggagtcttctgcctgcgcaggccatttatgccagtgttcttcctggagagttgatgagggggtacatgacccagtttcccaccttcccaagctggctggggaagcactcgtctacaggcaaacatgatcgtattgttcaggacctggccttgcatatgagtctcagaacttactccagcaaaaggactgtaaacatggattatctgtcgcttctaagggatgcacttgtacagcccttgacctcacaaggagtagacggagtacaggatgttgttgcacttatggacacatattatttgatgaaagaagactttgagaatatcatggaaatcagcagctggggtggcaaacctagtcccttttcaaagctggatcccaaggtgaaagcagccttcacaagagcttacaataaggaagcccaccttactccatactcacttcaagctataaaggcatctagacacagcacaagcccatccctggattcggaatacaatgaagaattaaatgaagatgactctcaatctgatgagaaagaccaagatgctatagaaactgatgccatgatcaagaaaaagacaaaatcttcaaagccttcaaaaccagaaaaagataaggagcccagaaaaggaaaaggaaaaagttcgaagaaatgaaaccatttttcactagcgacagccactttttactctccctcctgaccagtccagctggtctagagaaagccttgttttttcccagagcaaccatgttttagcataatgggatgacctggtgtcccattataaataaagggtggtatggctagaagggtatgagcagtaggcttatgtacacctcttatagaggttgataggactgcttgggtcctccactgtcctctgtcaatctagttagacgtgcttctgaatgactgtagaattggaactagaaactacacctgggctttggagtcagattttagttaacaataatgagcctggagcagtagtactaaggcgtcttttgtaggcttaagaatttatcctaatggcctttataggaccaatgctgattttttttaaaggcagttcctattatgtggtgaaattttgtaaataaatgattatacaaaacagtcaccacctagaactgggtattctttgtacattgtcagatatctttcaaagtataaattaggaataaaaatgttccacatgatatgtgtacaaattctttttaagattgtcatcttgtacagcaaaatattatgttggtatattacttccttattaatttgcaaatgattggattaaaaaagctcactgtattccttactaacctgttgtgtgaaacataacattggcagtcgaggagtcagaactcggattcccagcctcactccctctgtgtgtgttgaccacgtctctgctgtgaataggatttcatgcagtggtctgttatggggctttgcagcgtggggggctgcagaagattctcagacattcttatccttctggagtctcaacccatcaggttcagaccagtaggaaccaggctgggtcaggctcttaatttcactacggtgggggacaaaatgaacactggcttttgttcactttgcccctgagagatctagtcctgtcctgtgatggcttccacaaaccctgttggaagtttgggttattcctataactgtatgtgttgagtggccgtgacgtatggacctagcctggaatttagatgtctagctattttttaatcttgttggtaaatgctcagaggtctgtgctacctctgtgaggtatatactaaaatgaatgtaaaataaggatcgtattccctgctttaaggaactggtagtcttgtttgggtgatgagacaaagttcttgagacatttaaactgtatttaccagtgtgaaaaatgtcatttatggagattaattcattatggaaataaaacattgcctaagca

SEQ ID NO: 613 - protein, 1147 aa, Homo sapiens [sequence omitted]

SEQ ID NO: 614 - DNA, 816 bp, Rattus norvegicus
  ref <308>: DATABASE ACCESSION NUMBER: EMBL / AF030087
  ref <309>: DATABASE ENTRY DATE: 1998-07-15
gttgtgctagattaaagtttcagagctcagtagattgagattgtaatgtctgtcatgtatgcatgcatttctgtaacagacatgcatcaacttttacataagtacgcttgtgtgactcgttgagaaaacacaggaaagaaagattgtaagtccaaatcatgtcttccactttgctcttctatatttcttgaccacttagaaaaaaagctcacaagcctttgaagaaacagcagcaggctgttatttttttcaaggtttacaaattaagtgcttgatttttaatgtattctcgctactgttttgattttcagatcttgattcaatatttgaagatgtgccttttattgggtaatgttaattctcgaatgtagtaatgttgtaccacaattgtaatgttacatgatcatgggtgtggcattctctgacaaattatgtgacaagaaagtcattttcagagaactcatggctccgattgcacagtccccttgctaaagcaaagggcactctcttaaggctacttcagaactggtctttgtattttctctaagtgatggatgcgtcgtgtccatttagaggcagggtaccacgtgtcccaggcagccctagatatgtgccatgagaaagttcaaagactaacaaagtctacaggaactcaaaatttcatttttgtaatggtaaccccccaagattttctccaagaaataaattattttgtactttataacttaaaagcagctagtagtacatttctgagatatagcaggagaccaaaacatttttggaaaaagaataaatatataaagagaaaaaaaaaaa

SEQ ID NO: 615 - DNA, 816 bp, Rattus norvegicus; identical to SEQ ID NO: 614
  ref <308>: DATABASE ACCESSION NUMBER: EMBL / AF030087
  ref <309>: DATABASE ENTRY DATE: 1998-07-15

SEQ ID NO: 616 - DNA, 816 bp, Rattus norvegicus; identical to SEQ ID NO: 614
  ref <308>: DATABASE ACCESSION NUMBER: EMBL / AF030087
  ref <309>: DATABASE ENTRY DATE: 1998-07-15

SEQ ID NO: 617 - DNA, 816 bp, Rattus norvegicus; identical to SEQ ID NO: 614
  ref <308>: DATABASE ACCESSION NUMBER: EMBL / AF030087
  ref <309>: DATABASE ENTRY DATE: 1998-07-15

SEQ ID NO: 618 - DNA, 4831 bp, Rattus norvegicus
  ref <308>: DATABASE ACCESSION NUMBER: EMBL / AF030089
  ref <309>: DATABASE ENTRY DATE: 1999-07-19
agcccgctccccgagcagccttagccatccctaactaatccaactgcttcccagtctgcgggtgctgggctcggtgctgagaagaggctctggctcttggctattgtcaggtcaaacactaagactgtgtccatgttagaactcatagaagttaatggaacccctggcagtcagctctccactccgcgctccggcaagtcaccaagtccatcgcccaccagcccaggaagcctgcggaagcagagggacctgtaccgccctctctcgtcggatgatttggactcagtaggagactcagtgtaaaagacacagtggagcgatgtgtatggtttgtgatgggatcaaggtttcccatttcctaagcaagcatctaacagcaaaatacacaaaagagttttgcataagcaattaaattatacaaaagcaagagtgcagacattttctactcggcggtattctttgaaagaaaaaaaaacttttttaaagcatctcctccatttgatgtaaccgaggagagtttgaatacaatatttgttcatcactgaggattttatgactaaggtctggttccagataaatttcatatatgactccaatattaagtacaagaatcaccctaacgatccagcattatggagtcaccatttctataaatgagcctgctttttaatcagtaagtagatatataaatacaatttttctgtacttagtatcttttacctttttagtttaaatttttttaaaaaaatcagacagctaattagttatttcattgcaaaataacataaaagaatctcttcaggattttttatttgagtgaatacgtctgaaggggagtggaggaactccgtaagagacgtctcccagagaccaacattaggcagcgagaacgtttctggttttttttttttttttttttttgtttttgttttttgccacatggattttcttttcccagatttttataaaaatagtttcaactacatggaaacatgaataacttggcattattattaattttataatggttccctacagcaacaacagtatatatatctttttcaagtgtgtaaagttttttgacctaaaacaaatgggacttgtactgtttttcaaaaaataaactcagtttgagaattggaattcttctacacagagcttgtacgttgggcctccaggtagctaaactccattctgatcatcctgcatcccgttgtttgggatatcttcacatgcaaaactccttttgtgtcaaaccgagtgtgtctatgattataacccactgttaaaattaacctactaattcttctcctttagtcctctactttcaaaagcgtgagtcagctttgcttaaatgtaaaacagttattttttaaatctagatgttagaaatcaatgtgtacggtgtattgtatttagaccatacccgtgaccgtttctttttactagctcaaacactaacaatttaagacttacaaagcatgggttttatattcgccaggcttgacatatctcagtagggtgacagatttaaaatgtatggtgccatttggagccttttacttgagatttctttcaaatttcacttgaaaacattttgaaaatgcctgattcaagatggagaggagttgccttgtcatacggtctcaaatgttattgatttatttctctcagtagactgttcgactagcaatttttcccatctggtttatcgttacctgtgctagcatctcacttgacaagtgaataaaatattccaactgaaaaaagaaaaataagacctccaggcaacctaccagcatttgaaaagttagccgagtgataattagtgcctcattaccctgcctgttagagaggagagggcacttctttggcgtgttatttgagaactgcagactgatccctccatcttgaaagcacagagaatgatcatacctgttccagacttcggattttaaaactgtttccaatagacacgaacagagactcctgctgagatgaaagggccgctttgtctttagctgaaacagtaaacatctgggaggatgctgtgctgcctgttggagtgttacgtctttgtaagatgcattgcttaatatagtccaacccgtaaaagattagtacagatttgactaacctgtcaaaaaatgcaatgaaagcagtgggtcagatggtccagaacaaaacataaattccagtaatttcaactcccctatgaagtcaatcttatggacgactactgctaggagaaacctaataaatgttatctgctataaaaatcgtggctttgtttagacacagcatagagtagacttggactaattgccagtaggtattgtggccaactttccattcaagcagttccagagagatgcaatcccatggcatttcatcctggaacatacgatttttattaaaggattgttcaagggccatatatctcatttacttttgaaactaaagtccctctgagattgaaacaacacaccctgagatctctttctatgcacggaataattctattatccaaaagcagagtttttgaacatccaagcagcccaccaggtcattagtaaagacccaatgggcaattagcagtcactcaagacgtggctgcttttagaatccttctaacatcattagtcgctgaactctaaaaatgaccttctgaggagagagctccagccaacaaaagccacatgcttttctctcactgataaagcctctgctgtgttgacctttcaggcctttgcatgtatggttacatttttttagacatacctagaaagaaagatgctataaagagtcccctgctttcagcattttatgagctaaaaccctagtgatgcacaaaatgtgttgctctgcgtgaactccgaagccatgtgggaaagtcattgtcatttcagcagaaggtctgtactcttgtaggtttctaaaccggaagtttgtgctccacctatatgtacgcatgcctgcaatgcacacatgaggtcaccttaacatgtcaagatctgatcccgttgtctgccaaccccagagcagctctgacacctatgctcccctgccaagcagcgagggcactcgccctccccttccttgcagccgcaccgagctgtacttttgtttccatttaaaagaactgaattccaaaagcctcgttttaaaaaagcaattgggaatgaaaatacataagaataatcctaaaagataaatccatatatttaacctgttgaactactaggttttttttttcttttcctggtggccatatatctatacaggtgtgtaggtgtgcctacataaatatctgtgtttgtatatagaacatgaagaataaaggatgatatttgtgatatggtcttataagttactggctcctgtagaattaactgtgaagctttatgtgataaagttgtgacgtatgtattagttggcacatgtttaagctcaaaacaagttggctaaattatcatgaagcagtaccaactgttcacgggtacgaatttatccaagaccgattggaatccagacaaacaaaaaaattgaagtccaagcaaatccaatcttacagtgattgataaatgtaaatactcattgatgttttcactgtaaattcttgatgctcagccagtaatctgacagaatgcagtgacactttcctgttgtgtgtgtactgatgactacagcgattatcaatgggaaattcaccaaacaaactgatttctagacttgtggacagttgagtgttgtgctgaaataaaagtagaaaaggtcaaagtaaattcggtttgaagccttgttatgaagccagacaacatgtaaggccatgctgtgtgtcctttttataaactgttttggagacacttgctgtgtgtgtgcatgtgtgtctacatgagtgtatacacacttgaaaatgcttattgactcaagttcactgtctgtatacatctgtgcctatctgcattggtctggccagcgcctctaactgtgcatggtagtgacagccctgtgtgattggatgaacccacagaaaaatagtgtggaaatcagagctgcgtcaaactcattataacaattgcctgatatagcatattaaattgtcagctgaaaaacgtttgtaatgttgtgcctgtaacatgtgtagggaaaactggaaaatctgaggccctcactataattttaagggtgcatgacatgtggtgtctttaaagatgtatcttattgtaataaaaggtgatggataaattctgaggtagcgtaagtgaagcatgaaacgctaggtgtttgtattatatatggccacacaatatttttgaaggcagggtagtaaatgtttgaaggttaataggcaaagaatatggaagttaattttactgtgatgtgtttttgaggtgtttttacacattgccagacaaggaacttagttcctgtttcccccctgtggactctttgaaacactatgaatgttacaaagttggattttctttataaaggtcgcaaaccatttgcagttggagttgcttggatgtatagtctcctctttggggaaaaaaaccactttggtattaaaatggtttaagcactaatacattgggaaatacgtcgtctgaggccatctgcagacatctgtagagatgagaactaatgaaatgtgttactgaactacccagttttgatagcttccatgcctctctgctgtagtctcctcgaaaatgctgtaccttgtgtttcacatgcaaccatgttactctctcccgaacttacctttgtgacacttagcagcttagccaaaccacgtaataaacaggaagaactgcaaaaaaaaaaa

SEQ ID NO: 619 - protein, 56 aa, Rattus norvegicus
  ref <308>: DATABASE ACCESSION NUMBER: SWISS-Prot / AAD43824
  ref <309>: DATABASE ENTRY DATE: 2000-05-01
MLELIEVNGTPGSQLSTPRSGKSPSPSPTSPGSLRKQRDLYRPLSSDDLDSVGDSV

SEQ ID NO: 620 - DNA, 861 bp, Homo sapiens
  ref <308>: DATABASE ACCESSION NUMBER: EMBL / BI598343
  ref <309>: DATABASE ENTRY DATE: 2001-09-10
agcgggagccttagccatccttaaactcatccaaccgattcccatttccgcgggtgcttggcttagtgctgagacgggattccgccgttggtattcaggtccaacactaagactgtgtccatgttagaactcatagaagttaatggaacccctggtagtcagctctctactccgcgctcaggcaagtcgccaagcccatcacccaccagcccaggaagcctgcggaagcagaggagctctcagcatggcggctcctctacgtcacttgcgtccaccaaagtctgcagctcgatggatgagaacgatggccctggagaagaagtgtcggaggaaggcttccagattccagctacaataacagaacgatataaagtcggaagaacaataggagatggaaattttgctgttgtcaaggaatgtgtagaaagatcgactgctagagagtacgctctgaaaattatcaagaaaagcaaatgtcgaggcaaagagcacatgatccagaatgaagtgtctattttaagaagagtgaagcatcccaatatcgttcttctgattgaggagatggatgtgccaactgaactgtatcttgtcatggaattagtaaacggggggagacctttttgatgccattacttccactaacaaatacaccgagagagacgccagtgggatgctgtacaacctaagccagcgccatcaatacctggcataggcctgaacatcgtccaccgtggattccagccagagaaacctgctggtgttattgagcaccagaatggcagcaaatcactgaagctgtgtgaccttggaactggcccccattgttcaaccggcccctgtaacacacgtcctgtggacccg

SEQ ID NO: 621 - protein, 740 aa, Homo sapiens
  ref <308>: DATABASE ACCESSION NUMBER: SWISS-Prot / O15075
  ref <309>: DATABASE ENTRY DATE: 2002-06-15
MSFGRDMELEHFDERDKAQRYSRGSRVNGLPSPTHSAHCSFYRTRTLQTLSSEKKAKKVRFYRNGDRYFKGIVYAISPDRFRSFEALLADLTRTLSDNVNLPQGVRTIYTIDGLKKISSLDQLVEGESYVCGSIEPFKKLEYTKNVNPNWSVNVKTTSASRAVSSLATAKGSPSEVRENKDFIRPKLVTIIRSGVKPRKAVRILLNKKTAHSFEQVLTDITDAIKLDSGVVKRLYTLDGKQVMCLQDFFGDDDIFIACGPEKFRYQDDFLLDESECRVVKSTSYTKIASSSRRSTTKSPGPSRRSKSPASTSSVNGTPGSQLSTPRSGKSPSPSPTSPGSLRKQRSSQHGGSSTSLASTKVCSSMDENDGPGEEVSEEGFQIPATITERYKVGRTIGDGNFAVVKECVERSTAREYALKIIKKSKCRGKEHMIQNEVSILRRVKHPNIVLLIEEMDVPTELYLVMELVKGGDLFDAITSTNKYTERDASGMLYNLASAIKYLHSLNIVHRDIKPENLLVYEHQDGSKSLKLGDFGLATIVDGPLYTVCGTPTYVAPEIIAETGYGLKVDIWAAGVITYILLCGFPPFRGSGDDQEVLFDQILMGQVDFPSPYWDNVSDSAKELITMMLLVDVDQRFSAVQVLEHPWVNDDGLPENEHQLSVAGKIKKHFNTGPKPNSTAAGVSVIATTALDKERQVFRRRRNQDVRSRYKAQPAPPELNSESEDYSPSSSETVRSPNSPF

SEQ ID NO: 622 - DNA, 2128 bp, Rattus norvegicus
  ref <308>: DATABASE ACCESSION NUMBER: EMBL / AF030091
  ref <309>: DATABASE ENTRY DATE: 2002-03-01
gtcacgggaagatccgtcgcgccgaggacgctggttagtctcgctttgggttccggctgcgtcgggcgtgcgtgtagctcgctagaactatggcgtccgggcctcacccgacatcgaccgctgccgccgcctctgcctcgtccgccgccccgagtgcgggcggctccagctccggcacgacgaccacgacgacgacgacgaccggagggatcctgattggcgaccgcctgtactcggaggtgtcgcttaccatcgaccactcggtgattccggaggagcggctctcgcctaccccgtccatgcaggacggcctcgacctgcccagcgagacggacctgcgcatcttaggctgcgagctcatccaggccgccggcattctcctccggctgccgcaggtggcgatggctacggggcaggtgttgtttcatcgttttttctactccaagtctttcgtcaaacacagtttcgagattgttgccatggcctgtattaatcttgcatcaaaaattgaagaagcaccaagaagaataagagatgtgattaatgtattccaccacctccgccagttaagaggaaaaaggactccaagccccctgatccttgatcagaactacattaacaccaaaaatcaagttatcaaggcagagaggagggtgctaaaggagttgggattttgtgttcatgtcaagcatccccataagatcattgtaatgtatttacaagtcttagaatgtgaacgtaaccaaaccctggttcagactgcctggaattatatgaatgacagtcttcgaaccaatgtttttgttcgctttcaaccagagactatagcatgtgcttgtatctaccttgcagctagagcacttcaaattccattgccaactcggccccattggtttcttctttttggtaccacagaagaggagattcaagaaatctgcatagagacacttagactttataccaggaaaaagcctaactatgaattgctggaaaaggaagtagaaaaaagaaaagtagccttacaggaagccaagttaaaggcaaagggattgaatcttgatggaactccagccctttccactttaggtggtttttctccagcctccaaaccatcatcaccaagagaagtaaaagctgaagagaaatcaccagtttccattaatgtgaagacagtcaaaaaagaacctgaggatagacaacaagcttccaaaagcccttataatggtgtaagaaaagacagcaagagaagcagaaacagcagaagtgccagtagatcaaggtcaagaaccaggtcacgctctagatcacacaccccaagaagacattataataataggcgaagtcgatctggaacatacagctcaagatcaagaagcaggtctcgcagtcacagtgaaagtcctcgaagacatcataatcatggttctcctcaccttaaggccaaacataccagagaagatttaaaaagctcaaatagacatggtcataaaaggaaaaaatctcggtctcgatctcagagcaagactcgggatcactcagatgttaccaagaaacacaggcatgaaagggggcatcacagagacaggcgtgaaagatctcgctcctttgagaggtcccataaaggcaagcaccacggtggaagtcgctcaggacatggcaggcataggcgctgactttcatcctctgacactgcatcggtccctggtgttgcccatatgcagtgtgacgatgtatggactcaatcaaaacatgaaaagcaaactgattagggattgatttattaaaattgtctaggtttctagaaacactgaggacattttcttttgaaaagaactatgttaaggttttttgcacattaaaatgccctagcagtatctaattgaaaaccatggtcaggttcaattgtactttattatagttgtgtattgtttattgctataagaactggagcgtaaattctgtaaaaatgtatcttatttttatacagataaaacttgcagacactgttctatttaagtggttatttgtttaaatgatggtgaatactttcttaacactggtttgtccgcatgtgtaaagatttttacaaggaaataaaatacaaatcttgtttttctaaaaaaaaaaa

SEQ ID NO: 623 - protein, 527 aa, Rattus norvegicus
  ref <308>: DATABASE ACCESSION NUMBER: SWISS-Prot / AAD45558
  ref <309>: DATABASE ENTRY DATE: 2003-02-01
MASGPHPTSTAAAASASSAAPSAGGSSSGTTTTTTTTTGGILIGDRLYSEVSLTIDHSVIPEERLSPTPSMQDGLDLPSETDLRILGCELIQAAGILLRLPQVAMATGQVLFHRFFYSKSFVKHSFEIVAMACINLASKIEEAPRRIRDVINVFHHLRQLRGKRTPSPLILDQNYINTKNQVIKAERRVLKELGFCVHVKHPHKIIVMYLQVLECERNQTLVQTAWNYMNDSLRTNVFVRFQPETIACACIYLAARALQIPLPTRPHWFLLFGTTEEEIQEICIETLRLYTRKKPNYELLEKEVEKRKVALQEAKLKAKGLNLDGTPALSTLGGFSPASKPSSPREVKAEEKSPVSINVKTVKKEPEDRQQASKSPYNGVRKDSKRSRNSRSASRSRSRTRSRSRSHTPRRHYNNRRSRSGTYSSRSRSRSRSHSESPRRHHNHGSPHLKAKHTREDLKSSNRHGHKRKKSRSRSQSKTRDHSDVTKKHRHERGHHRDRRERSRSFERSHKGKHHGGSRSGHGRHRR

SEQ ID NO: 624 - DNA, 1875 bp, Homo sapiens
  ref <308>: DATABASE ACCESSION NUMBER: EMBL / AY034790
  ref <309>: DATABASE ENTRY DATE: 2002-07-09
ttttttttttttaaagttaaagcaagtttattaagaaagtaaaggaataaagaatggctactccataggcatagcagccccgagggctgctggttgcccattttaacggttatttcttgatgatatgctaaacaaggggtgtattattcatgcctcccctttttagaccatataggataacttcctgatgttgccatggcatttgtaaactgtcatggcgctggtgggagtgtagcagtgaggacgaccagaggtcactctcgttgccatcttggttttggtgggttttggctggcttctttactgcaaccattttatcagcaagcggctcgctaagactatggcgtccgggcctcattcgacagctactgctgccgcagccgcctcatcggccgccccaagcgcgggcggctccagctccgggacgacgaccacgacgacgaccacgacgggagggatcctgatcggcgatcgcctgtactcggaagtttcacttaccatcgaccactctctgattccggaggagaggctctcgcccaccccatccatgcaggatgggctcgacctgcccagtgagacggacttacgcatcctgggctgcgagctcatccaggctgccggcattctcctccggctgccgcaggtggcgatggcaacggggcaggtgttgtttcatcgttttttctactccaaatctttcgtcaaacacagtttcgagattgttgctatggcttgtattaatcttgcatcaaaaatcgaagaagcacctagaagaataagagatgtgattaatgtattccaccacctccgccagttaagaggaaaaagcgaccagctacatttaccaaagcctgggtgatgtggagtggtacatagagatgaagctgtcgtcatggcaacagactccaagccccctgatccttgatcagaactacattaacaccaaaaatcaagttatcaaagcagagaggagggtgctaaaggagttgggattttgtgttcatgtcaagcatcctcataagatcattgttatgtatttacaagtcttagaatgtgaacgtaatcaaaccctggttcaaactgcctggagttacatgaatgacagtcttcgaaccaatgtgtttgttcgatttcaaccagagactatagcatgtgcttgcatctaccttgcagctagagcacttcagattccgttgccaactcgtccccattggtttcttctttttggtactacagaagaggaaatccaggaaatctgcatagaaacacttaggctttataccagaaaaaagccaaactatgaattactggaaaaagaagtagaaaaaagaaaagtagccttacaagaagccaaattaaaagcaaagggattgaatccggatggaactccagccctttcaaccctgggtggattttctccagcctccaagccatcatcaccaagagaagtaaaagctgaagagaaatcaccaatctccattaatgtgaagacagtcaaaaaagaacctgaggatagacaacaggcttccaaaagcccttacaatggtgtaagaaaagacagcaagagaagtagaaatagcagaagtgcaagtcgatcgaggtcaagaacacgatcacgttctagatcacatactccaagaagacagcaagcaaatgttttcttagggaagcagtcttatttggagtttttaaaggttattgctttttctttaaaaattgaacatagattattttcaaagttaggttagaattaggcttttcagtatgaggcaaattatgagaaatgagtttggagatgttctggacatacagtatcttaatggcattctgttatattttctcccatgttttttggagaagtgtaggagctacccg

SEQ ID NO: 625 - protein, 526 aa, Homo sapiens
  ref <308>: DATABASE ACCESSION NUMBER: Refseq / NP_064703
  ref <309>: DATABASE ENTRY DATE: 2002-05-15
MASGPHSTATAAAAASSAAPSAGGSSSGTTTTTTTTTGGILIGDRLYSEVSLTIDHSLIPEERLSPTPSMQDGLDLPSETDLRILGCELIQAAGILLRLPQVAMATGQVLFHRFFYSKSFVKHSFEIVAMACINLASKIEEAPRRIRDVINVFHHLRQLRGKRTPSPLILDQNYINTKNQVIKAERRVLKELGFCVHVKHPHKIIVMYLQVLECERNQTLVQTAWNYMNDSLRTNVFVRFQPETIACACIYLAARALQIPLPTRPHWFLLFGTTEEEIQEICIETLRLYTRKKPNYELLEKEVEKRKVALQEAKLKAKGLNPDGTPALSTLGGFSPASKPSSPREVKAEEKSPISINVKTVKKEPEDRQQASKSPYNGVRKDSKRSRNSRSASRSRSRTRSRSRSHTPRRHYNNRRSRSGTYSSRSRSRSRSHSESPRRHHNHGSPHLKAKHTRDDLKSSNRHGHKRKKSRSRSQSKSRDHSDAAKKHRHERGHHRDRRERSRSFERSHKSKHHGGSRSGHGRHRR

SEQ ID NO: 626 - DNA, 2128 bp, Rattus norvegicus; identical to SEQ ID NO: 622
  ref <308>: DATABASE ACCESSION NUMBER: EMBL / AF030091
  ref <309>: DATABASE ENTRY DATE: 2002-03-01

SEQ ID NO: 627 - protein, 527 aa, Rattus norvegicus; identical to SEQ ID NO: 623
  ref <308>: DATABASE ACCESSION NUMBER: SWISS-Prot / AAD45558
  ref <309>: DATABASE ENTRY DATE: 2003-02-01

SEQ ID NO: 628 - DNA, 1875 bp, Homo sapiens; identical to SEQ ID NO: 624
  ref <308>: DATABASE ACCESSION NUMBER: EMBL / AY034790
  ref <309>: DATABASE ENTRY DATE: 2002-07-09

SEQ ID NO: 629 - protein, 526 aa, Homo sapiens; identical to SEQ ID NO: 625
  ref <308>: DATABASE ACCESSION NUMBER: Refseq / NP_064703
  ref <309>: DATABASE ENTRY DATE: 2002-05-15

SEQ ID NO: 630 - DNA, 2128 bp, Rattus norvegicus; identical to SEQ ID NO: 622
  ref <308>: DATABASE ACCESSION NUMBER: EMBL / AF030091
  ref <309>: DATABASE ENTRY DATE: 2002-03-01

SEQ ID NO: 631 - protein, 527 aa, Rattus norvegicus; identical to SEQ ID NO: 623
  ref <308>: DATABASE ACCESSION NUMBER: SWISS-Prot / AAD45558
  ref <309>: DATABASE ENTRY DATE: 2003-02-01

SEQ ID NO: 632 - DNA, 1875 bp, Homo sapiens; identical to SEQ ID NO: 624
  ref <308>: DATABASE ACCESSION NUMBER: EMBL / AY034790
  ref <309>: DATABASE ENTRY DATE: 2002-07-09

SEQ ID NO: 633 - protein, 526 aa, Homo sapiens; identical to SEQ ID NO: 625
  ref <308>: DATABASE ACCESSION NUMBER: Refseq / NP_064703
  ref <309>: DATABASE ENTRY DATE: 2002-05-15

SEQ ID NO: 634 - DNA, 2128 bp, Rattus norvegicus; identical to SEQ ID NO: 622
  ref <308>: DATABASE ACCESSION NUMBER: EMBL / AF030091
  ref <309>: DATABASE ENTRY DATE: 2002-03-01

SEQ ID NO: 635 - protein, 527 aa, Rattus norvegicus; identical to SEQ ID NO: 623
  ref <308>: DATABASE ACCESSION NUMBER: SWISS-Prot / AAD45558
  ref <309>: DATABASE ENTRY DATE: 2003-02-01

SEQ ID NO: 636 - DNA, 1875 bp, Homo sapiens; identical to SEQ ID NO: 624
  ref <308>: DATABASE ACCESSION NUMBER: EMBL / AY034790
  ref <309>: DATABASE ENTRY DATE: 2002-07-09

SEQ ID NO: 637 - protein, 526 aa, Homo sapiens; identical to SEQ ID NO: 625
  ref <308>: DATABASE ACCESSION NUMBER: Refseq / NP_064703
  ref <309>: DATABASE ENTRY DATE: 2002-05-15

SEQ ID NO: 638 - DNA, 3044 bp, Rattus norvegicus
  ref <308>: DATABASE ACCESSION NUMBER: EMBL / AF030358
  ref <309>: DATABASE ENTRY DATE: 2000-03-03
tgcactccagccatccagccatggctccctcacagctcgcgtggctgctgcgcctggccgcgttctttcatctgtgtactctgctggcgggtcagcacctcggcatgacgaaatgcaacatcacgtgccacaagatgacctcgccaatcccagtgaccttgctcatccactatcaactgaaccaggagtcctgcggcaagcgcgccatcatcctggagacgagacagcacagacacttctgtgctgacccaaaggagaaatgggtccaagacgccatgaagcacctggaccaccagaccgctgccctgactagaaatggtggcaagtttgagaagcgtgtggacaatgtgacacctaggatcacctcggccaccaggggactgtccccaactgccctggcaaagcctgagtcagccacagtggaagaccttactttggaaccgactgctatttcccaggaggcccgaaggcccatggggacttcccaagagccaccagcagcagtgactggatcgtctccctcaacttccaaagctcaggatgcagggcttgccgccaagcctcagagcactggaatttctgaggtggctgctgtctctaccaccatttggccgagttctgctgtctaccaatctggatctagcctctgggccgaggaaaaagctactgaatccccccccactatagccctatctactcaagcgtccaccacttcaagccccaagcagaatgttgggtctgaaggccagcccccatgggtccaggagcaggactccactccagagaaatctccagggcctgaggagacaaacccagttcatactgatattttccaagacagaggacctggcagcacagtccatccctcagtggctcccacctcctctgaaaagacccccagcccggagctggtggcctcgggcagccaggctcctaaggtagaggaacccattcatgccactgcagatccccagaaactgagtgtgtttatcactcctgtccctgactcccaggcagccacccggaggcaggcagtggggttactggcctttcttggtctactcttctgtctgggggtggccatgtttgcctaccagagcctccagggctgtccccgcaaaatggcaggggagatggtggaaggcctccgctacgtcccccgtagctgtggcagtaactcgtacgtcctggtgccggtgtgagctgcctgcttgcctgcctgtgtccagagtgtgattcagacagctgtctggggacccccatcctcatacccaccttcatccacgctgggagaatgggaatgcagaagctagatcctccaggggccatgtgctccaacccccgaggagtggccctggaggccaccctagaccattattcacttatcagagacagacagagcaggtggccttccagctcccccatatttgaaagaatcctctgctgctggctggttagaggggcccttgacatcccaaactctatgagcaattatttattggattcccagccccctgagacacccgtttccccgtgcgcaccgtggtccacccatcttacaagcagcagccaggcctctctgcctgtcccctgacctcctcgtgtctcctggctttgctgcagtcgccagccctgtctcctccccggccagctgcggtgctatctatcccggtctctctctctcgtgtacagagccatcaccaccatcaccaccaacaactcgttctgtctttgcttgcatgaggttaatgctgtgttttctggagctctctgggacgggagatgagcttctgtgagggtttaaagtgttcctccccagactttgatgtgccgtgaagcatgctgcctctgaaggaaggctctggtccccactccgctgccagcacaacaaagtgccccacctgtaaaggaaaagagactcggcccagagctggcaaaaacccatggccctgacatcatcactttctctgagatctttgtccccatccctggatgccaccccccccccccagcccttatcaacatgaatagtcactgccattccactggactgacacttttgtatgctgtgattctgagggctggcaagggatgacttgagagtgcagatcctacccatgggcccccaaatggaggctgagctggggacctgcaggaagagaggccaactcagaaggctccgctgtgttctcactggcacccctcccctgtgcaccaaggtgacagtcacaggtctgccctgcctgaagaacaagccacagaaggaagattatgacaagtccctgggaggccaaggatccagggcaaaccctggagtggccacacacccaatttcagcttagggacttgtgcatgtgtgtacttgcacagcccagatcattcagaagctgccaggatcctttcctacatctgagagcgcagttcctgccaaggtctcaccttcgcctcacttcaggcagggcagaactcccataacattctccaagagccctgtgacgtgttctggaagggactctgccctgggcacaaagtgtctactgaagcagagagcagcgccccagccccagccccagcgccccagcgggagctgtaccggcagaccacgccctgggggggagggccctccgtggcagctttccgctctgaatagctccaaccgtcacctttggagcctcccaggggcgggcttcacccagccagtgactcactccttgataggtggaagctcagaacaggtggtctcgtcccagagtgaggaagccagccccttggcgaccctcctcttgggaagcttgtgggaggctctggtctggctccagagtactagttgtaggcctgaggagcagcagcccgagtgcactatatcctggttcttcggtggggagccttcaagggttgggacacccatggttggactttgttggttcccgcgcctcgtgggccaaaacaatctgaggaggactttggaaggagttggtttttcaagcatcattaccaatgtctgtgccattttgtattttactaataaaattttaaagtcttgt

SEQ ID NO: 639 - protein, 393 aa, Rattus norvegicus
  ref <308>: DATABASE ACCESSION NUMBER: SWISS-Prot / O55145
  ref <309>: DATABASE ENTRY DATE: 2002-06-15
MAPSQLAWLLRLAAFFHLCTLLAGQHLGMTKCNITCHKMTSPIPVTLLIHYQLNQESCGKRAIILETRQHRHFCADPKEKWVQDAMKHLDHQTAALTRNGGKFEKRVDNVTPRITSATRGLSPTALAKPESATVEDLTLEPTAISQEARRPMGTSQEPPAAVTGSSPSTSKAQDAGLAAKPQSTGISEVAAVSTTIWPSSAVYQSGSSLWAEEKATESPPTIALSTQASTTSSPKQNVGSEGQPPWVQEQDSTPEKSPGPEETNPVHTDIFQDRGPGSTVHPSVAPTSSEKTPSPELVASGSQAPKVEEPIHATADPQKLSVFITPVPDSQAATRRQAVGLLAFLGLLFCLGVAMFAYQSLQGCPRKMAGEMVEGLRYVPRSCGSNSYVLVPV

SEQ ID NO: 640 - DNA, 3310 bp, Homo sapiens
  misc_feature (1)..(3310): n=a, c, g or t
  ref <308>: DATABASE ACCESSION NUMBER: EMBL / U84487
  ref <309>: DATABASE ENTRY DATE: 1999-07-02
ggcacgagggcactgagctctgccgcctggctctagccgcctgcctggcccccgccgggactcttgcccaccctcagccatggctccgatatctctgtcgtggctgctccgcttggccaccttctgccatctgactgtcctgctggctggacagcaccacggtgtgacgaaatgcaacatcacgtgcagcaagatgacatcaaagatacctgtagctttgctcatccactatcaacagaaccaggcatcatgcggcaaacgcgcaatcatcttggagacgagacagcacaggctgttctgtgccgacccgaaggagcaatgggtcaaggacgcgatgcagcatctggaccgccaggctgctgccctaactcgaaatggcggcaccttcgagaagcagatcggcgaggtgaagcccaggaccacccctgccgccgggggaatggacgagtctgtggtcctggagcccgaagccacaggcgaaagcagtagcctggagccgactccttcttcccaggaagcacagagggccctggggacctccccagagctgccgacgggcgtgactggttcctcagggaccaggctccccccgacgccaaaggctcaggatggagggcctgtgggcacggagcttttccgagtgcctcccgtctccactgccgccacgtggcagagttctgctccccaccaacctgggcccagcctctgggctgaggcaaagacctctgaggccccgtccacccaggacccctccacccaggcctccactgcgtcctccccagccccagaggagaatgctccgtctgaaggccagcgtgtgtggggtcagggacagagccccaggccagagaactctctggagcgggaggagatgggtcccgtgccagcgcacacggatgccttccaggactgggggcctggcagcatggcccacgtctctgtggtccctgtctcctcagaagggacccccagcagggagccagtggcttcaggcagctggacccctaaggctgaggaacccatccatgccaccatggacccccagaggctgggcgtccttatcactcctgtccctgacgcccaggctgccacccggaggcaggcggtggggctgctggccttccttggcctcctcttctgcctgggggtggccatgttcacctaccagagcctccagggctgccctcgaaagatggcaggagagatggcggagggccttcgctacatcccccggagctgtggtagtaattcatatgtcctggtgcccgtgtgaactcctctggcctgtgtctagttgtttgattcagacagctgcctgggatccctcatcctcatacccacccccacccaagggcctggcctgagctgggatgattggaggggggaggtgggatcctccaggtgcacaagctccaagctcccaggcattccccaggaggccagccttgaccattctccaccttccagggacagagggggtggcctcccaactcaccccagccccaaaactctcctctgctgctggctggttagaggttccctttgacgccatcccagccccaatgaacaattatttattaaatgcccagccccttctgacccatgctgccctgtgagtactacagtcctcccatctcacacatgagcatcaggccaggccctctgcccactccctgcaacctgattgtgtctcttggtcctgctgcagttgccagtcaccccggccacctgcggtgctatctcccccagccccatcctctgtacagagcccacgcccccactggtgacatgtcttttcttgcatgaggctagtgtggtgtttcctgggcactgcttccagtgaggctctgcccttggttaggnattgtgggaaggggagataagggtatctggtgactttcctctttggtctacactgtgctgagtctgaaggctgggttctgatcctagttccaccatcaagccaccaacatactcccatctgtgaaaggaaagagggaggtaaggaatacctgtccccctgacaacactcattgacctgaggcccttctctccagcccctggatgcagcctcacagtccttaccagcagagcaccttagacagtccctgccaatggactaacttgtctttggaccctgaggcccagagggcctgcangggagtgagttgatagcacagaccctgccctgtgggcccccaaatggaaatgggcagagcagagaccatccctgaaggccccgcccaggcttagtcactgagacagcccgggctctgcttcccatcacccgctaagagggagggagggctccagacacatgtccaagaagcccaggaaaggctccaggagcagccacattcctgatgcttcttcagagactcctgcaggcagccaggccacaagacccttgtggtcccaccccacacacgccagattctttcctgaggctgggctcccttcccacctctctcactccttgaaaacactgttctctgccctccaagaccttctccttcacctttgtccccaccgcagacaggaccaggggatttccatgatgttttccatgagtcccctgtttgtttctgaaagggacgctacccgggaagggggctgggacatgggaaaggggaagttgtaggcataaagtcaggggttcccttttttggctgctgaaggctcgagcatgcctggatggggctgcaccggctggcctggcccctcagggtccctggtggcagctcacctctcccttggattgtccccgacccttgccgtctacctgaggggcctcttatgggctgggttctacccaggtgctaggaacactccttcacagatgggtgcttggaggaaggaaacccagctctggtccatagagagcaaaacgctgtgctgccctgcccaccctggcctctgcactcccctgctgggtgtggcgcagcatattcaggaagctcagggccctggctcaggtggggtcactctggcagctcagagagggtgggagtgggtccaatgcactttgttctggctcttccaggctgggagagcctttcaggggtgggacaccctgtgatggggccctgcctcctttgtgaggaagccgctggggccagttggtcccccttccatggactttgttagtttctccaagcaggacatggacaaggatgatctaggaagactttggaaagagtaggaagactttggaaagacttttccaaccctcatcaccaacgtctgtgccattttgtattttactaataaaatttaaaagtcttgtgaaaaaaaaaaaaaaaaaaaaaaa

SEQ ID NO: 641 - protein, 397 aa, Homo sapiens
  ref <308>: DATABASE ACCESSION NUMBER: SWISS-Prot / P78423
  ref <309>: DATABASE ENTRY DATE: 2002-06-15
MAPISLSWLLRLATFCHLTVLLAGQHHGVTKCNITCSKMTSKIPVALLIHYQQNQASCGKRAIILETRQHRLFCADPKEQWVKDAMQHLDRQAAALTRNGGTFEKQIGEVKPRTTPAAGGMDESVVLEPEATGESSSLEPTPSSQEAQRALGTSPELPTGVTGSSGTRLPPTPKAQDGGPVGTELFRVPPVSTAATWQSSAPHQPGPSLWAEAKTSEAPSTQDPSTQASTASSPAPEENAPSEGQRVWGQGQSPRPENSLEREEMGPVPAHTDAFQDWGPGSMAHVSVVPVSSEGTPSREPVASGSWTPKAEEPIHATMDPQRLGVLITPVPDAQAATRRQAVGLLAFLGLLFCLGVAMFTYQSLQGCPRKMAGEMAEGLRYIPRSCGSNSYVLVPV

SEQ ID NO: 642 - DNA, 3044 bp, Rattus norvegicus; identical to SEQ ID NO: 638
  ref <308>: DATABASE ACCESSION NUMBER: EMBL / AF030358
  ref <309>: DATABASE ENTRY DATE: 2000-03-03

SEQ ID NO: 643 - protein, 393 aa, Rattus norvegicus; identical to SEQ ID NO: 639
  ref <308>: DATABASE ACCESSION NUMBER: SWISS-Prot / O55145
  ref <309>: DATABASE ENTRY DATE: 2002-06-15

SEQ ID NO: 644 - DNA, 3310 bp, Homo sapiens; identical to SEQ ID NO: 640
  misc_feature (1)..(3310): n=a, c, g or t
  ref <308>: DATABASE ACCESSION NUMBER: EMBL / U84487
  ref <309>: DATABASE ENTRY DATE: 1999-07-02

SEQ ID NO: 645 - protein, 397 aa, Homo sapiens; identical to SEQ ID NO: 641
  ref <308>: DATABASE ACCESSION NUMBER: SWISS-Prot / P78423
  ref <309>: DATABASE ENTRY DATE: 2002-06-15

SEQ ID NO: 646 - DNA, 786 bp, Rattus norvegicus
  ref <308>: DATABASE ACCESSION NUMBER: EMBL / AF031430
  ref <309>: DATABASE ENTRY DATE: 1998-05-26
atgtcttacactccggggattggtggggaccctgcccagctggcgcaacgcatctcctctaacatccaaaagatcacacagtgctccgcggaaatacaaaggactctgaatcaactgggaacacctcaggatacaccggagttgaggcaacagctgcagcaggagcagcagtatactaaccaacttgcgaaagaaacagataagtacattaaggagtttggctttctgcccaccacccccagtgaacagcgtcaaaggaagatacagaaagaccgattggtggcagaattcaccacagcgctaacaaactttcagaaagtgcagaggcaagctgctgagagagagaaagagttcgtggcccgagtgcgagccagttccagagtatcgggtggctttcctgaagacagctcaaaagcgaagaattttgtatcttgggaaagccaaacacagcctcaagtgcaagtccaagatgaagaaatcacagaggatgacctccggctcattcatgagagagagtcttcaatcagacagctggaagctgacattatggacattaacgaaatattcaaagacttggggatgatgattcatgaacaaggagatgttattgacagcatagaagccaatgtagaaagtgcggaagttcacgtacagcaggcaaaccagcagctgtcaagagcggcaaattatcagcgcaaatccagaaaaaccctctgcatcatcattttaatcctggtggtcggaatcgtgatcatcttcttcatcgtatggggtctgaaaggctga

SEQ ID NO: 647 - protein, 261 aa, Rattus norvegicus
  ref <308>: DATABASE ACCESSION NUMBER: SWISS-Prot / O70257
  ref <309>: DATABASE ENTRY DATE: 2002-06-15
MSYTPGIGGDPAQLAQRISSNIQKITQCSAEIQRTLNQLGTPQDTPELRQQLQQEQQYTNQLAKETDKYIKEFGFLPTTPSEQRQRKIQKDRLVAEFTTALTNFQKVQRQAAEREKEFVARVRASSRVSGGFPEDSSKAKNFVSWESQTQPQVQVQDEEITEDDLRLIHERESSIRQLEADIMDINEIFKDLGMMIHEQGDVIDSIEANVESAEVHVQQANQQLSRAANYQRKSRKTLCIIILILVVGIVIIFFIVWGLKG

SEQ ID NO: 648 - DNA, 1097 bp, Homo sapiens
  ref <308>: DATABASE ACCESSION NUMBER: EMBL / BC011975
  ref <309>: DATABASE ENTRY DATE: 2002-09-02
ccggggtaggtgggtgacggcggtcggaggtgtaggagggagccgtggaggtccaggtgactgcttagaaaactgcacagcatctgatgaaattagcgaataagaacatcaaccatgtcttacactccaggagttggtggtgaccccgcccagttggcccagaggatctcttctaacatccagaagatcacacagtgttctgtggaaatacaaagaactctgaatcaacttggaacacctcaagattcacctgaattgaggcaacagttgcaacagaagcagcagtatactaaccagcttgccaaagaaacagataagtacattaaagagtttggatctctgcccaccacccccagtgaacagcgtcaaaggaaaatacagaaggatcgcttagtggcagagttcacaacatcactgacaaacttccagaaggtccagaggcaggctgctgagcgagagaaagagtttgttgctcgagtaagagccagttccagagtgtctggcagttttcctgaggacagctcaaaagaaaggaatcttgtatcctgggaaagccaaactcaacctcaagtgcaggtgcaggatgaagaaattacagaggatgacctccgtcttattcatgagagagaatcttctatcaggcaacttgaagctgatattatggatattaatgaaatatttaaagatttgggaatgatgattcatgaacaaggagatgtaatagatagcatagaagccaatgtggaaaatgcagaggtgcacgttcagcaagcaaatcagcagctgtcaagggcagcagattatcagcgcaaatccagaaaaaccctgtgcatcatcattcttatccttgtcattggagttgcgattatcagtctcatcatatggggattgaaccactgaagttataaaggagcacactgtcgcactacattgtctaaattatgtaggaagattcctgtaatcatgtttttttaattattattttaaagctattgtataaaggatggttcccatactttgttatttttattgggggggttggggtggttcctttggattaaatctgatattttctaatactgaaaaaaaaaaaaaaa

SEQ ID NO: 649 - protein, 261 aa, Homo sapiens
  ref <308>: DATABASE ACCESSION NUMBER: SWISS-Prot / O15400
  ref <309>: DATABASE ENTRY DATE: 2002-06-15
MSYTPGVGGDPAQLAQRISSNIQKITQCSVEIQRTLNQLGTPQDSPELRQQLQQKQQYTNQLAKETDKYIKEFGSLPTTPSEQRQRKIQKDRLVAEFTTSLTNFQKVQRQAAEREKEFVARVRASSRVSGSFPEDSSKERNLVSWESQTQPQVQVQDEEITEDDLRLIHERESSIRQLEADIMDINEIFKDLGMMIHEQGDVIDSIEANVENAEVHVQQANQQLSRAADYQRKSRKTLCIIILILVIGVAIISLIIWGLNH

SEQ ID NO: 650 - DNA, 156 bp, Rattus norvegicus
  ref <308>: DATABASE ACCESSION NUMBER: EMBL / AF054246
  ref <309>: DATABASE ENTRY DATE: 1998-10-22
gtccttctagtttcgaaattgcatcttacagctctttggaaagaaagttgatgatagctctgaactttccagcacctccaaaacagaagtctcatctgtctcttcagtgtcacctgcataaagtttgcctccaacctgttgcatctaccaaagctt

SEQ ID NO: 651 - protein, 359 aa, Rattus norvegicus
  ref <308>: DATABASE ACCESSION NUMBER: SWISS-Prot / AAC64920
  ref <309>: DATABASE ENTRY DATE: 2001-10-16
MAQQLTGEQTLDHYEDSTQASIFTYTNSNSTRGPFEGPNYHIAPRWVYHLTSTWMILVVIASVFTNGLVLAATMRFKKLRHPLNWILVNLAVADLAETIIASTISVVNQIYGYFVLGHPLCVIEGYIVSLCGITGLWSLAIISWERWLVVCKPFGNVRFDAKLATVGIVFSWVWAAVWTAPPIFGWSRYWPYGLKTSCGPDVFSGTSYPGVQSYMMVLMVTCCIFPLSIIVLCYLQVWLAIRAVAKQQKESESTQKAEKEVTRMVVVMVFAYCLCWGPYTFFACFATAHPGYAFHPLVASLPSYFAKSATIYNPIIYVFMNRQFRNCILQLFGKKVDDSSELSSTSKTEVSSVSSVSPA

SEQ ID NO: 652 - DNA, 1095 bp, Homo sapiens
  ref <308>: DATABASE ACCESSION NUMBER: Refseq / NM_020061
  ref <309>: DATABASE ENTRY DATE: 2001-01-23
atggcccagcagtggagcctccaaaggctcgcaggccgccatccgcaggacagctatgaggacagcacccagtccagcatcttcacctacaccaacagcaactccaccagaggccccttcgaaggcccgaattaccacatcgctcccagatgggtgtaccacctcaccagtgtctggatgatctttgtggtcactgcatccgtcttcacaaatgggcttgtgctggcggccaccatgaagttcaagaagctgcgccacccgctgaactggatcctggtgaacctggcggtcgctgacctagcagagaccgtcatcgccagcactatcagcattgtgaaccaggtctctggctacttcgtgctgggccaccctatgtgtgtcctggagggctacaccgtctccctgtgtgggatcacaggtctctggtctctggccatcatttcctgggagaggtggctggtggtgtgcaagccctttggcaatgtgagatttgatgccaagctggccatcgtgggcattgccttctcctggatctggtctgctgtgtggacagccccgcccatctttggttggagcaggtactggccccacggcctgaagacttcatgcggcccagacgtgttcagcggcagctcgtaccccggggtgcagtcttacatgattgtcctcatggtcacctgctgcatcatcccactcgctatcatcatgctctgctacctccaagtgtggctggccatccgagcggtggcaaagcagcagaaagagtctgaatccacccagaaggcagagaaggaagtgacgcgcatggtggtggtgatgatctttgcgtactgcgtctgctggggaccctacaccttcttcgcatgctttgctgctgccaaccctggttacgccttccaccctttgatggctgccctgccggcctactttgccaaaagtgccactatctacaaccccgttatctatgtctttatgaaccggcagtttcgaaactgcatcttgcagcttttcgggaagaaggttgacgatggctctgaactctccagcgcctccaaaacggaggtctcatctgtgtcctcggtatcgcctgcatga

SEQ ID NO: 653 - protein, 364 aa, Homo sapiens
  ref <308>: DATABASE ACCESSION NUMBER: Refseq / NP_064445
  ref <309>: DATABASE ENTRY DATE: 2001-01-23
MAQQWSLQRLAGRHPQDSYEDSTQSSIFTYTNSNSTRGPFEGPNYHIAPRWVYHLTSVWMIFVVTASVFTNGLVLAATMKFKKLRHPLNWILVNLAVADLAETVIASTISIVNQVSGYFVLGHPMCVLEGYTVSLCGITGLWSLAIISWERWLVVCKPFGNVRFDAKLAIVGIAFSWIWSAVWTAPPIFGWSRYWPHGLKTSCGPDVFSGSSYPGVQSYMIVLMVTCCIIPLAIIMLCYLQVWLAIRAVAKQQKESESTQKAEKEVTRMVVVMIFAYCVCWGPYTFFACFAAANPGYAFHPLMAALPAYFAKSATIYNPVIYVFMNRQFRNCILQLFGKKVDDGSELSSASKTEVSSVSSVSPA

SEQ ID NO: 654 - DNA, 1989 bp, Rattus norvegicus
  ref <308>: DATABASE ACCESSION NUMBER: EMBL / AF031642
  ref <309>: DATABASE ENTRY DATE: 2001-12-04
aaaaagaggaaagacagagccggcctagacagcagacatcaggacacccttctaggccagctctgttttctgccttaatgctcaaggaagactgcaagatcatctgaggtgggctctgtaacagcgtcagctccacaaagtcatcgctgcaaagttcaggagatgggagatctttcctgttttcttactgagtgtttccgggtgtgagtgcatcgcattgacatcttcctacctctgtggacaaacaaggacaaggctcgaatcccctcagtctacttcatcagccggacctgcatgactggctattttgaccacttgaagtcatctaaatagaagttctcaagaccaccaagaccaaggacacttcacatgacagatgagcgaccatcccctgaaggagatgtctgacaacaaccgcagcccccccttgccagagcctctttccagcagatacaagttgtatgagtcagagctaagcagccctacctggccttcaagctcccaggatacacacccagcccttcccctgctggaaatgcctgaagaaaaggatctccgatcatcggatgaagacagccacatagtgaagattgaaaagcccaacgagcggagtaaacggagagaaagcgagttgccccgcagggcttctgcaggccggggagcgttcagcctcttccaagctgtgagctacctcactggtgacatgaaggaatgcaagaactggctgaaagataagcccctggtccttcagttcctagactgggtcctgcggggagcagctcaggtgatgtttgtcaacaacccccttagtgggctcatcatcttcatagggctcctgatccagaatccctggtggacgattgctggggcactggggacagtggtctcaaccttggctgcccttgccttgagccaggacaggtcagccatcgcctctggactccatgggtacaacgggatgctggtgggactcctggtggctgtcttctcagagaagttagactactactggtggcttctgtttcctgtgaccttcgcatccatggcctgcccagttatttctagtgccttgagcaccgtcttcgccaagtgggacctgccagtcttcacactgcccttcaacatcgccttaacactgtacctggcagctacgggccactacaaccttttcttccccacgacgcttgtgaagcctgcgtcttcagcgcccaacatcacctggtcagagattgagatgcctttgctgttacaaaccatccccgttggggtgggccaggtctacggctgtgacaacccctggacaggcggcgtgatcctggtggctctgtttatctcctctcccctcatctgtttgcacgcagccataggatccattgtggggctgctggcagcactgacggtggccactcccttcgagacgatctacacgggcctttggagctacaactgtgtcctctcctgtgtcgccattggaggcatgttctacgtactcacctggcagacacacctgttggcacttgtctgtgccctgttctgtgcgtacacgggagcggccctctccaatatgatggcagtggttggtgtgccaccgggcacctgggccttctgtctctccaccctcaccttccttctcctcacaagcaacaaccctggcatccacaagctcccactcagcaaagtcacctacccagaggccaaccgcatctacttcctgacagcgaaacgcagtgacgagcagaagccccccaatggtgactagttcagcgccaagccaaaatgttctgctttgtctgcatccctatggtctcaactctgggccaagcgacccggccagcactcactttcctcgcctctccttgcacctgtttcaaatcaaacccacctattcctccctaatcccgaggctgattcgttccctctgcccagatctttataacaaccccttgtagcattaaaggaagctggtacgacataaaaaaaaaaaaaaaa

SEQ ID NO: 655 - protein, 460 aa, Rattus norvegicus
  ref <308>: DATABASE ACCESSION NUMBER: SWISS-Prot / AAD01938
  ref <309>: DATABASE ENTRY DATE: 2003-02-01
MSDHPLKEMSDNNRSPPLPEPLSSRYKLYESELSSPTWPSSSQDTHPALPLLEMPEEKDLRSSDEDSHIVKIEKPNERSKRRESELPRRASAGRGAFSLFQAVSYLTGDMKECKNWLKDKPLVLQFLDWVLRGAAQVMFVNNPLSGLIIFIGLLIQNPWWTIAGALGTVVSTLAALALSQDRSAIASGLHGYNGMLVGLLVAVFSEKLDYYWWLLFPVTFASMACPVISSALSTVFAKWDLPVFTLPFNIALTLYLAATGHYNLFFPTTLVKPASSAPNITWSEIEMPLLLQTIPVGVGQVYGCDNPWTGGVILVALFISSPLICLHAAIGSIVGLLAALTVATPFETIYTGLWSYNCVLSCVAIGGMFYVLTWQTHLLALVCALFCAYTGAALSNMMAVVGVPPGTWAFCLSTLTFLLLTSNNPGIHKLPLSKVTYPEANRIYFLTAKRSDEQKPPNGD

SEQ ID NO: 656 - DNA, 4166 bp, Homo sapiens
  ref <308>: DATABASE ACCESSION NUMBER: Refseq / NM_007163
  ref <309>: DATABASE ENTRY DATE: 2002-11-05
ttttttttttttttttgagacacagtttgctctgtcacccaggctggagtacactggcactatcttggctcactgcaacctccacctcccaggttcaagagattcttctgtctcagcctcccagtagctaggactacaagtgtgtgccaccacaccctgctaatttttgtatttttagtagagacggggtttcaccacattggccaggctggtctcgaacttctgacgtcaagtgatccacccgactcggcctctcaaagtgctgggattacaggcgtgggccgccgcacccggccatttgcttttgattttactggctcataggtggaagggacttgccttgcctcagatgaaactttggactttgactttcaagttaatactggaataagttaagactttgggggactgttgctaaggcacaattttgttttgaaatgtataaagaacataatatctgggaggggccaggggcagaatgatatggtttggctctgtgtccacacctgaatatcatctcaaattgtaatcccagtaatccccatatgttgagggcaggacccagggcaaggtgactggatcatgggagcggtttcccccatgctgttctcgtgatagtgagtgaattctcacaagatctgatggttttataagtgtttggcaggttcctgctccacaccatctctctcttctgccgccatttgagaaggtccaagtttgcttccccttcgccttccaccatgactgtaagtttcctgaggcctccccagcaatgtggaagttccatcgatagaagagtggctgtgacccgaaggaatgtctgacccccacagcagtcctctcctgccagagccactttccagcagatacaaactttacgaggcagagtttaccagcccgagctggccctcgacatccccggatactcacccagctctgcccctcctggaaatgcctgaagaaaaggatctccggtcttccaatgaagacagtcacattgtgaagatcgaaaagctcaatgaaaggagtaaaaggaaagacgacggggtggcccatcgggactcagcaggccaaaggtgcatctgcctctccaaagcagtgggctacctcacgggcgacatgaaggagtacaggatctggctgaaagacaagcaccttgccctccagttcatagactgggtcctgagagggaccgctcaggtgatgttcgtcaacaatcctctcagcggcctcatcatcttcatagggctgctgatccagaatccctggtggacaatcactgggggcctggggacagtggtctcgaccttaacagctctcgccttgggccaagacaggtctgccattgcctcaggactccatgggtacaacgggatgctggtgggactgctgatggccgcgttctcggagaagttagactactactggtggcttctgtttcctgtgaccttcacagccatgtcctgcccagttctttctagtgccttgaattccatcttcagcaagtgggacctcccggtcttcactctgcccttcaacattgcagtcaccttgtaccttgcagccacaggccactacaacctcttcttccccacaacactggtagagcctgtgtcttcagtgcccaatatcacctggacagagatggaaatgcccctgctgttacaagccatccctgttggggtcggccaggtgtatggctgtgacaatccctggacaggcggcgtgttcctggtggctctgttcatctcctcgccactcatctgcttgcatgcagccattggctcaatcgtggggctgctagcagccctgtcagtggccacacccttcgagaccatctacacaggcctctggagctacaactgcgtcctctcctgcatcgccatcggaggcatgttctatgccctcacctggcagactcacctgctggccctcatctgtgccctgttctgtgcatacatggaagcagccatctccaacatcatgtcagtggtgggcgtgccaccaggcacctgggccttctgccttgccaccatcatcttcctgctcctgacgacaaacaacccagccatcttcagactcccactcagcaaagtcacctaccccgaggccaaccgcatctactacctgacagtgaaaagcggtgaagaagagaaggcccccagcggaggcggtggggagcatccacccacagcaggcccaaaggtggaggagggctcggaggctgtgctctccaagcacaggagtgtatttcacatcgagtggtcatccattcggaggaggagcaaagtgtttggaaaaggcgaacaccaggaaagacaaaacaaagacccatttccctatcaataccggaagcccacagtcgagctgcttgatctggacaccatggaggagagctctgagataaaagtggaaacaaacatttccaagacatcctggattcggagttccatggctgccagtgggaaaagggtgagcaaagccctcagctacatcacaggagagatgaaggagtgtggagagggacttaaagacaagtccccagtgttccagttctttgactgggtcctccgaggcacatctcaagtgatgtttgtgaacaaccccctcagcggcatcctcatcatcctcggcctcttcatccagaacccctggtgggcgatctcaggctgcctgggtaccatcatgtccaccttgacagccctcatcctgagtcaggacaagtcggccatcgctgcaggatttcacggctacaatggggtgctggtggggctgctgatggccgtgttctcagacaaaggtgactactactggtggctgttgctacccgtcatcatcatgtccatgtcttgccccatcctctccagtgccctgggtaccatcttcagcaagtgggacctcccagtcttcacactgcccttcaatatcactgtgactttgtacctggcagccacgggccactacaaccttttcttccccacagcgctgctgcagcctgcatccgccatgcccaacatcacctggtcagaggtccaagtgcccttgcttttgagagccatccccgttggaattggccaagtgtacggctgtgataacccctggactggaggcatcttcctcatagctctgttcatatcctcacctctcatttgcttgcatgcagcaattggatccaccatggggatgctagcagcactcactattgcgacgccctttgactccatctacttcggcctgtgtggcttcaacagcaccctcgcatgcatagcgataggaggcatgttctacgtcatcacctggcagacgcacctcctcgccatcgcctgcgcactgtttgctgcctacctgggtgctgccctggctaacatgttatctgtgtttggattgccgccctgcacttggcccttctgtctctcagctctcaccttcctgctcctgacgaccaataaccccgccatctacaagctcccgctcagcaaagtcacctacccagaggccaaccgcatctactacctgtcccaggagagaaacagaagggcatcaatcataacaaagtatcaggcctacgatgtctcctaagtttccctgtctaaaacacatcagtgtaaattcaggcttcagcacgccgtccagatccccaggataagagaccacttagccttccctttggtctgttctgtgactctctccccaaacacaaagaagcgtgtatgtagtcaccattccagaacctctcttttctaagatgcacaacacttatcaaagatatgtttagtttagactttatacccttagctttcccataagagctccctttgtggggaacttgccctcttctgcgaaataagcctcatccttaaagagaagtcaccggccgggcacggtggctcacgcctgtaatcccagcactttgggaggccgaggcgggtggatcacgaggtcaggagatcgagaccatcctggcgaacatggtgagacccatctctactaaaaatacaaaaaattagccaggcatggtggcgggcacctgtattcccagctacttgggaggctgaggcaggaaaatggcgtgaacccgggaggtggagcttgcagtgagccaagatcacgccactgcactccagcctgggcaacggattgagactctgtctcaaaaaaaaaaaaaa

SEQ ID NO: 657 - protein, 397 aa, Homo sapiens
  ref <308>: DATABASE ACCESSION NUMBER: SWISS-Prot / Q15849
  ref <309>: DATABASE ENTRY DATE: 2001-10-16
MEESSEIKVETNISKTSWIRSSMAASGKRVSKALSYITGEMKECGEGLKDKSPVFQFFDWVLRGTSQVMFVNNPLSGILIILGLFIQNPWWAISGCLGTIMSTLTALILSQDKSAIAAGFHGYNGVLVGLLMAVFSDKGDYYWWLLLPVIIMSMSCPILSSALGTIFSKWDLPVFTLPFNITVTLYLAATGHYNLFFPTTLLQPASAMPNITWSEVQVPLLLRAIPVGIGQVYGCDNPWTGGIFLIALFISSPLICLHAAIGSTMGMLAALTIATPFDSIYFGLCGFNSTLACIAIGGMFYVITWQTHLLAIACALFAAYLGAALANMLSVFGLPPCTWPFCLSALTFLLLTTNNPAIYKLPLSKVTYPEANRIYYLSQERNRRASIITKYQAYDVS

SEQ ID NO: 658 - DNA, 828 bp, Rattus norvegicus
  ref <308>: DATABASE ACCESSION NUMBER: EMBL / AF031657
  ref <309>: DATABASE ENTRY DATE: 1998-04-29
ccaagcccatcaggtgaggcacactggagagaaaccctacaaatgtgaggagtgtggcaagggcttcactcgggcctccactcttctggaccatcagagaggccacactggaaacaagccctatcagtgtggcgcttgctggaagagtttctgtcacagctcggagtttaacaatcacatacgagtccacacgggagagaaaccctatgtatgtgaggagtgtgggaaaggcttcagccaggcctcccatcttctggcccatcagagaggccacacgggagagaaaccctacaaatgtagcacgtgtgggaagggattcagccggagttcagatcttaacgttcattgtagaatccacacaggagagaaaccctataaatgtgagaggtgtggtaaagccttcagtcgagtctcaattctccaagtgcatcagagggtccacagtgaagacaaaccgtatcagtgctcagagtgtgggaagggcttcagtgtagagtctcaccttcaagcccaccagaggtcccacgctggagagagaccctatcagtgtgaggagtgtgggagaggcttctgtcgggcgtccaactttctagctcatcgtggagttcacacaggagagaaaccgtatcaatgtgacgtgtgtgggaaacgcttccggcagaggtcctacctccacgaccaccacaggatccacacgggagagaaaccgtacagatgcgaggagtgtgggaaagtcttcagttggagctcatacctcaaagcccaccagagagtccacacgggagagaaaccgtacaagtgtgaggagtgtgggaaaggcttcagctg

SEQ ID NO: 659 - protein, 275 aa, Rattus norvegicus
  ref <308>: DATABASE ACCESSION NUMBER: SWISS-Prot / AAC53578
  ref <309>: DATABASE ENTRY DATE: 2003-02-01
QAHQVRHTGEKPYKCEECGKGFTRASTLLDHQRGHTGNKPYQCGACWKSFCHSSEFNNHIRVHTGEKPYVCEECGKGFSQASHLLAHQRGHTGEKPYKCSTCGKGFSRSSDLNVHCRIHTGEKPYKCERCGKAFSRVSILQVHQRVHSEDKPYQCSECGKGFSVESHLQAHQRSHAGERPYQCEECGRGFCRASNFLAHRGVHTGEKPYQCDVCGKRFRQRSYLHDHHRIHTGEKPYRCEECGKVFSWSSYLKAHQRVHTGEKPYKCEECGKGFS

SEQ ID NO: 660 - DNA, 2409 bp, Homo sapiens
  ref <308>: DATABASE ACCESSION NUMBER: Refseq / NM_003425
  ref <309>: DATABASE ENTRY DATE: 2000-11-01
tgtttttttgttttggccaaactctcatggcttttttctccttccctcatgttttctccttccctcttaagacttggcacttctccagaaggaggaggacaaaatgacgaagtctaaggaggcagtgacattcaaggacgtggctgtggtcttctctgaggaggagctgcaactgctggaccttgcccagaggaagctgtaccgagatgtgatgctggagaacttcaggaatgtggtctcagtggggcatcagtccacaccagatggcctaccacagttagagagagaagaaaagctgtggatgatgaagatggcaacccagagagataactcctcaggagccaagaatctaaaagagatggagactcttcaagaagtaggattaaggtacctgcctcatgaagagcttttctgctcccagatctggcaacagattacaagagagttaatcaagtatcaagattctgtggtaaatattcaaagaacaggctgccagttggaaaaacgagatgatttgcactataaagatgagggattcagtaatcagagttcccatcttcaagttcacagagtccacactggtgaaaaaccctacaaaggagaacattgtgtgaaaagtttcagctggagctctcatcttcaaattaaccaaagggctcacgcaggagagaagccctacaaatgtgaaaaatgtgataatgccttccgtcggttttcaagtcttcaagcccatcagagagtccacagtagagcaaaatcatacacaaatgatgcaagttacaggagttttagtcagaggtcacatcttccccatcatcagagagttcccactggagagaatccatacaaatatgaagagtgtgggaggaatgttgggaaaagctcacattgtcaagctcctctgatagttcatacgggagagaaaccctataaatgtgaggagtgtggggtgggcttcagtcagagatcatatcttcaagttcatctgaaagttcacactggaaagaaaccatataagtgtgaagagtgtgggaagagcttcagttggcgttcacgactgcaggctcatgagcgaatccacactggcgagaaaccatacaaatgcaatgcatgtggcaagagctttagttacagctcacaccttaatattcattgtagaatccacacaggagagaaaccctataagtgtgaggagtgtgggaaaggtttcagtgtgggttcacaccttcaggcccatcagataagccacactggagagaagccatacaaatgtgaggagtgtgggaaaggcttctgccgggcctcaaatctgctggaccatcaaagaggccatactggagagaaaccgtatcagtgtgatgcatgtggtaagggcttcagtcgtagctcagattttaacattcattttagagtccatacaggggaaaaaccctataaatgtgaggagtgtggcaagggcttcagccaggcctcaaatcttctggcccatcaaagaggccacactggagagaaaccctacaaatgtggtacatgtgggaagggcttcagtcggagctcagatcttaatgtacactgtagaatccacacaggagagaaaccctataaatgcgagaggtgtggtaaggccttcagtcagttctccagccttcaggtgcatcagagagttcacactggagagaaaccatatcagtgtgcagagtgtgggaagggcttcagtgtaggttcacagcttcaagcccatcagaggtgccacactggagagaaaccctatcaatgtgaggagtgtgggaagggcttctgtcgggcctccaattttctggcacatcgtggagtccacacaggagaaaaaccataccgatgtgatgtgtgtggtaagcgcttcagacagagatcctaccttcaagcccaccagagggtccacacaggagagagaccatacaaatgtgaggaatgtgggaaagtcttcagctggagctcataccttcaagcccatcaaagagttcacaccggagaaaaaccatacaaatgtgaggagtgtgggaagggcttcagttggagctcaagtcttatcattcatcagcgagtccatgctgatgatgagggtgacaaggactttccttcatcagaggattcacacaggaaaactcgataaaatatgttttactatctcagatgggtgctgaaatattttaataatcagagctatcatagacaaaacatttgttttatagagtcagtagttcagccagtgattgggagaccacacagcagagaagcctcacaagagtggagacatatggactgcattcagaacattgaccattagctgatacatgcagacaagaggatcaggaaggatgagtctgatctggagtaaatcagaagtactaagatagaaatgctgaattc

SEQ ID NO: 661 - protein, 682 aa, Homo sapiens
  ref <308>: DATABASE ACCESSION NUMBER: SWISS-Prot / Q02386
  ref <309>: DATABASE ENTRY DATE: 2001-10-16
MTKSKEAVTFKDVAVVFSEEELQLLDLAQRKLYRDVMLENFRNVVSVGHQSTPDGLPQLEREEKLWMMKMATQRDNSSGAKNLKEMETLQEVGLRYLPHEELFCSQIWQQITRELIKYQDSVVNIQRTGCQLEKRDDLHYKDEGFSNQSSHLQVHRVHTGEKPYKGEHCVKSFSWSSHLQINQRAHAGEKPYKCEKCDNAFRRFSSLQAHQRVHSRAKSYTNDASYRSFSQRSHLPHHQRVPTGENPYKYEECGRNVGKSSHCQAPLIVHTGEKPYKCEECGVGFSQRSYLQVHLKVHTGKKPYKCEECGKSFSWRSRLQAHERIHTGEKPYKCNACGKSFSYSSHLNIHCRIHTGEKPYKCEECGKGFSVGSHLQAHQISHTGEKPYKCEECGKGFCRASNLLDHQRGHTGEKPYQCDACGKGFSRSSDFNIHFRVHTGEKPYKCEECGKGFSQASNLLAHQRGHTGEKPYKCGTCGKGFSRSSDLNVHCRIHTGEKPYKCERCGKAFSQFSSLQVHQRVHTGEKPYQCAECGKGFSVGSQLQAHQRCHTGEKPYQCEECGKGFCRASNFLAHRGVHTGEKPYRCDVCGKRFRQRSYLQAHQRVHTGERPYKCEECGKVFSWSSYLQAHQRVHTGEKPYKCEECGKGFSWSSSLIIHQRVHADDEGDKDFPSSEDSHRKTR

SEQ ID NO: 662 - DNA, 1607 bp, Rattus norvegicus
  ref <308>: DATABASE ACCESSION NUMBER: EMBL / AF032120
  ref <309>: DATABASE ENTRY DATE: 1999-12-23
cctcgagcggcggcggcgcaggtctcccggccaagtccccacttctggctgctcatgccactgggactggggcgaaggaaaaaagcaccacctctggtggaaaatgaggaggcggagccaagccggagtgggctgggcgtcggggagcccgggcccctgggtggaagtggagcaggggaatcccagatgggtttgcccccacctcctgcttccctccggcctcgcctcgtgttccatacccagctggcccacggcagccccacgggccgcatcgagggcttcactaatgtcaaggagctgtacggcaagatcgctgaggccttccgactaccggctgctgaggtgatgttctgtaccctcaacacccataaagtggatatggacaagctgctggggggccagatcgggctggaggacttcatctttgcccatgtcaaggggcagcgcaaagaggtggaagtattcaagtctgaggatgctctggggctcaccatcaccgacaacggggccggctatgccttcattaagcgcatcaaggaaggcagtgtgattgaccacatccagctcatcagcgtgggtgacatgattgaagccatcaacgggcagagcctgctgggctgtcggcattatgaggttgccaggctcctcaaagagctgccccgaggccgcaccttcaccctcaaactcaccgaacctcggaaggcgtttgatatgatcagccagcgttcatcaggtggtcaccctggctcaggcccacaactgggcactggccgagggaccctccggctccgatcccggggccctgccacagtggaggatctgccgtcagcttttgaggaaaaggccattgaaaaggtggatgacttgctagagagctacatggggatcagagacacagagctggctgccacgatggtggagctggggaaagacaaaaggaacccagacgaactggcagaagctctggatgaacggctcggtgacttcgcattcccagatgaattcgtctttgatgtctggggagccatcggggatgccaaggttggccgctactaagactgggactgaacctggaccttgagataacctgctttgcccagctggggtttccagaaaccacagccaagacctgggctgacagcttaggctgtaactccgcagcctggggatggcacaggctgcaagtgccctgtggtccaggccccgctccaatcagtaccgccacggtgcccagcctggttggggtccccggccaacccctgccgggttccccacctacctcaatagagtaagcgcatggggagggaccaacacactaggcagccagccacctctatccccaacacttcccactatcagctggcaactgccccttctgtccccctggcctcagctctcttcggggtcatgacctccctactttactttttttgctttgtttttttcaagacaaagtcactatgtagctctggctgtcctggaactccttctgtaaaccaggctggccttgaactcacagagatccacctgcatctgcattcacagtgctgggaataaaggtgtgcatcaccactcccaaaaaaaaaaaaaaaaaaaaaaaaaaaaaa

SEQ ID NO: 663 - protein, 333 aa, Rattus norvegicus
  ref <308>: DATABASE ACCESSION NUMBER: SWISS-Prot / Q9Z254
  ref <309>: DATABASE ENTRY DATE: 2002-06-15
MPLGLGRRKKAPPLVENEEAEPSRSGLGVGEPGPLGGSGAGESQMGLPPPPASLRPRLVFHTQLAHGSPTGRIEGFTNVKELYGKIAEAFRLPAAEVMFCTLNTHKVDMDKLLGGQIGLEDFIFAHVKGQRKEVEVFKSEDALGLTITDNGAGYAFIKRIKEGSVIDHIQLISVGDMIEAINGQSLLGCRHYEVARLLKELPRGRTFTLKLTEPRKAFDMISQRSSGGHPGSGPQLGTGRGTLRLRSRGPATIEDLPSAFEEKAIEKVDELLESYMGIRDTELAATMVELGKDKRNPDELAEALDERLGDFAFPDEFVFDVWGAIGDAKVGRY

SEQ ID NO: 664 - DNA, 1416 bp, Homo sapiens
  ref <308>: DATABASE ACCESSION NUMBER: EMBL / AF028824
  ref <309>: DATABASE ENTRY DATE: 1999-12-10
ccaacgtcaaggagctgtatggcaagatcgccgaggccttccgcctgccaactgccgaggtgatgttctgcaccctgaacacccacaaagtggacatggacaagctcctggggggccagatcgggctggaggacttcatcttcgcccacgtgaaggggcagcgcaaggaggtggaggtgttcaagtcggaggatgcactcgggctcaccatcacggacaacggggctggctacgccttcatcaagcgcatcaaggagggcagcgtgatcgaccacatccacctcatcagcgtgggcgacatgatcgaggccattaacgggcagagcctgctgggctgccggcactacgaggtggcccggctgctcaaggagctgccccgaggccgtaccttcacgctgaagctcacggagcctcgcaaggccttcgacatgatcagccagcgttcagcgggtggccgccctggctctggcccacaactgggcactggccgagggaccctgcggctccgatcccggggccccgccacggtggaggatctgccctctgcctttgaagagaaggccattgagaaggtggatgacctgctggagagttacatgggtatcagggacacggagctggcagccaccatggtggagctgggaaaggacaaaaggaacccggatgagctggccgaggccctggacgaacggctgggtgactttgccttccctgacgagttcgtctttgacgtctggggcgccattggggacgccaaggtcggccgctactaggactgcccccggaccctgcgatgatgacccgggcgcaacctggtgggggcccccagcagggacactgacgtcaggacccgagcctccagcctgagcctagctcagcagcccaaggacgatggtgaggggaggtggggccaggccccctgccccgctccactcggtaccatcccctccctggttcccagtctggccggggtccccggcccccctgtgccctgttccccacctacctcagctgggtcaggcacagggaggggagggatcagccaaattgggcggccacccccgcctccaccactttccaccatcagctgccaaactggtccctctgtctccctggggccttgggttctgtttgggggtcatgaccttcctagtttcctgacgcagggaatacaggggagagggttgtccttccccccagcaaatgcaataatgccctcacccctcctgagaggagccccctccctgtggagcctgttacctccgcatttgacacgagtctgctgtgaaccccgcaacctcctccccacctcccatctctccttccaggcccatccctggcccagagcaggagggagggagggacgatggcggtgggtttttgtatctgaatttgctgtcttgaacataaagaatc

SEQ ID NO: 665 - protein, 333 aa, Homo sapiens
  ref <308>: DATABASE ACCESSION NUMBER: SWISS-Prot / O14908
  ref <309>: DATABASE ENTRY DATE: 2002-06-15
MPLGLGRRKKAPPLVENEEAEPGRGGLGVGEPGPLGGGGSGGPQMGLPPPPPALRPRLVFHTQLAHGSPTGRIEGFTNVKELYGKIAEAFRLPTAEVMFCTLNTHKVDMDKLLGGQIGLEDFIFAHVKGQRKEVEVFKSEDALGLTITDNGAGYAFIKRIKEGSVIDHIHLISVGDMIEAINGQSLLGCRHYEVARLLKELPRGRTFTLKLTEPRKAFDMISQRSAGGRPGSGPQLGTGRGTLRLRSRGPATVEDLPSAFEEKAIEKVDDLLESYMGIRDTELAATMVELGKDKRNPDELAEALDERLGDFAFPDEFVFDVWGAIGDAKVGRY

SEQ ID NO: 666 - DNA, 1607 bp, Rattus norvegicus; identical to SEQ ID NO: 662
  ref <308>: DATABASE ACCESSION NUMBER: EMBL / AF032120
  ref <309>: DATABASE ENTRY DATE: 1999-12-23

SEQ ID NO: 667 - protein, 333 aa, Rattus norvegicus; identical to SEQ ID NO: 663
  ref <308>: DATABASE ACCESSION NUMBER: SWISS-Prot / Q9Z254
  ref <309>: DATABASE ENTRY DATE: 2002-06-15

SEQ ID NO: 668 - DNA, 1416 bp, Homo sapiens; identical to SEQ ID NO: 664
  ref <308>: DATABASE ACCESSION NUMBER: EMBL / AF028824
  ref <309>: DATABASE ENTRY DATE: 1999-12-10

SEQ ID NO: 669 - protein, 333 aa, Homo sapiens; identical to SEQ ID NO: 665
  ref <308>: DATABASE ACCESSION NUMBER: SWISS-Prot / O14908
  ref <309>: DATABASE ENTRY DATE: 2002-06-15

SEQ ID NO: 670 - DNA, 1607 bp, Rattus norvegicus; identical to SEQ ID NO: 662
  ref <308>: DATABASE ACCESSION NUMBER: EMBL / AF032120
  ref <309>: DATABASE ENTRY DATE: 1999-12-23

SEQ ID NO: 671 - protein, 333 aa, Rattus norvegicus; identical to SEQ ID NO: 663
  ref <308>: DATABASE ACCESSION NUMBER: SWISS-Prot / Q9Z254
  ref <309>: DATABASE ENTRY DATE: 2002-06-15

SEQ ID NO: 672 - DNA, 1416 bp, Homo sapiens; identical to SEQ ID NO: 664
  ref <308>: DATABASE ACCESSION NUMBER: EMBL / AF028824
  ref <309>: DATABASE ENTRY DATE: 1999-12-10

SEQ ID NO: 673 - protein, 333 aa, Homo sapiens; identical to SEQ ID NO: 665
  ref <308>: DATABASE ACCESSION NUMBER: SWISS-Prot / O14908
  ref <309>: DATABASE ENTRY DATE: 2002-06-15

SEQ ID NO: 674 - DNA, 4358 bp, Rattus norvegicus
  misc_feature (1)..(4358): n=a, c, g or t
  ref <308>: DATABASE ACCESSION NUMBER: EMBL / AF032666
  ref <309>: DATABASE ENTRY DATE: 1998-02-05
actgctgcggcccggagcgggttggcccggacctgacgccgcctgcaagctgcaggacagagggctggagatggcagatcccaggagctagcagccagcccagccgaatggtgtctccacctggagtgcaggagagagagactgaaaaccaaaaaggttgcttttataactggaacaggagtttgctgctcaaagtacaatgtctcgatcccggcagcctccacttgtgacaggcatctctccaaatgaagggattccttggaccaaagtcacaattagaggggagaatctgggtactggtcccactgaccttataggcttgacaatttgtggacataattgcctcctcacggcagaatggatgtctgcaagtaaaattgtctgtcgagtgggacaagccaaaaatgacaaaggagacattattgtcacaaccaagtcagggggcagaggaacctcaactgtctcttttaagctactcaaacctgaaaaaataggcattttggatcagtctgcagtgtgggtggatgagatgaattattatgatatgcggactgacaggaataaggggattccccccttgtcacttcgtcctgcgaatcctctcggcattgaaattgagaagtgtaaacttcctcagaagaacttagaagtgttattccatggcatgagtgctgattttacgagtgagaatttttcagcagcctggtatctcatagagaaccactccaacaccagttttgagcagctcaagatggcagttaccaacctcaaaaggcaggccaacaagaagagcgagggtagtctagcgtacgtgaagggtggcctcagtaccttctttgaagctcaagatgctctctcagctatccatcaaaaactagaagcagacggaacagaaaaagtagaaggatccatgacacagaaattggagaatgtcctcaacagagcaagtaatactgctgacacattgtttcaagaagtgttaggtcggaaagacaaggcagattccactaggaatgcactcaacgtgcttcagcggtttaaatttctcttcaaccttcctctcaatatcaaacggaacattcaaaagggggattatgatgtggttattaatgattatgaaaaagccaaatcgctctttgggaaaacggaggtgcaagttttcaagaaatattatgctgaagtagaggcaggaattgaagatctaagagagttacttctaaagaaactgctcgagactccgtcaaccttacatgaccagaagcgttacataaggtatctttctgacctccatgctcctggtgatcctgcttggcagtgtatcggagctcagcacaagtggaccctcaaactcatgcaagactgcaaagaaggccacatgaagagcctgaaaggtaacccaggcccacacagccccatgcttgacctagataatgatgcccgcccctctgtgttgggccatctcagtcagacagcatcactgaagagaggcagcagcttccagtctggtcgagatgacacatggaggtacaagacgccccacagagtggcatttgttgaaaaattaacgaagcttgtgttaagtcagctgcctaacttctggaaactctggatttcatatgttaatggaagtctgttcagtgagacagctgagaagtcaggccagattgaaagatcaaagaatgtgaggcaaagacaaaatgatttcaagaaaatgattcaagaagtaatgcactccctggtgaagttgatccggggagccctgctcccattcagcctccgagaaggggatgggagacagtatggcggctgggaggtgcaggcagagctctcggggcagtggctcgcacacgttatccagaccataaggctgacatatgaatcactgaccgctctggagattcccaatgacatgttacagattatccaggacctgattttggatctccgtatacattgcataatggtgacgttgcaacatacagctgaagagataaagagattagctgaaaaagaagattggattgttgataacgaaggactgacttccctaccatgtcagtttgaacagagcattgttcactccctgcagtcgttgaagggtgttgtggattgcaaacctggagaagccagtgtctttcagcagcctaaaacccaggaggaggtttgccagttgtgcatcagtatcatgcaggtttttatatactgcctggaacaactgagcaccaagcctgatgcggacatagatactactcatctttctgttgatgtttcttctcctgatttgtttggaagcatccatgaagacttcggtttgacttcagagcagaggcttttgatagtcctgagtaattgctgctatttagaacgtcacaccttcctaaacatagcagaacattttgaaaagcacaacttccagggaatagaaaaaataacacaggttagtatggcatcactgaaagaactggatcaacgactctttgaaaattacattgagctaaaagcagatcctattgttggatccttggaaactgggatatatgcaggctattttgattggaaagactgtctgcctccagcaggtgtcagaaactatttaaaagaagcactggtgaatataattgctgtgcatgcagaggtgttcactatttccaaagaactggtgccccgggtcctggccagagtgatagaagcagtctctgaagagctgagccggctgatgcagtgtgtctcatccttcagcagaaatggagcgctgcaggccagacttgaaatctgtgctctgagggacactgtagccatttacctgaccccggagagcaggtctagttttaaacaggccctggaggccctgcctcagcttgcaagtggtgcagacaaaaagctactggaagagctgctcaacaagttcaagagcagtatgcacttgcagctcacctgcttccaagctgcgtctccaacagtgatgaagacatagacacagacagagatcccagtccaagcactgcatttaccttctctcttttccccagcatggtggtgcagaaagatgttgatgggtatttaatttcagccgatttagactaccatacaattttgttattactagctttggtcctgtagcatactcttcaaaatgttttttcttagctctatgtttcttggtgtgagttttgagagcttctccagcatggcccaaagcggccnatggtgtgtgtgaatgtgctncgcagtggcgctctacctggcctcagtgttggcagtttccagcccaggggaggatatgaagtcacagcttttggagctgtcataaactttaaacccaccatttcaaacaagtggttctaggtgcgctctctctctctctctctctctctctctctctctctctgtaaagaaaaatataaaaatgttaaaatctgtgatgcagaagtccctggatgaactctgaatttcatagtctggctttcatttttcccagtgttcaacacggaagcttctggttctcacccttaagttgatgcatcgttgtggggagggtttacaaggacctgaatgtggaggccctgtcacacccgcaagccctgtggcaggcttgtggtcttcaatgcaacctaaagattaagccaggctcctcccctcccgcaggttactcccctctgctactttccacacttcgaaatgtcttgctccatagctggaaagatggtgccctggcacaggctgtgttttgtaaagattagaggtgcctcggtgaccaggcattgagcagtgactcactgctcactggctggcacagtagaatctggtcactgcgacctgcaagcagcttttacctcactgcatctgaccctagcttcagctctggttcactccagacagatctgtggcgcctttctttcagttgacaaaattcctgtcacttttagttcaggtaattccagagcacagcatatgcacactatggattatttgaggttaataacagtgtgtttatttatcacagtaactggaagtacaaatttaatcctttgtttgcaaagtatgtatgtacagcattgtctcctcagtgcactggtattacatctggcatagccaaactgaattccaaggcagaagtacacaactattggttgtttaaacacctaacaaatacactacacaaagccagtagtcttccttctctgtaaaacctctaagtgtctttatttcaccattttttattagctctgtaattgtttatattcctagttttaaaatccaaaataaatagtggtgttctctctttaaaaaaaaaaaaaaaaaaaaaaaaaaaaaaaaaaaaaaaaaaaaaaaaaaaaaaaaaaaaaaaaaaaaaaaaa

SEQ ID NO: 675 - protein, 924 aa, Rattus norvegicus
  ref <308>: DATABASE ACCESSION NUMBER: SWISS-Prot / AAC01578
  ref <309>: DATABASE ENTRY DATE: 2002-06-15
MSRSRQPPLVTGISPNEGIPWTKVTIRGENLGTGPTDLIGLTICGHNCLLTAEWMSASKIVCRVGQAKNDKGDIIVTTKSGGRGTSTVSFKLLKPEKIGILDQSAVWVDEMNYYDMRTDRNKGIPPLSLRPANPLGIEIEKCKLPQKNLEVLFHGMSADFTSENFSAAWYLIENHSNTSFEQLKMAVTNLKRQANKKSEGSLAYVKGGLSTFFEAQDALSAIHQKLEADGTEKVEGSMTQKLENVLNRASNTADTLFQEVLGRKDKADSTRNALNVLQRFKFLFNLPLNIKRNIQKGDYDVVINDYEKAKSLFGKTEVQVFKKYYAEVEAGIEDLRELLLKKLLETPSTLHDQKRYIRYLSDLHAPGDPAWQCIGAQHKWTLKLMQDCKEGHMKSLKGNPGPHSPMLDLDNDARPSVLGHLSQTASLKRGSSFQSGRDDTWRYKTPHRVAFVEKLTKLVLSQLPNFWKLWISYVNGSLFSETAEKSGQIERSKNVRQRQNDFKKMIQEVMHSLVKLIRGALLPFSLREGDGRQYGGWEVQAELSGQWLAHVIQTIRLTYESLTALEIPNDMLQIIQDLILDLRIHCIMVTLQHTAEEIKRLAEKEDWIVDNEGLTSLPCQFEQSIVHSLQSLKGVVDCKPGEASVFQQPKTQEEVCQLCISIMQVFIYCLEQLSTKPDADIDTTHLSVDVSSPDLFGSIHEDFGLTSEQRLLIVLSNCCYLERHTFLNIAEHFEKHNFQGIEKITQVSMASLKELDQRLFENYIELKADPIVGSLETGIYAGYFDWKDCLPPAGVRNYLKEALVNIIAVHAEVFTISKELVPRVLARVIEAVSEELSRLMQCVSSFSRNGALQARLEICALRDTVAIYLTPESRSSFKQALEALPQLASGADKKLLEELLNKFKSSMHLQLTCFQAASPTVMKT

SEQ ID NO: 676 - DNA, 2001 bp, Homo sapiens
  ref <308>: DATABASE ACCESSION NUMBER: EMBL / AJ420556
  ref <309>: DATABASE ENTRY DATE: 2001-11-23
ggcacgaggagaacctggaatttatgcaggatattttgattggaaggactgcctgcctccaacaggtgtcagaaactatttaaaagaagcactggtgaatataattgccgtgcatgcagaggtgttcaccatttccaaagaactggtccctcgggtactatccaaggtgatagaagcagtttctgaagagctcagtcgactgatgcagtgtgtttcatccttcagcaaaaatggagctttacaggcgagacttgaaatctgtgctttgagggacactgtggctgtttacctgacacccgaaagcaagtcaagttttaagcaggctttggaagccctgccccagctttccagtggagcagataaaaagttactggaagagctcctgaacaagttcaagagtagcatgcacttgcagctcacctgtttccaagcagcttcttcaaccatgatgaaaacataaatatctgccacataaaagaagtccaggaaaataacacgtaataagactgttcactctctaagtaccctaaaggtatttggtgtattaaacattgggtttgccatttttctcttttttcttcctctgacttcgaaaattgttggtatacatttcaaccaaaatgacctcatttgaaatgcccaggaagtatttgttttgccattcttactagatcagatcctgtatgactttaaaatacattttaaaatatattttgcatctcagcagaaggttgagtgctgcaggaagagctgcttctgcagggagttttctggaatggcgtggcacatattgaagcatttctcagtgtcccgttcacggaagcgcaggcagctcccacgacacacggagagactgactgatacgagatttggaaagctatgtagacatctttggagctcttactgtcctaaactgtacagctgtgcttaaaacccttatttcatataaatggccttaagttttctaattcaagcgggtttttggaaaaatttatggtctccattaaaatacatattacaactggggtagattatttgtggtccaggtgtctgtgatttaactttgcgttttgctatctgatttttatttttcacagggctaagcatgagctttcattctcactcactcttaatttgtcgtgcgtcactacacatgcacgtgttgcagtccctgaggccctgtgtgttatctgtgatggagtgtgaatgtgtaacgggcactgtgttacactctcaggtgttggcggggcggtcgcagacttcagggtcccctaacggaaaggccaggctccgcgtggacggccaactccctgcccgctccttcagcaggtgactgtctctgccacttcttacctgctgaaggatcttgctcagtagctggaacaatgctgctgtcacacagtctcttctctgaaacttcaggatgctccttggtcaccaggcaatgggagctgtagaccagccgcatgcacttgccccacattcactgctgactggcttcactggaataggttcaggtcaccgggacttctctcagagtcagcagcccacccaactccctcataccgtcgcatctgaaaattttcagagaggaattctctttggtagtcggcttgtcagggttttcaagtttttctatggttatttttaaatctctttttttaaatgctaaaattaatgtcctcattaatgcaagtaattttagagcacagtgtagccatgtacagtttccattatttaaaataaataaatgtgttggttcatttggtgtatggggggacatcatggtaactggaaatgaaagtttaatctttcacaaatgtgcttgataaagctgttaagaattgtctttcctaagtatgttaactgttgtatctaactcaactgtgagctaagtttaaaaactgcaatcatgaatgtttgtgatattttaaatatctactacagcacattcagccaataaagaatctgcctttaaaaaaaaaaaaaaaaaaaacattc

SEQ ID NO: 677 - protein, 924 aa, Homo sapiens
  ref <308>: DATABASE ACCESSION NUMBER: SWISS-Prot / CAB54145
  ref <309>: DATABASE ENTRY DATE: 2002-06-15
MSRSRQPPLVTGISPNEGIPWTKVTIRGENLGTGPTDLIGLTICGHNCLLTAEWMSASKIVCRVGQAKNDKGDIIVTTKSGGRGTSTVSFKLLKPEKIGILDQSAVWVDEMNYYDMRTDRNKGIPPLSLRPANPLGIEIEKSKFSQKDLEMLFHGMSADFTSENFSAAWYLIENHSNTSFEQLKMAVTNLKRQANKKSEGSLAYVKGGLSTFFEAQDALSAIHQKLEADGTEKVEGSMTQKLENVLNRASNTADTLFQEVLGRKDKADSTRNALNVLQRFKFLFNLPLNIERNIQKGDYDVVINDYEKAKSLFGKTEVQVFKKYYAEVETRIEALRELLLDKLLETPSTLHDQKRYIRYLSDLHASGDPAWQCIGAQHKWILQLMHSCKEGYVKDLKGNPGLHSPMLDLDNDTRPSVLGHLSQTASLKRGSSFQSGRDDTWRYKTPHRVAFVEKLTKLVLSQLPNFWKLWISYVNGSLFSETAEKSGQIERSKNVRQRQNDFKKMIQEVMHSLVKLTRGALLPLSIRDGEAKQYGGWEVKCELSGQWLAHAIQTVRLTHESLTALEIPNDLLQTIQDLILDLRVRCVMATLQHTAEEIKRLAEKEDWIVDNEGLTSLPCQFEQCIVCSLQSLKGVLECKPGEASVFQQPKTQEEVCQLSINIMQVFIYCLEQLSTKPDADIDTTHLSVDVSSPDLFGSIHEDFSLTSEQRLLIVLSNCCYLERHTFLNIAEHFEKHNFQGIEKITQVSMASLKELDQRLFENYIELKADPIVGSLEPGIYAGYFDWKDCLPPTGVRNYLKEALVNIIAVHAEVFTISKELVPRVLSKVIEAVSEELSRLMQCVSSFSKNGALQARLEICALRDTVAVYLTPESKSSFKQALEALPQLSSGADKKLLEELLNKFKSSMHLQLTCFQAASSTMMKT

SEQ ID NO: 678 - DNA, 4358 bp, Rattus norvegicus; identical to SEQ ID NO: 674
  misc_feature (1)..(4358): n=a, c, g or t
  ref <308>: DATABASE ACCESSION NUMBER: EMBL / AF032666
  ref <309>: DATABASE ENTRY DATE: 1998-02-05

SEQ ID NO: 679 - protein, 924 aa, Rattus norvegicus; identical to SEQ ID NO: 675
  ref <308>: DATABASE ACCESSION NUMBER: SWISS-Prot / AAC01578
  ref <309>: DATABASE ENTRY DATE: 2002-06-15

SEQ ID NO: 680 - DNA, 2001 bp, Homo sapiens; identical to SEQ ID NO: 676
  ref <308>: DATABASE ACCESSION NUMBER: EMBL / AJ420556
  ref <309>: DATABASE ENTRY DATE: 2001-11-23

SEQ ID NO: 681 - protein, 924 aa, Homo sapiens; identical to SEQ ID NO: 677
  ref <308>: DATABASE ACCESSION NUMBER: SWISS-Prot / CAB54145
  ref <309>: DATABASE ENTRY DATE: 2002-06-15

SEQ ID NO: 682 - DNA, 4358 bp, Rattus norvegicus; identical to SEQ ID NO: 674
  misc_feature (1)..(4358): n=a, c, g or t
  ref <308>: DATABASE ACCESSION NUMBER: EMBL / AF032666
  ref <309>: DATABASE ENTRY DATE: 1998-02-05

SEQ ID NO: 683 - protein, 924 aa, Rattus norvegicus; identical to SEQ ID NO: 675
  ref <308>: DATABASE ACCESSION NUMBER: SWISS-Prot / AAC01578
  ref <309>: DATABASE ENTRY DATE: 2002-06-15

SEQ ID NO: 684 - DNA, 2001 bp, Homo sapiens; identical to SEQ ID NO: 676
  ref <308>: DATABASE ACCESSION NUMBER: EMBL / AJ420556
  ref <309>: DATABASE ENTRY DATE: 2001-11-23

SEQ ID NO: 685 - protein, 924 aa, Homo sapiens; identical to SEQ ID NO: 677
  ref <308>: DATABASE ACCESSION NUMBER: SWISS-Prot / CAB54145
  ref <309>: DATABASE ENTRY DATE: 2002-06-15

SEQ ID NO: 686 - DNA, 4358 bp, Rattus norvegicus; identical to SEQ ID NO: 674
  misc_feature (1)..(4358): n=a, c, g or t
  ref <308>: DATABASE ACCESSION NUMBER: EMBL / AF032666
  ref <309>: DATABASE ENTRY DATE: 1998-02-05

SEQ ID NO: 687 - protein, 924 aa, Rattus norvegicus; identical to SEQ ID NO: 675
  ref <308>: DATABASE ACCESSION NUMBER: SWISS-Prot / AAC01578
  ref <309>: DATABASE ENTRY DATE: 2002-06-15

SEQ ID NO: 688 - DNA, 2001 bp, Homo sapiens; identical to SEQ ID NO: 676
  ref <308>: DATABASE ACCESSION NUMBER: EMBL / AJ420556
  ref <309>: DATABASE ENTRY DATE: 2001-11-23

SEQ ID NO: 689 - protein, 924 aa, Homo sapiens; identical to SEQ ID NO: 677
  ref <308>: DATABASE ACCESSION NUMBER: SWISS-Prot / CAB54145
  ref <309>: DATABASE ENTRY DATE: 2002-06-15

SEQ ID NO: 690 - DNA, 3059 bp, Rattus norvegicus
  ref <308>: DATABASE ACCESSION NUMBER: EMBL / AF032668
  ref <309>: DATABASE ENTRY DATE: 1998-02-05
ccgcgtcgacccggcacaaacacaccatgcaccctgacagtaaatttataaaaaatttttttcaactatagcacaaaaaatgtgtatcacttaacagggatgacaaatggctgtcacttcagtcactataatgcacaatatatatatgccttctacttatgaagcacgtttactggaaaacaactgttatgcagacggcatcctcatttttcttatgtttggtctcttgtcccttgagagatcatgtccagtaagggatctacaacagttccttgtgtgtgttaacaatgatgaaatcacaattgatgtgttttcctgagtctgtccccacagttaaacaatgcctttctccccggggcgccgcgcccggccggcgcctccgcttccagccaagatggcggagagcggcgaggctctgggtacggtcccggagcacgagcggatcttgcaggagatcgaaagcacggacaccgcctgcgtagggcccacccttcggtctgtgtatgatggtcagccaaatgcacacaagaagttcatggaaaagctagatgcctgcatccgcaaccatgacaaggagattgagaaaatgtgtaacttccatcaccagggctttgtagatgctatcacagagctcctcaaagtaagggcggacgcagaaaagctgaaggtccaggttactgataccaaccgaaggttccaagatgctggaaaagaggtgatagaacaaacagaagatattattcggtgtagaattcagcagagaaatattacaaccgtagtagagaaattgcagttatgcctgccagtgttggagatgtacagtaaactgaaggaacagatgagcatgcagaggtattattctgcacttaaaacaatggaacagttagagaacgtatactttcctcgggttagccagtaccgcttctgtcagctcatgatggacacacttcctaaactccgggaggatatcaaagacatctccatgtctgacctcaaggactttctggaaagcattcgaaagcattctgacaaaataggggaaacagccatgaaacaggcacaacagcagaagagcttcagtattgctgtacagaagcaaaccaatatgaggtttgggaaaaatatgcatgtaaacaatgacaggactctagaggaaaagagtgacatcatactgaagcacacacttgaggaggaggccgagaatgacgaggaggtcttaactgttcaagatctcgttgacttttcccctgtttaccgatgctcacacatttattctgctttgggtgatgaagaaacatttgaaaattattaccggaagcaaaggaagaagcaggcgcgcctggttctgcagccgcagtcgagtgtgcatgaaacagttgatggctatagaagatatttcactcagattgtagggttctttgttgtggaagatcacattttacatgtgacccaaggattagtaaccagggcatacactgatgaactctggaacatggccctctcaaagataattgctgtcctcagagctcactcatcttactgcactgatcctgaccttgttctggagctgaagaatctcatcgtcatttttgcggatactttgcagggttatggcttttctgtcaaccgactctttgaccttctatttgaaataagagatcaatacaacgaaacactgcttaagaaatgggccggtattttcagggacatttttgaagaagataactacagccctattcctattggcagtgaagaagaatataaaatggtcatcagtaaattccccttccaagatccggaccttgaaaagcaatccttcccaaagaagtttcccatgtcccagtcagtgcctcttatttatattcaagttaaagaatttatttatgccagtcttaaattctcagagtcactacaccgaagctctacagaaatagacgatatgcttaggaagtcaacaaatctgctgctgaccaggattctgagtagctgcttactgaacctcattagaaaacctcacataggtttgacagagctggtgcaaattatcataaacacaacacacctggagcaggcttgcaaatacctggaggactttataactaacattacaaatatttctcaagaaaccgttcacaccacaagactttatggactttctacttttaaggatgcacgacatgcagcggaaggagaaatatataccaaactcaatcagaagattgatgagtttgtccagctggccgactacgactggaccatggctgagtcggatgggagagcaagtggttatttaatggatcttattaattttttgagaagcatctttcaagtatttacccacttgcctgggaaagttgcccagacagcttgcatgtcagcctgccaacatctgtccacatccttgatgcagatgctcctggacagcgagttaaagcagatcagcatgggggccgtacagcagtttaacctagacgtcatacagtgcgaattgtttgccagctctgagcctgtgccaggattccaaggggacaccctgcagctggccttcattgacctcagacagctccttgacttgtttatggtttgggactggtctacttacctggctgactatgggcagccagcttccaagtacctccgggtgaacccacacgccgcccttacgcttttggagaagatgaaggacaccagtaagaagaataacatatttgcccagttccggaagaacgaccgggacagacagaagctgatcgagacagtggtgaaacagctcagaggcttggtgaccggtatgtcccagcacatgtagaccagatccatgcccgagtgcttctctgtggccagcaccggtcatgagacaataatttgtttacagaagccaaaaactgtagtagaggaaagatactaatgagggcttaaacaataaggacagcaaacatcatttgtatggacttttaataactgaatactattttatatataaaaatgtaacattaattttttccaattttagaagaaaagtcaaaagtgtaatatataaacccaataaattgtgtatg

SEQ ID NO: 691 - protein, 822 aa, Rattus norvegicus
  ref <308>: DATABASE ACCESSION NUMBER: SWISS-Prot / AAC01580
  ref <309>: DATABASE ENTRY DATE: 2002-06-15
MPFSPGRRARPAPPLPAKMAESGEALGTVPEHERILQEIESTDTACVGPTLRSVYDGQPNAHKKFMEKLDACIRNHDKEIEKMCNFHHQGFVDAITELLKVRADAEKLKVQVTDTNRRFQDAGKEVIEQTEDIIRCRIQQRNITTVVEKLQLCLPVLEMYSKLKEQMSMQRYYSALKTMEQLENVYFPRVSQYRFCQLMMDTLPKLREDIKDISMSDLKDFLESIRKHSDKIGETAMKQAQQQKSFSIAVQKQTNMRFGKNMHVNNDRTLEEKSDIILKHTLEEEAENDEEVLTVQDLVDFSPVYRCSHIYSALGDEETFENYYRKQRKKQARLVLQPQSSVHETVDGYRRYFTQIVGFFVVEDHILHVTQGLVTRAYTDELWNMALSKIIAVLRAHSSYCTDPDLVLELKNLIVIFADTLQGYGFSVNRLFDLLFEIRDQYNETLLKKWAGIFRDIFEEDNYSPIPIGSEEEYKMVISKFPFQDPDLEKQSFPKKFPMSQSVPLIYIQVKEFIYASLKFSESLHRSSTEIDDMLRKSTNLLLTRILSSCLLNLIRKPHIGLTELVQIIINTTHLEQACKYLEDFITNITNISQETVHTTRLYGLSTFKDARHAAEGEIYTKLNQKIDEFVQLADYDWTMAESDGRASGYLMDLINFLRSIFQVFTHLPGKVAQTACMSACQHLSTSLMQMLLDSELKQISMGAVQQFNLDVIQCELFASSEPVPGFQGDTLQLAFIDLRQLLDLFMVWDWSTYLADYGQPASKYLRVNPHAALTLLEKMKDTSKKNNIFAQFRKNDRDRQKLIETVVKQLRGLVTGMSQHM

SEQ ID NO: 692 - DNA, 1799 bp, Homo sapiens
  ref <308>: DATABASE ACCESSION NUMBER: EMBL / AK002113
  ref <309>: DATABASE ENTRY DATE: 2002-08-06
acaaagaaagaaacaagcaagactggtattgcaaccccagtcgaatatgcatgaaacagttgatggctatagaagatatttcactcaaattgtagggttctttgtggtagaagatcacattttacatgtgacccaaggattagtaaccagggcatacactgatgaactttggaacatggccctctcaaagataattgctgtccttagagctcattcatcctattgcactgatcctgatcttgttctggagctgaagaatcttattgtaatatttgcagatactttacagggttatggttttccagtgaaccgactttttgaccttttatttgaaataagagaccaatacaatgaaacactgcttaagaaatgggctggagttttcagggacatttttgaagaagataattacagccccatccctgttgtcaatgaagaagaatataaaattgtcatcagcaaatttccctttcaagatccagaccttgaaaagcagtctttcccaaagaaattccccatgtctcagtcagtgcctcatatttacattcaagttaaagaatttatttatgccagccttaaattttcagagtcactacaccggagctcaacagaaatagacgatatgcttagaaaatcaacaaatctgctgctgaccagaactttgagtagctgtttactgaaccttattagaaaacctcatataggtttgacagagctggtacaaatcatcataaacacaacacacctggagcaagcttgtaaatatcttgaggactttataactaacatcacaaatatttcccaagaaactgttcatactacaagactttatggactttctactttcaaggatgctcgacatgcagcagaaggagaaatatataccaaactgaatcaaaaaattgatgaatttgttcagcttgctgattatgactggacaatgtctgagccagatggaagagctagtggttatttaatggaccttataaattttttgagaagcatctttcaagtgtttactcatttgcctgggaaagttgctcagacagcttgcatgtcagcctgccagcatctgtcaacatccttaatgcagatgctactggacagtgagttaaaacaaataagcatgggagctgttcagcagtttaacttagatgtcatacagtgtgaatatgaggtgttgctgtgttgcccagactggtctcaaactcctggcctcaagtcatcctcctgccttggcatcccaaaatgctggaattagaggcgtgagctactgtgcctggccatttttataagcttttaagctgaaatgtttgccagctctgagcctgtgccaggattccagggggataccctgcagctagcattcattgacctcagacaactccttgacctgtttatggtttgggattggtctacttacctagctgattatgggcagccagcttctaagtaccttcgggtgaatccaaacacagcccttactcttttggagaagatgaaggatactagcaaaaagaacaatatatttgctcagttcaggaagaatgatcgagacaaacagaagttgatagagacagtcgtgaaacagctgagaagtttggtgaatggtatgtcccagcacatgtagacctcacatggcttgcactcagtgacaccaaatccatgattcaatgttgatcttgagcaagtattggtcatgatacagtaatttgtttacagaatccaaaaatacaatagagaagatacatgagggcttaaacaagaaatagtaataaatatcatttgtatggattttt

SEQ ID NO: 693 - protein, 596 aa, Homo sapiens
  ref <308>: DATABASE ACCESSION NUMBER: SWISS-Prot / CAB70736
  ref <309>: DATABASE ENTRY DATE: 2002-10-01
KHSDKIGETAMKQAQHQKTFSVSLQKQNKMKFGKNMYINRDRIPEERNETVLKHSLEEEDENEEEILTVQDLVDFSPVYRCLHIYSVLGDEETFENYYRKQRKKQARLVLQPQSNMHETVDGYRRYFTQIVGFFVVEDHILHVTQGLVTRAYTDELWNMALSKIIAVLRAHSSYCTDPDLVLELKNLTVIFADTLQGYGFPVNRLFDLLFEIRDQYNETLLKKWAGVFRDIFEEDNYSPIPVVNEEEYKIVISKFPFQDPDLEKQSFPKKFPMSQSVPHIYIQVKEFIYASLKFSESLHRSSTEIDDMLRKSTNLLLTRTLSSCLLNLIRKPHIGLTELVQIIINTTHLEQACKYLEDFITNITNISQETVHTTRLYGLSTFKDARHAAEGEIYTKLNQKIDEFVQLADYDWTMSEPDGRASGYLMDLINFLRSIFQVFTHLPGKVAQTACMSACQHLSTSLMQMLLDSELKQISMGAVQQFNLDVIQCELFASSEPVPGFQGDTLQLAFIDLRQLLDLFMVWDWSTYLADYGQPASKYLRVNPNTALTLLEKMKDTSKKNNIFAQFRKNDRDKQKLIETVVKQLRSLVNGMSQHM

SEQ ID NO: 694 - DNA, 597 bp, Rattus norvegicus
  ref <308>: DATABASE ACCESSION NUMBER: EMBL / AF033027
  ref <309>: DATABASE ENTRY DATE: 2000-03-03
atgaagctgtacagcctcagcgtcctctacaaaggcgagaagaaagcggttctgctcaaggccgcgtacgacgtgtcttcctttagtttcttccagaggtccagtgttcaggaattcatgacctttacaagtcaactgattgtggaacgatcggcgaaaggcagcagagcttctgttaaagaacaagagtacctttgccatgtctacgtccggagtgacagtctggcaggtgtggtcattgctgacagcgaatacccttccagagtggcctttaccttgctggagaaggtactagatcaattctccaagcaggtcgatacaatagactggccagtaggatcccctgctacaatccattacacagccctagatggccaccttagtagataccagaacccccgggaggctgatcccatgagtaaagtgcaggccgaactggatgagaccaaaatcattctgcacaacaccatggagtctttgttagagcgaggggagaagcttgatgacttggtatccaaatcagaagtcctgggaacacagtcgaaagccttctataaaactgcccggaaacaaaactcatgctgtgcaatcatgtga

SEQ ID NO: 695 - protein, 199 aa, Rattus norvegicus
  misc_feature (1)..(199): Xaa=Unknown amino acid
MKLYSLSVLYKGEKKAVLLKAAYDVSSFSFFQRSSVQEFMTFTSQLIVERSAKGSRASVKEQEYLCHVYVRSDSLAGVVIADSEYPSRVAFTLLEKVLDQFSKQVDTIDWPVGSPATIHYTALDGHLSRYQNPREADPMSKVQAELDETKIILHNTMESLLERGEKLDDLVSKSEVLGTQSKAFYKTARKQNSCCAIMX

SEQ ID NO: 696 - DNA, 741 bp, Homo sapiens
  ref <308>: DATABASE ACCESSION NUMBER: EMBL / U95735
  ref <309>: DATABASE ENTRY DATE: 2000-03-04
gctgcttccctgagaacgggtcccgcagctgggcaggcgggcggcctgagggccggaccatgaagctgtacagcctcagcgtcctctacaaaggcgaggccaaggtggtgctgctcaaagccgcatacgatgtgtcttccttcagctttttccagagatccagcgttcaggaattcatgaccttcacgagtcaactgattgtggagcgctcatcgaaaggcactagagcttctgtcaaagaacaagactatctgtgccacgtctacgtccggaatgatagtcttgcaggtgtggtcattgctgacaatgaatacccatcccgggtggcctttaccttgctggagaaggtactagatgaattctccaagcaagtcgacaggatagactggccagtaggatcccctgctacaatccattacccagccctggatggtcacctcagtagataccagaacccacgagaagctgatcccatgactaaagtgcaggccgaactagatgagaccaaaatcattctgcacaacaccatggagtctctgttagagcgaggtgagaagctagatgacttggtgtccaaatccgaggtgctgggaacacagtctaaagccttctataaaactgcccggaaacaaaactcatgctgtgccatcatgtgatgcagcctccagaggcccaatgctggaatggcaccatcattcacatcagaactgcagcccctggaaaagaagagacatcgttcct

SEQ ID NO: 697 - protein, 220 aa, Homo sapiens
  ref <308>: DATABASE ACCESSION NUMBER: SWISS-Prot / P51809
  ref <309>: DATABASE ENTRY DATE: 2002-06-15
MAILFAVVARGTTILAKHAWCGGNFLEVTEQILAKIPSENNKLTYSHGNYLFHYICQDRIVYLCITDDDFERSRAFNFLNEIKKRFQTTYGSRAQTALPYAMNSEFSSVLAAQLKHHSENKGLDKVMETQAQVDELKGIMVRNIDLVAQRGERLELLIDKTENLVDSSVTFKTTSRNLARAMCMKNLKLTIIIIIVSIVFIYIIVSPLCGGFTWPSCVKK

SEQ ID NO: 698 - DNA, 859 bp, Rattus norvegicus
  ref <308>: DATABASE ACCESSION NUMBER: EMBL / AF033109
  ref <309>: DATABASE ENTRY DATE: 1998-11-06
gcacgagctgcaggcggagactgcaccatggccccagacccctggttctccacgtacgattctacttgtcagattgcccaagaaatcgctgagaagattcaagaacgaaatcagtgtgaaagaagaggtgagaagacacctaagcttaccctgacaatcagaactttgttgaagaatctgaaggtaaagatcgacctcttgaaggacttacttctaagagctgtgtcgacgcgccagataacacaactggagggggatcgaagacagaaccttctggatgatcttgtcacccgagagagactgctcctggcatcgtttaagaatgagggttccgagccggatttgatcaggtccagcctgatgagtgaagaagcaaagcgaggaactcccaacccttggctctgtgaggagccggaggagaccagaggcttgggtttcgatgagatccggcaacagcagcagaaaattattcaagaacaggacgcaggtcttgatgccctttcctctatcataagtcgccaaaagcaaatgggccaggagattgggaatgaactggacgaacagaacgagatcatcgatgaccttgccaacctggtggagaacacagatgagaagcttcgcactgaagccaggcgagtgaccctggtggacagaaagtcagcttcctgtgggatgataatggtgatcttattgctgctcgtggctattgtggtggttgcagtgtggccaaccaactgatggcaataaggggaccacccgcagtgacacagccaacaatgagtgaaagcccagcacccttttggtacacaacacctcctctcaataaattctccacgctcccggcaaaaaaaaaaaaaaa

SEQ ID NO: 699 - protein, 236 aa, Rattus norvegicus
  ref <308>: DATABASE ACCESSION NUMBER: SWISS-Prot / Q9Z2Q7
  ref <309>: DATABASE ENTRY DATE: 2002-06-15
MAPDPWFSTYDSTCQIAQEIAEKIQERNQCERRGEKTPKLTLTIRTLLKNLKVKIDLLKDLLLRAVSTRQITQLEGDRRQNLLDDLVTRERLLLASFKNEGSEPDLIRSSLMSEEAKRGTPNPWLCEEPEETRGLGFDEIRQQQQKIIQEQDAGLDALSSIISRQKQMGQEIGNELDEQNEIIDDLANLVENTDEKLRTEARRVTLVDRKSASCGMIMVILLLLVAIVVVAVWPTN

SEQ ID NO: 700 - DNA, 824 bp, Homo sapiens
  ref <308>: DATABASE ACCESSION NUMBER: EMBL / AF036715
  ref <309>: DATABASE ENTRY DATE: 1998-12-14
atggccccggacccctggttctccacatacgattctacttgtcaaattgcccaagaaattgctgagaaaattcaacaacgaaatcaatatgaaagaaaaggtgaaaaggcaccaaagcttaccgtgacaatcagagctttgttgcagaacctgaaggaaaagatcgcccttttgaaggacttattgctaagagctgtgtcaacacatcagataacacagcttgaaggggaccgaagacagaacctcttggatgatcttgtaactcgagagagactacttctggcatcctttaagaatgagggtgccgaaccagatctaatcaggtccagcctgatgagtgaagaggctaagcgaggagcacccaacccttggctctttgaggagccagaggagaccagaggcttgggttttgatgaaatccggcaacagcagcagaaaattatccaagaacaggatgcaggccttgatgccctttcctctatcataagtcgccaaaaacaaatggggcaggaaattgggaatgaattggatgaacaaaatgagataattgacgaccttgccaacctagtggagaacacagatgaaaaacttcgcaatgaaaccaggcgggtaaacatggtggacagaaagtcagcctcttgtgggatgatcatggtgattttactgctgcttgtggctatcgtggttgttgcagtctggccgaccaactgatggcagtaaagagaccaccagcagtgacacctgccaatgacagatgcaagcccaacacccttttggtacgcaaaacctgctctcaataaattcccccaaagctcaaaaaaaaa

SEQ ID NO: 701 - protein, 433 aa, Homo sapiens
  ref <308>: DATABASE ACCESSION NUMBER: SWISS-Prot / P35998
  ref <309>: DATABASE ENTRY DATE: 2002-06-15
MPDYLGADQRKTKEDEKDDKPIRALDEGDIALLKTYGQSTYSRQIKQVEDDIQQLLKKINELTGIKESDTGLAPPALWDLAADKQTLQSEQPLQVARCTKIINADSEDPKYIINVKQFAKFVVDLSDQVAPTDIEEGMRVGVDRNKYQIHIPLPPKIDPTVTMMQVEEKPDVTYSDVGGCKEQIEKLREVVETPLLHPERFVNLGIEPPKGVLLFGPPGTGKTLCARAVANRTDACFIRVIGSELVQKYVGEGARMVRELFEMARTKKACLIFFDEIDAIGGARFDDGAGGDNEVQRTMLELINQLDGFDPRGNIKVLMATNRPDTLDPALMRPGRLDRKIEFSLPDLEGRTHIFKIHARSMSVERDIRFELLARLCPNSTGAEIRSVCTEAGMFAIRARRKIATEKDFLEAVNKVIKSYAKFSATPRYMTYN

SEQ ID NO: 702 - DNA, 859 bp, Rattus norvegicus; identical to SEQ ID NO: 698
  ref <308>: DATABASE ACCESSION NUMBER: EMBL / AF033109
  ref <309>: DATABASE ENTRY DATE: 1998-11-06

SEQ ID NO: 703 - protein, 236 aa, Rattus norvegicus; identical to SEQ ID NO: 699
  ref <308>: DATABASE ACCESSION NUMBER: SWISS-Prot / Q9Z2Q7
  ref <309>: DATABASE ENTRY DATE: 2002-06-15

SEQ ID NO: 704 - DNA, 824 bp, Homo sapiens; identical to SEQ ID NO: 700
  ref <308>: DATABASE ACCESSION NUMBER: EMBL / AF036715
  ref <309>: DATABASE ENTRY DATE: 1998-12-14

SEQ ID NO: 705 - protein, 433 aa, Homo sapiens; identical to SEQ ID NO: 701
  ref <308>: DATABASE ACCESSION NUMBER: SWISS-Prot / P35998
  ref <309>: DATABASE ENTRY DATE: 2002-06-15

SEQ ID NO: 706 - DNA, 1892 bp, Rattus norvegicus
  ref <308>: DATABASE ACCESSION NUMBER: EMBL / AF034218
  ref <309>: DATABASE ENTRY DATE: 2000-03-03
cgggcgggcttagctggtaccaggatggcggcggccctggcgtgggtcctggcggcgcctggtgcgagttcctgagctgctaccaggcaggtgacacttcctgtagcccccagcatgcgggcaggactgggtcccatcatcacactggccctagtgctggaggtagcatgggcctcggagcttaagcccacagcgccgcccatcttcaccggccgaccctttgtggtagcatggaatgtacccacacaagaatgtgctccgcgccacaaagtgcccctggaccttagggccttcgatgtggaggctacacctaacgagggttttttcaaccagaatatcaccaccttctactatgaccgtctaggcctgtatccacgttttgatgcagctgggatgtctgtgcatggtggcgtgcctcagaacggtagcctctgtgcacacctgcccatgctgaaggaagctgtggaacgctacattcagacccaagagcctgcggggctggcggtcattgactgggaggaatggcgaccagtgtgggttcgaaactggcaggagaaagatgtgtaccggcagtcttcacgccagctggtggccagtcgacaccctgactggccatcagaccgaatagtgaagcaggcgcagtacgaattcgagttcgctgctcggcagttcatgttgaacacactccgttacgtcaaggcagtcagacctcagcacctgtggggcttctacctctttcctgactgctataatcatgattacgtacagaactgggatagctacacaggccgctgtcctgacgtggaggtggcacaaaatgaccagttggcctggctctgggctgaaaatacagctctctttccctccgtgtacctggacaagacgctggcatcctccaaacacagccgcaactttgtcagcttccgtgttcaggaagcccttcgtgtggctcacacccaccatgcaaaccatgcactccccgtgtatgtcttcacgcgtcccacatatacccgaaggctcacagaacttaaccagatggacctcatctctaccatcggtgaaagcgccgccctgggctcagctggtgttatcttctggggcgactcagtgtacgcttcaagtatggaaaactgccagaacctcaagaagtacctaacgcagacgctggtcccctacatagtcaatgtgtcctgggccacccagtactgcagttggacccagtgccatggccatgggcgctgtgtgcgccgcaatcccagcgccagtaccttcttgcacctcagtcccagcagcttccgcctggtgcctggccgcacgcccagtgaaccccagcttcgacctgagggggagctcagcgaagatgacctcagctacctgcagatgcactttcgctgccactgctatctgggctggggtggtgagcagtgccagtggaaccataaacgggcagctggggatgccagtagagcctgggctggagcccacctcgccagtctcctgggtttggtagctatgactctcacctggaccttataagggatctctccccgcagatagcagtccagctggcctctggcacaaggatctccttggcacaaggagcctgttagggggtaggcaaatgagtctggagttggagtgggcagtacccccaggatgcctagaagagcatccataccacctgtcacccccctgttctaagggggagagaaacatcccctgagatgccctcatcttgccagagaagacgaggatacagttaggccggggaaggcctacctctactctctgttcctggatagtttataatcttggggtctcttttgtaaattaaatacaaaacaactgcaaaaaaaaaaaaaaaaaaaaaaaaaaaaaaaaaaaaaaaaaaa

SEQ ID NO: 707 - protein, 473 aa, Rattus norvegicus
  ref <308>: DATABASE ACCESSION NUMBER: SWISS-Prot / AAD01980
  ref <309>: DATABASE ENTRY DATE: 2002-06-15
MRAGLGPIITLALVLEVAWASELKPTAPPIFTGRPFVVAWNVPTQECAPRHKVPLDLRAFDVEATPNEGFFNQNITTFYYDRLGLYPRFDAAGMSVHGGVPQNGSLCAHLPMLKEAVERYIQTQEPAGLAVIDWEEWRPVWVRNWQEKDVYRQSSRQLVASRHPDWPSDRIVKQAQYEFEFAARQFMLNTLRYVKAVRPQHLWGFYLFPDCYNHDYVQNWDSYTGRCPDVEVAQNDQLAWLWAENTALFPSVYLDKTLASSKHSRNFVSFRVQEALRVAHTHHANHALPVYVFTRPTYTRRLTELNQMDLISTIGESAALGSAGVIFWGDSVYASSMENCQNLKKYLTQTLVPYIVNVSWATQYCSWTQCHGHGRCVRRNPSASTFLHLSPSSFRLVPGRTPSEPQLRPEGELSEDDLSYLQMHFRCHCYLGWGGEQCQWNHKRAAGDASRAWAGAHLASLLGLVAMTLTWTL

SEQ ID NO: 708 - DNA, 1918 bp, Homo sapiens
  ref <308>: DATABASE ACCESSION NUMBER: EMBL / BC000692
  ref <309>: DATABASE ENTRY DATE: 2001-07-13
ggcacgaggaggcgctgagccgggccgcgcctgggcgaacggccggagcgggctgggctgggcccgggatggcggtggccctggcgccggtcccggtggcgccccgcgcgagttcctgagctggtgccaggcaggtgacacctcctgcagcccccagcatgcgggcaggcccaggccccaccgttacattggccctggtgctggcggtggcatgggccatggagctcaagcccacagcaccacccatcttcactggccggccctttgtggtagcgtgggacgtgcccacacaggactgtggcccacgcctcaaggtgccactggacctgaatgcctttgatgtgcaggcctcacctaatgagggttttgtgaaccagaatattaccatcttctaccgcgaccgtctaggcctgtatccacgcttcgattctgccggaaggtctgtgcatggtggtgtgccacagaatgtcagcctttgggcacaccggaagatgctgcagaaacgtgtggagcactacattcggacacaggagtctgcggggctggcggtcatcgactgggaggactggcgacctgtgtgggtgcgcaactggcaggacaaagatgtgtatcgccggttatcacgccagctagtggccagtcgtcaccctgactggcctccagaccgcatagtcaaacaggcacaatatgagtttgagttcgcagcacagcagttcatgctggagacactgcgttatgtcaaggcagtgcggccccggcacctctggggcttctacctctttcctgactgctacaatcatgattatgtgcagaactgggagagctacacaggccgctgccctgatgttgaggtggcccgcaatgaccagctggcctggctgtgggctgagagcacggccctcttcccgtctgtctacctggacgagacacttgcttcctcccgccatggccgcaactttgtgagcttccgtgttcaggaggcccttcgtgtggctcgcacccaccatgccaaccatgcactcccagtctacgtcttcacacgacccacctacagccgcaggctcacggggcttagtgagatggacctcatctctaccattggcgagagtgcggccctgggcgcagctggtgtcatcctctggggtgacgcggggtacaccacaagcacggagacctgccagtacctcaaagattacctgacacggctgctggtcccctacgtggtcaatgtgtcctgggccacccaatattgcagccgggcccagtgccatggccatgggcgctgtgtgcgccgcaaccccagtgccagtaccttcctgcatctcagcaccaacagtttccgcctagtgcctggccatgcacctggtgaaccccagctgcgacctgtgggggagctcagttgggccgacattgaccacctgcagacacacttccgctgccagtgctacttgggctggagtggtgagcaatgccagtgggaccataggcaggcagctggaggtgccagcgaggcctgggctgggtcccacctcaccagtctgctggctctggcagccctggcctttacctggaccttgtaggggtctcctgcctagctgcctagcaagctggcctctaccacaagggctctcttaggcatgtaggaccctgcagggggtggacaaactggagtctggagtgggcagagcccccaggaagcccaggagggcatccataccagctcgcacccccctgttctaagggggaggggaagtccctgggaggccccttctctccctgccagaggggaaggagggtacagctgggctggggaggacctgaccctactcccttgccctagatagtttattattattattattttggggtctcttttgtaaattaaacataaaacaattgcaaaaaaaaaaaaaaaaaa

SEQ ID NO: 709 - protein, 473 aa, Homo sapiens
  ref <308>: DATABASE ACCESSION NUMBER: Refseq / NP_149348
  ref <309>: DATABASE ENTRY DATE: 2001-08-10
MRAGPGPTVTLALVLAVAWAMELKPTAPPIFTGRPFVVAWDVPTQDCGPRLKVPLDLNAFDVQASPNEGFVNQNITIFYRDRLGLYPRFDSAGRSVHGGVPQNVSLWAHRKMLQKRVEHYIRTQESAGLAVIDWEDWRPVWVRNWQDKDVYRRLSRQLVASRHPDWPPDRIVKQAQYEFEFAAQQFMLETLRYVKAVRPRHLWGFYLFPDCYNHDYVQNWESYTGRCPDVEVARNDQLAWLWAESTALFPSVYLDETLASSRHGRNFVSFRVQEALRVARTHHANHALPVYVFTRPTYSRRLTGLSEMDLISTIGESAALGAAGVILWGDAGYTTSTETCQYLKDYLTRLLVPYVVNVSWATQYCSRAQCHGHGRCVRRNPSASTFLHLSTNSFRLVPGHAPGEPQLRPVGELSWADIDHLQTHFRCQCYLGWSGEQCQWDHRQAAGGASEAWAGSHLTSLLALAALAFTWTL

SEQ ID NO: 710 - DNA, 1892 bp, Rattus norvegicus; identical to SEQ ID NO: 706
  ref <308>: DATABASE ACCESSION NUMBER: EMBL / AF034218
  ref <309>: DATABASE ENTRY DATE: 2000-03-03

SEQ ID NO: 711 - protein, 473 aa, Rattus norvegicus; identical to SEQ ID NO: 707
  ref <308>: DATABASE ACCESSION NUMBER: SWISS-Prot / AAD01980
  ref <309>: DATABASE ENTRY DATE: 2002-06-15

SEQ ID NO: 712 - DNA, 1918 bp, Homo sapiens; identical to SEQ ID NO: 708
  ref <308>: DATABASE ACCESSION NUMBER: EMBL / BC000692
  ref <309>: DATABASE ENTRY DATE: 2001-07-13

SEQ ID NO: 713 - protein, 473 aa, Homo sapiens; identical to SEQ ID NO: 709
  ref <308>: DATABASE ACCESSION NUMBER: Refseq / NP_149348
  ref <309>: DATABASE ENTRY DATE: 2001-08-10

SEQ ID NO: 714 - DNA, 4422 bp, Rattus norvegicus
  ref <308>: DATABASE ACCESSION NUMBER: EMBL / AF034582
  ref <309>: DATABASE ENTRY DATE: 2000-03-03
gatcctgggagagtccgacgttcgccggctaacgcaggacaggtcactgaggtccgccaggtgtgtccgccgtttgtttcctgcccctcgccaggttcggtgtccgctgccgaggcccgaggcccttcttccgctgtcggcgcgcccccctgtctcgtttcggccccgccgggacaacgcctggagtcgcagcagccgggtgatcgcgcccgtcatcctctaccaacgtttccaggctgccctgctcgggagtgggtgagaatgaagctaaaggagatagaccgcacagcgatgcaggcgtggagccctgcccagaaccaccccatttacctggccacagggacatctgctcagcagttggacgcgacattcagtaccaacgcttcccttgagatattcgagctcgacctttccgacccgtccttggatatgaagtcctgtgctactttctcctcgtctcacaggtaccacaagttgatttggggacctcataaaatggattccaaaggagatgtttctggagttttgattgcaggtggagaaaatggaaacattattctctacgatccttctaaaattatagctggagacaaggaagttgtgattgcccaaaaggacaagcatactgggccagtgagagccttggatgtaaacatcttccagaccaatttggtggcctctggtgctaatgaatctgaaatctacatttgggatctaaacaattttgcaactccaatgacgccaggagctaaaacacagccaccagaagatatcagctgcatagcctggaacagacaggtccagcatatcttagcatcagccagtcccagtggccgggcaacggtctgggatctcaggaaaaacgagcctattatcaaagtcagcaaccacagtaactggatgcactgctctgggctggcatggcaccctgatgtcgctactcagatggtccttgcttctgaggatgatcgattaccagtggtccagatgtgggatcttcgatttgcttcctctcccctccgggttctggaaaatcatgccagggggattttggcaattgcttggagcatggcagatcctgaattgttgttaagctgtggaaaagatgctaagattctctgctctaaccctaacacgggagaggtattatatgaacttcccaccaacacacagtggtgctttgatatccagtggtgtcctcggaatcctgccgtcctgtctgccgcttccttcgatggtcgcatccgtgtctactccatcatgggagggagcatagacggcttaaggcagaaacaagttgacaagctttcgtcgtcttttgggaatcttgatccgtttggcacaggacagccgctccctccattacaaatcccacagcagacttcacagcacagcatcgtgctgcccctgaagaagccgcccaagtggatccggagacctgtgggcgcctccttctcattcggagggaagttggtgactttcgagaacgttacagggcagcctcagcagggagctgagcagccacggcggcagcccgtgttcatcagtcaggtggtgacagaaaaggacttcctcagccgctcagagcagctacagcacgtcgtcgagtctcagggctttatcagttactgccagaaaaagatcgatgcgtcccagactgacttcgagaagaatgtgtggtccttcttgaaggtaaagtttgaggaggattctcgtgggaaataccttgagcttcttggatatagaagagaagatctgggagagaagattgctttggccttgaacagagtggacggatccgatgtggctcttaaggactctgaccgcgtagcgcagagtgatggggaggagagccctgccgaggaagggcagctcctgggagagcgcattaaagaggaaaaacaggagtgtgactttctgccctcggctggcggtgggacctttaacatctccgtcagtggggatattgatggtttaattacccgggctttgctgaccggcaattttgagagcgcagttgacctttgtttacacgataaccgaatggctgatgccatcatattagccatcgcaggtgggcaggagctcttggctcaaacgcagaagaaatactttgcaaaatcccaaagcaagattaccaggcttatcactgcggtggtgatgaagaactggaaggagattgttgaatcctgtgatcttaaaaattggagagaggctttagctgcggtcctcacttatgctaagccagatgagttctccgccctgtgtgatctcttgggagccaggcttgaaagtgaaggagacagcctcctgcggactcaggcctgcctctgctatatctgtgccgggaatgtagagagattagttgcttgttggaccaaagctcaagatggtagcaaccccttgtctctccaggatctgattgagaaagttgtcatcctccgaaaagctgtacagctcacgcaagccctggacacgaacactgtcggggctcttctggccgagaagatgagtcagtatgccaacttgttggcagcccagggcagcattgccgcggccttggcgtttctgcctgacaacaccaaccagccagatatcgtgcagctgcgtgacagactctgcagagctcaaggcaggtctgtgccggggcaggagtcctctaggagctcctacgaggggcagccgctgcccaagggcgggcccgggccgtttgctggtcacccgcaggtgtccagagttcaaagtcagcaatattatccccaggttagaattgcccctactgtcactacctggagtgacagaactcccactgccctccccagccatccacctgcagcctgtccctctgacacacagggagggaatcctccacctccaggtttcataatgcatggcaacgttgttccaaatagccctgccccactgccgacgtctccaggccacatgcacagccagccaccaccttatccgcagccgcagccttaccagccagcccagcagtattccttgggaacaggggggtcagcagtttatcgacctcaacagcctgttgctcctcctgcttctaagcgttaccctaacgccccatacgtatctcctgtcgcttcctactccgggcagcctcatatgtacacagcacagccagcctcctcccctacctccagctctgctcctcttccccctcccccttcctctggagcgtccttccagcatggcggaccaggagctccaccgtcatcttcagcttatgcactgcctcctggaacaacaggtacaccgcctgctgccagtgagctgcctgcgtcccagagaacaggtcctcagaatggttggaatgatcctcccgctttgaacagagtaccgaagaagaagaagctgcctgagaacttcatgcctcctgtccccattacgtcaccaatcatgaaccctgggggagatccccagccacaggggctgcagcaacagccttcagcttcagggccacggtcaagccacgcctccttcccgcagccgcacctagccggcggccagcccttccacgggatccagcagcctcttgctcaaacaggcatgccaccgtctttctcgaagcccaacactgaaggggcccccggcgctcccattgggaacaccatccagcatgtgcaggctctgccaacagaaaaaattaccaagaagcctattccagacgagcacctcattctaaagactacgtttgaggaccttatccagcgctgcctctcctcagctacagacccccaaaccaagaggaagctggacgacgccagcaaacgcctggagtgtctgtacgacaaacttagggaccagacactttctccaacaatcatcagcggtctccacagcattgcgaggagcattgagacgaggaactactctgaagggttgaccgtccacactcacatcgtcagcaccagcaacttcagtgagacctcagccttcatgccagtcctcaaggttgtgctcagccaggccagtaagctgggcgtctgagacagctgccatgacctccgactccgccacttctccaaagaaagccatgctaagactgggaccagcccctcattagcatgtttccatggcacccgccacccaggagctttgacatttctgcaggcaaactcccctagaactgcttgaaccccccctcccaccccgcccgtgctttcctttgttttaatcccctcgcccattatgattttcccattctgcaaatagtgtctttcctggattacacatagtgtggtttcctgagggattctgacaaaatgtggtttttaaaacttgggtgtactttttaggaaaattgcatctggctgtgtataaaacagacctaaaatagatttctttaatgtcttccctaccttcttcacgttcatcagattaaagttgtaatcccatctt

SEQ ID NO: 715 - protein, 1249 aa, Rattus norvegicus
  ref <308>: DATABASE ACCESSION NUMBER: SWISS-Prot / AAD01990
  ref <309>: DATABASE ENTRY DATE: 2002-10-01
MKLKEIDRTAMQAWSPAQNHPIYLATGTSAQQLDATFSTNASLEIFELDLSDPSLDMKSCATFSSSHRYHKLIWGPHKMDSKGDVSGVLIAGGENGNIILYDPSKIIAGDKEVVIAQKDKHTGPVRALDVNIFQTNLVASGANESEIYIWDLNNFATPMTPGAKTQPPEDISCIAWNRQVQHILASASPSGRATVWDLRKNEPIIKVSNHSNWMHCSGLAWHPDVATQMVLASEDDRLPVVQMWDLRFASSPLRVLENHARGILAIAWSMADPELLLSCGKDAKILCSNPNTGEVLYELPTNTQWCFDIQWCPRNPAVLSAASFDGRIRVYSIMGGSIDGLRQKQVDKLSSSFGNLDPFGTGQPLPPLQIPQQTSQHSIVLPLKKPPKWIRRPVGASFSFGGKLVTFENVTGQPQQGAEQPRRQPVFISQVVTEKDFLSRSEQLQHVVESQGFISYCQKKIDASQTDFEKNVWSFLKVKFEEDSRGKYLELLGYRREDLGEKIALALNRVDGSDVALKDSDRVAQSDGEESPAEEGQLLGERIKEEKQECDFLPSAGGGTFNISVSGDIDGLITRALLTGNFESAVDLCLHDNRMADAIILAIAGGQELLAQTQKKYFAKSQSKITRLITAVVMKNWKEIVESCDLKNWREALAAVLTYAKPDEFSALCDLLGARLESEGDSLLRTQACLCYICAGNVERLVACWTKAQDGSNPLSLQDLIEKVVILRKAVQLTQALDTNTVGALLAEKMSQYANLLAAQGSIAAALAFLPDNTNQPDIVQLRDRLCRAQGRSVPGQESSRSSYEGQPLPKGGPGPFAGHPQVSRVQSQQYYPQVRIAPTVTTWSDRTPTALPSHPPAACPSDTQGGNPPPPGFIMHGNVVPNSPAPLPTSPGHMHSQPPPYPQPQPYQPAQQYSLGTGGSAVYRPQQPVAPPASKRYPNAPYVSPVASYSGQPHMYTAQPASSPTSSSAPLPPPPSSGASFQHGGPGAPPSSSAYALPPGTTGTPPAASELPASQRTGPQNGWNDPPALNRVPKKKKLPENFMPPVPITSPIMNPGGDPQPQGLQQQPSASGPRSSHASFPQPHLAGGQPFHGIQQPLAQTGMPPSFSKPNTEGAPGAPIGNTIQHVQALPTEKITKKPIPDEHLILKTTFEDLIQRCLSSATDPQTKRKLDDASKRLECLYDKLRDQTLSPTIISGLHSIARSIETRNYSEGLTVHTHIVSTSNFSETSAFMPVLKVVLSQASKLGV

SEQ ID NO: 716 - DNA, 4110 bp, Homo sapiens
  ref <308>: DATABASE ACCESSION NUMBER: EMBL / AB020712
  ref <309>: DATABASE ENTRY DATE: 1999-06-16
gcggaatagtgggttttgctgcaaccggtttattttccttctgttttcacccattctggcacaatctggcgccatcgtccttcttgtgaggccaagcctgaaaatgcgaagcagagaggcaggaccaaaattgaggcgaatccaggaacctgccaatgggtctccgggtgcggtctctgaaactggaggatatcgggaggaaaggctctccgatgcggagataatggggaagctcttggcatggttggctgtaggtatgtgataccggaggagcaggagtcaaataggatacgccgacttttaattcaaggaacccttttctgaaacactttgccacaatgaaggaaataagattacagccgaagatacatattaaggatgaagttaaaggaagtagatcgtacagccatgcaggcatggagccctgcccagaatcaccccatttacctagcaacaggaacatctgctcagcaattggatgcaacatttagtacgaatgcttcccttgagatatttgaattagacctctctgatccatccttggatatgaaatcttgtgccacattctcctcttctcacaggtaccacaagttgatttgggggccttataaaatggattccaaaggagatgtctctggagttctgattgcaggtggtgaaaatggaaatattattctctatgatccttctaaaattatagctggagacaaggaagttgtgattgcccagaatgacaagcatactggcccagtgagagccttggatgtgaacattttccagactaatctggtagcttctggtgctaatgaatctgaaatctacatatgggatctaaataattttgcaaccccaatgacaccaggagccaaaacacagccgccagaagatatcagctgcattgcatggaacagacaagttcagcatattttagcatcagccagtcccagtggccgggccactgtatgggatcttaggaaaaatgagccaatcatcaaagtcagtgaccatagtaacagaatgcattgttctgggttggcatggcatcctgatgttgctactcagatggtccttgcctccgaggatgaccggttaccagtgatccagatgtgggatcttcgatttgcttcctctccacttcgtgtcctggaaaaccatgccagggggattttggcaattgcttggagcatggcagatcctgaattgttactgagctgtggaaaagatgctaagattctctgctccaatccaaacacaggagaggtgttatatgaacttcccaccaacacacagtggtgcttcgatattcagtggtgtccccgaaatcctgctgtcttatcagctgcttcgtttgatgggcgtatcagtgtttattctatcatgggaggaagcacagatggtttaagacagaaacaagttgacaagctttcatcatcttttgggaatcttgatccctttggcacaggacagccccttcctccgttacaaattccacagcagactgctcagcatagtatagtgctgcctctgaagaagccgcccaagtggattcgaaggcctgttggtgcttctttttcatttggaggcaaactggttacgtttgagaatgtcagaatgccttctcatcagggagctgagcagcagcagcagcagcaccatgtgttcattagtcaggttgtaacagaaaaggagttcctcagccgatcagaccaacttcagcaggctgtgcagtcacaaggatttatcaattattgccaaaaaaaaattgatgcttctcagactgaatttgagaaaaatgtgtggtcctttttgaaggtaaactttgaggatgattctcgtggaaaataccttgaacttctaggatacagaaaagaagatctaggaaagaagattgctttggccttgaacaaagtggatggagccaatgtggctcttaaagactctgaccaagtagcacagagtgatggggaggagagccctgctgctgaagagcagctcttgggagagcacattaaagaggaaaaagaagaatctgaatttctaccctcatctggaggaacatttaatatctctgtcagtggggacattgatggtttaattactcaggctttgctgacgggcaattttgagagtgctgttgacctttgtttacatgataaccgcatggccgatgccattatattggccatagcaggtggacaagaactcttggctcgaacccagaaaaaatacttcgcaaaatcccaaagcaaaattaccaggctcatcactgcagtggtgatgaagaactggaaagagattgttgagtcttgtgatcttaaaaattggagagaggctttagctgcagtattgacttatgcaaagccggatgaattttcagccctttgtgatcttttgggaaccaggcttgaaaatgaaggagatagcctcctgcagactcaagcatgtctctgctatatttgtgcagggaatgtagagaaattagttgcatgttggactaaagctcaagatggaagccaccctttgtcacttcaggatctgattgagaaagttgtcatcctgcgaaaagctgtgcaactcactcaagccatggacactagtactgtaggagttctcttggctgcgaagatgagtcagtatgccaatttgttggcagctcagggcagtattgctgcagccttggcttttcttcctgacaacaccaaccagccaaatatcatgcagcttcgtgacagactttgtagagcacaaggagagcctgtagcaggacatgaatcacctaaaattccgtacgagaaacagcagctccccaagggcaggcctggaccagttgctggccaccaccagatgccaagagttcaaactcaacaatattatccccatggagaaaatcctccacctccgggtttcataatgcatggaaatgttaatccaaatgctgctggtcagcttcccacatctccaggtcatatgcacacccaggtaccaccttatccacagccacagccttatcaaccagcccagccgtatcccttcggaacaggggggtcagcaatgtatcgacctcagcagcctgttgctcctcctacttcaaacgcttaccctaacaccccttacatatcttctgcttcttcctatactgggcagtctcagctgtacgcagcacagcaccaggcctcttcacctacctccagccctgctacttctttccctcctcccccttcctctggagcatccttccagcatggcggaccaggagctccaccatcatcttcagcttatgcactgcctcctggaacaacaggtacactgcctgctgccagtgagctgcctgcgtcccaaagaacaggtcctcagaatggttggaatgaccctccagctttgaacagagtacccaaaaagaagaagatgcctgaaaacttcatgcctcctgttcccatcacatcaccaatcatgaacccgttgggtgacccccagtcacaaatgctgcagcaacagccttcagctccagtaccactgtcaagccagtcttcattcccacagccacatcttccaggtggccagcccttccatggcgtacagcaacctcttggtcaaacaggcatgccaccatctttttcaaagcccaatattgaaggtgccccaggggctcctattggaaataccttccagcatgtgcagtctttgccaacaaaaaaaattaccaagaaacctattccagatgagcacctcattctaaagaccacatttgaggatcttattcagcgctgcctttcttcagcaacagaccctcaaaccaagaggaagctagatgatgccagcaaacgtttggagtttctgtatgataaacttagggaacagacactttcaccaacaatcaccagtggtttacacaacattgcaaggagcattgaaactcgaaactactcagaaggattgaccatgcatacccacatagttagcaccagcaacttcagtgagacctctgctttcatgccagttctcaaagttgttctcacccaggccaataagctgggtgtctaaaaggacagcttctcttccactcaatattgccatttttccaaagaaacatgttaaaaaaaaaaaaaaaaa

SEQ ID NO: 717 - protein, 1220 aa, Homo sapiens
  ref <308>: DATABASE ACCESSION NUMBER: SWISS-Prot / BAA74928
  ref <309>: DATABASE ENTRY DATE: 2002-10-01
MKLKEVDRTAMQAWSPAQNHPIYLATGTSAQQLDATFSTNASLEIFELDLSDPSLDMKSCATFSSSHRYHKLIWGPYKMDSKGDVSGVLIAGGENGNIILYDPSKIIAGDKEVVIAQNDKHTGPVRALDVNIFQTNLVASGANESEIYIWDLNNFATPMTPGAKTQPPEDISCIAWNRQVQHILASASPSGRATVWDLRKNEPIIKVSDHSNRMHCSGLAWHPDVATQMVLASEDDRLPVIQMWDLRFASSPLRVLENHARGILAIAWSMADPELLLSCGKDAKILCSNPNTGEVLYELPTNTQWCFDIQWCPRNPAVLSAASFDGRISVYSIMGGSTDGLRQKQVDKLSSSFGNLDPFGTGQPLPPLQIPQQTAQHSIVLPLKKPPKWIRRPVGASFSFGGKLVTFENVRMPSHQGAEQQQQQHHVFISQVVTEKEFLSRSDQLQQAVQSQGFINYCQKKIDASQTEFEKNVWSFLKVNFEDDSRGKYLELLGYRKEDLGKKIALALNKVDGANVALKDSDQVAQSDGEESPAAEEQLLGEHIKEEKEESEFLPSSGGTFNISVSGDIDGLITQALLTGNFESAVDLCLHDNRMADAIILAIAGGQELLARTQKKYFAKSQSKITRLITAVVMKNWKEIVESCDLKNWREALAAVLTYAKPDEFSALCDLLGTRLENEGDSLLQTQACLCYICAGNVEKLVACWTKAQDGSHPLSLQDLIEKVVILRKAVQLTQAMDTSTVGVLLAAKMSQYANLLAAQGSIAAALAFLPDNTNQPNIMQLRDRLCRAQGEPVAGHESPKIPYEKQQLPKGRPGPVAGHHQMPRVQTQQYYPHGENPPPPGFIMHGNVNPNAAGQLPTSPGHMHTQVPPYPQPQPYQPAQPYPFGTGGSAMYRPQQPVAPPTSNAYPNTPYISSASSYTGQSQLYAAQHQASSPTSSPATSFPPPPSSGASFQHGGPGAPPSSSAYALPPGTTGTLPAASELPASQRTGPQNGWNDPPALNRVPKKKKMPENFMPPVPITSPIMNPLGDPQSQMLQQQPSAPVPLSSQSSFPQPHLPGGQPFHGVQQPLGQTGMPPSFSKPNIEGAPGAPIGNTFQHVQSLPTKKITKKPIPDEHLILKTTFEDLIQRCLSSATDPQTKRKLDDASKRLEFLYDKLREQTLSPTITSGLHNIARSIETRNYSEGLTMHTHIVSTSNFSETSAFMPVLKVVLTQANKLGV

SEQ ID NO: 718 - DNA, 4422 bp, Rattus norvegicus; identical to SEQ ID NO: 714
  ref <308>: DATABASE ACCESSION NUMBER: EMBL / AF034582
  ref <309>: DATABASE ENTRY DATE: 2000-03-03

SEQ ID NO: 719 - protein, 1249 aa, Rattus norvegicus; identical to SEQ ID NO: 715
  ref <308>: DATABASE ACCESSION NUMBER: SWISS-Prot / AAD01990
  ref <309>: DATABASE ENTRY DATE: 2002-10-01

SEQ ID NO: 720 - DNA, 4110 bp, Homo sapiens; identical to SEQ ID NO: 716
  ref <308>: DATABASE ACCESSION NUMBER: EMBL / AB020712
  ref <309>: DATABASE ENTRY DATE: 1999-06-16

SEQ ID NO: 721 - protein, 1220 aa, Homo sapiens; identical to SEQ ID NO: 717
  ref <308>: DATABASE ACCESSION NUMBER: SWISS-Prot / BAA74928
  ref <309>: DATABASE ENTRY DATE: 2002-10-01

SEQ ID NO: 722 - DNA, 2896 bp, Rattus norvegicus
  misc_feature (1)..(2896): n=a, c, g or t
  ref <308>: DATABASE ACCESSION NUMBER: EMBL / AF034899
  ref <309>: DATABASE ENTRY DATE: 1998-05-27
cgcttctatctgtctggaagaccctttgagatgtagacctctatgtgtctacaagacaggacttgaaaccatccttctcctttcccggggtcatttgtgaaaatagaactttcgggtttgaatcacaaatagaattccactacattgatcttggtacatcctgaggatgaactcgacatctgatggagacctaaaagcaatagaaaatttaggcagattttgcctctttcaacataatttcaaataataaggagggaaatttgtactgatttcaaatttttcacttcattttgtgtgatttagtatttttttaatatctcaacaaatagcatttgtattagataatagttttttaaagtagagacctggctgatgttccaatttttatttgactctgaactttggaaggtatgaaatacacttatgacaagctttattttttaatttgacctacaaatactaaaagtataaaatgaaaaaatatgcacaggctgttctgttgccagtatttnctgtcatcagttcctccacaaggactgcctccatttgcccctgtctcatgggtgctcatcaatattgcaaacgtttgcattgggctgctggagataattgggataaggctatatacaaaggacatttttttttaagttaccagttaagccctactcagatattcctttttatggctacatttctcccttgacttctatatctatgtgactgaggaaagtgtgtagctccttccagatgggaaaatatacaacaggtatacacagacctgtataattaactgacaaaagtctataaactccaaaaaaattatgtcagagaagaagtcaggactcaataagaaaatattgagttgaaaatggtatgtacaaaatgagagcatgtcgaaagagagagagagagagagagagagagagagagagagagagagagagagagaatggttaaagagagcaagtggtaacaggaatgaggaaacaaaatgaatgtgaaaggaccttctcatcctctcattgacagttgactaaagggaacctgaatggacaactgaccatcactttacctgttgtcatcgttagcacaatatctctctgtaacctaggctgtcatttaactcacagcgaccttctgcctctgctacacaatgcttgggagtaaaggatacaccagattccctgttaatattttgtcatttaatggttgacaagtaagaatatactgtaaaaagaatcatctagtagtctgaatagggaaagaattgatttaaaaataatttcgagttgagtgttgatttcggaattttttttttaaaaatttaaaaattcttcaattaacaaatttcgaatttacccaaaactctagaattagtaaaatgatgtgctatagaaatagttcagtagttggtagacttgttgttcagatatgaggaatggagtttggacccatagtacccaggaaagactgagccaaccaacatttatataattccaacactacaggtatgaaaggcaaaagaaggtggattcctgatgcagtctagcaaaaacaagtaccttcaggtcaagtaactgacgctgtttcaggaaataaggcagacactatagggtcttgaaatcacttgaaattgatatttgaacattttaagcacatgtatgtccatatattgattatacacacacacacacacacacgagagggagggagagaaacttggagagaaagagacagatagagagatagtctgaataatttccctaatctgcaagaattcttgtaannattttgtcctttctttcaggagatgactgtcaactgttctctgtggcaggagaatagtttgtctgtcaaacgttttgcatttgccaagttctctgaggtccctggagaatgcttcctcctgttcaccctcatccttctcatgttcttagtatcactaacaggaaatgctctcatagcccttgctatttgtaccagtccatctctacacacccccatgtacttctttctggccaacttgtctctcctggagattggctatacttgctctgtcatacccaagatgctgcagagtcttgtgagtgaggcccgagagatctttcaggtgggatgtgccacacagatgtttttcttcatattctttggtataactgagtgctgcctattggcagccatggcctttgaccgctatatggctatatgttccccactccactatgcaacccgaatgagtcgtgaggtatgtgcccacttggcaattgtttcatgggtgatgggatgcatagtaggtctgggacagaccaattttattttctccttgaacttctgtggaccctgtgagatagaccacttcttctgtgatcttccacctctcctggcacttgcctgtggtgatacatcccaaattgaggctgccatctttgtggtagttgtcctctgcatatctagcccttttttgctgatcatttattcttatgtcagaattctcgttgcagtgctggtgatgccttcacctgaggggcgccacaaagccctttcaacctgttcctcccacctacttgtagtcacactcttttatggctcaggatctgttacctatttgaggcctaagtctagccactcaccaggaatggacaaactcttggccctcttctacacagcagtgacatccatgttgaaccctatcatctatagtttaaggaacaaggatgtcaaggcagcactgagaagaattctggccctgaaaaaaattctgtcaataaataagtaacagaatcatgcaaagctggtattaataaaaatgtgcaaagagccagattaaacaaagaaaaattggtacattcttttgtctgccttatattgaatctctttgtaatttcgaaggtacctc

SEQ ID NO: 723 - protein, 322 aa, Rattus norvegicus
  misc_feature (1)..(322): Xaa=Unknown amino acid
MTVNCSLWQENSLSVKRFAFAKFSEVPGECFLLFTLILLMFLVSLTGNALIALAICTSPSLHTPMYFFLANLSLLEIGYTCSVIPKMLQSLVSEAREIFQVGCATQMFFFIFFGITECCLLAAMAFDRYMAICSPLHYATRMSREVCAHLAIVSWVMGCIVGLGQTNFIFSLNFCGPCEIDHFFCDLPPLLALACGDTSQIEAAIFVVVVLCISSPFLLIIYSYVRILVAVLVMPSPEGRHKALSTCSSHLLVVTLFYGSGSVTYLRPKSSHSPGMDKLLALFYTAVTSMLNPIIYSLRNKDVKAALRRILALKKILSINKX

SEQ ID NO: 724 - DNA, 1990 bp, Homo sapiens
  ref <308>: DATABASE ACCESSION NUMBER: EMBL / L35475
  ref <309>: DATABASE ENTRY DATE: 1999-07-02
tttacagagttctataaaattcattcaaccaatagagcaataattgagcctacagagacaacttatcagaaaattcattcaatataccttacgagatcatccaatagataagagacaactctagaacagcattcagaacatagtggcactcaataaatttcccctgaatgaatgaattaatgaattagtgcatattttaatcagcctcctttgccctcacccaggaagtcagaggcaccagtgtgagtatccatctgctgtccagtacattcatggattcctcactctcactagacaatgtttgaccaggaagaacagggaatgagaaggagctgctgggtggtgatgagccttggaaagggaggctgggcgagcagagacagaagagaaacacctacctgctgtgacctcacaaacacccaggctgagttttgataagacaggttgaatcacactggggtgacagcctcatccctccaggtacaaacaagaacaggccatggataaccaaagctccacaccgggcttcctccttctgggcttctctgaacacccagggctgggaaggactctcttcgtggatgtcatcacttcctacctcctaaccctagtgggcaacacactcatcatcctgctgtctgcgctggacaccaagctccactctccaatgtactttttcctctccaacctctccttcttggacctctgtttcaccacgagttgtgttccccaaatgctggccaacctctggggcccaaagaagaccatcagcttcctggactgctctgtccagatcttcatcttcctgtccctggggacaactgagtgcatcctcatgaaagtgatggcttttgatcgctacgtggctgtctgccagcccctccactatgccaccatcatccacccccgcctgtgctggcagctggcatctgtggcctgggtcattgggctagtggggtcagtggtccagacaccatccaccctgcacctgcccttctgccccgatcggcaggtggatgattttgtctgtgaggtcccagctctaattcgactctcctgtgaagacacctcctacaatgagatccaggtggctgttgccagtgtcttcatcttggttgtgcctctcagcctcatccttgtctcttacggagccattacctgggcagtgctgaggattaactccgccacagcatggagaaaggcctttgggacctgctcctcccatctcactgtggtcaccctcttctacagctcagtcattgctgtctacctccagcccaaaaatccgtatgcccaagggaggggcaagttctttggtctcttctatgcagtgggcactccttcacttaaccctctcgtatacaccctgaggaacaaggagataaagcgagcactcaggaggttactagggaaggaaagagactccagggaaagctggagagctgcttaatatactttcgaaagtaagaagagtttcttcaagatttatgaacatgttaagttttccagactactacccttcccacatacaacctggagccactgtgggggggtcacagggtgggtatgttatctatgagagggagaatgagaaagagagggacagagagataaaagaatttgggtgagaggagataggtagctccataaggcacacaaattcagatattatcattcctatcactgtccatccttaatatttctatcctccattctgtcctatttactgtcatcactcctatagattccctaactccaccatgcctatctctggttatataattgctctccaatggtcatgtcagtgtaggggaactactccatcatagcattctggacacctcgcatgtatctacgtaggtcatgtcagcacaggcttgaaggaacagctactctgagatttaggaagaatgcttctgggatcccccctcggcaatatgagaggatcgggaggccccttcaggaacctgcctcaaatgccaccttctca

SEQ ID NO: 725 - protein, 316 aa, Homo sapiens
  ref <308>: DATABASE ACCESSION NUMBER: SWISS-Prot / Q15062
  ref <309>: DATABASE ENTRY DATE: 2001-10-16
MDNQSSTPGFLLLGFSEHPGLERTLFVVVFTSYLLTLVGNTLIILLSALDPKLHSPMYFFLSNLSFLDLCFTTSCVPQMLVNLWGPKKTISFLDCSVQIFIFLSLGTTECILLTVMAFDRYVAVCQPLHYATIIHPRLCWQLASVAWVIGLVESVVQTPSTLHLPFCPDRQVDDFVCEVPALIRLSCEDTSYNEIQVAVASVFILVVPLSLILVSYGAITWAVLRINSAKGRRKAFGTCSSHLTVVTLFYSSVIAVYLQPKNPYAQERGKFFGLFYAVGTPSLNPLIYTLRNKEVTRAFRRLLGKERDSRESWRAA

SEQ ID NO: 726 - DNA, 2896 bp, Rattus norvegicus; identical to SEQ ID NO: 722
  misc_feature (1)..(2896): n=a, c, g or t
  ref <308>: DATABASE ACCESSION NUMBER: EMBL / AF034899
  ref <309>: DATABASE ENTRY DATE: 1998-05-27

SEQ ID NO: 727 - protein, 322 aa, Rattus norvegicus; identical to SEQ ID NO: 723
  misc_feature (1)..(322): Xaa=Unknown amino acid

SEQ ID NO: 728 - DNA, 1990 bp, Homo sapiens; identical to SEQ ID NO: 724
  ref <308>: DATABASE ACCESSION NUMBER: EMBL / L35475
  ref <309>: DATABASE ENTRY DATE: 1999-07-02

SEQ ID NO: 729 - protein, 316 aa, Homo sapiens; identical to SEQ ID NO: 725
  ref <308>: DATABASE ACCESSION NUMBER: SWISS-Prot / Q15062
  ref <309>: DATABASE ENTRY DATE: 2001-10-16

SEQ ID NO: 730 - DNA, 966 bp, Rattus norvegicus
  ref <308>: DATABASE ACCESSION NUMBER: EMBL / AF034900
  ref <309>: DATABASE ENTRY DATE: 1998-05-27
atgagtgtcaactgttcgctgtggcaggagaatagtttgtctgtcaaacgctttgcatttgccaagttctctgaggtccctggagaatgcttcctcctgttcaccctcatccttctcatgttcttagtatcactaacaggaaatgctctcatagcccttgctgtttgtaccagtccatctctacacacccccatgtacttctttctggccaacttgtctctcctggagattggctatacttgctctgtcatacccaagatgctgcagagccttgtgagtgaggccagagagatctctagggagggatgtgccacacagatgtttttcttcacattttttggcataactgagtgctgcctattggcagccatggcctttgaccgctgcatgggcatatgctccccactccactatgcaacccgaatgagtcgtgaggtatgtgcccatttggcaattgtttcatggggaatgggatgcatagtaggtctgggacagaccaattttattttctccttgaacttctgtggaccttgtgagatagaccacttcttctgtgaccttccacctctcctggcacttgcctgtggtgatacatcccaaaacgaggctgccatctttgtggcagcaatcctctgtatatctagtccatttttggtgatcctttattcttatgtcagaattctcgttgcagtgctggtgatgccttcacctgaggggcgccataaagctctttccacctgttcctcacacctacttgtagtcacactcttttatggctctgtgtcctttacctatttgaggcccaagtctagccactcaccaggaatggacaaactcttggccctcttctacacagcagtgacatccatgctgaaccctatcatctacagtctaaggaacaaggaagtcaaggcagcactgagaagaactctcgacctgaaaaaaattatgtcaattaataggtaa

SEQ ID NO: 731 - protein, 321 aa, Rattus norvegicus
  ref <308>: DATABASE ACCESSION NUMBER: SWISS-Prot / AAC17224
  ref <309>: DATABASE ENTRY DATE: 2003-02-01
MSVNCSLWQENSLSVKRFAFAKFSEVPGECFLLFTLILLMFLVSLTGNALIALAVCTSPSLHTPMYFFLANLSLLEIGYTCSVIPKMLQSLVSEAREISREGCATQMFFFTFFGITECCLLAAMAFDRCMGICSPLHYATRMSREVCAHLAIVSWGMGCIVGLGQTNFIFSLNFCGPCEIDHFFCDLPPLLALACGDTSQNEAAIFVAAILCISSPFLVILYSYVRILVAVLVMPSPEGRHKALSTCSSHLLVVTLFYGSVSFTYLRPKSSHSPGMDKLLALFYTAVTSMLNPIIYSLRNKEVKAALRRTLDLKKIMSINR

SEQ ID NO: 732 - DNA, 921 bp, Homo sapiens
  ref <308>: DATABASE ACCESSION NUMBER: Refseq / NM_013941
  ref <309>: DATABASE ENTRY DATE: 2000-11-02
atggtgactgagtttcttcttctcggcttctcccacctggccgacctccagggcttgctcttctctgtctttctcactatctacctgctgaccgtggcaggcaatttcctcattgtggtgctggtctccactgatgctgccctccagtcccctatgtacttcttcctgcgcaccctctcggccttggagattggctatacgtctgtcacggtccccctgctacttcaccacctccttactggccggcgccacatctctcgctctggatgtgctctccagatgttcttcttcctcttctttggcgccacggagtgctgcctcctggcagccatggcctatgaccgctatgcagccatctgtgaacccctccgctacccactgctgctgagccaccgggtgtgtctacagctagctgggtcggcgtgggcctgtggggtgctggtggggctgggccacacccctttcatcttctctttgcccttctgcggccccaataccatcccgcagttcttctgtgagatccagcctgtcctgcagctggtatgtggagacacctcgcttaatgaactgcagattatcctggcaacagccctcctcatcctctgcccctttggcctcatcctgggctcctacgggcgtatcctcgttaccatcttccggatcccatctgttgcgggccgccgcaaggccttctccacctgctcctcccacctgatcgtggtctccctcttctatggcaccgcactctttatctatattcgccctaaggccagctacgatccggccactgaccctctggtgtccctcttctatgctgtggtcacccccatcctcaaccccatcatctacagcctgcggaacacagaggtcaaagctgccctaaagagaaccatccagaaaacggtgcctatggagatttga

SEQ ID NO: 733 - protein, 306 aa, Homo sapiens
  ref <308>: DATABASE ACCESSION NUMBER: Refseq / NP_039229
  ref <309>: DATABASE ENTRY DATE: 2000-11-02
MVTEFLLLGFSHLADLQGLLFSVFLTIYLLTVAGNFLIVVLVSTDAALQSPMYFFLRTLSALEIGYTSVTVPLLLHHLLTGRRHISRSGCALQMFFFLFFGATECCLLAAMAYDRYAAICEPLRYPLLLSHRVCLQLAGSAWACGVLVGLGHTPFIFSLPFCGPNTIPQFFCEIQPVLQLVCGDTSLNELQIILATALLILCPFGLILGSYGRILVTIFRIPSVAGRRKAFSTCSSHLIVVSLFYGTALFIYIRPKASYDPATDPLVSLFYAVVTPILNPIIYSLRNTEVKAALKRTIQKTVPMEI

SEQ ID NO: 734 - DNA, 2890 bp, Rattus norvegicus
  ref <308>: DATABASE ACCESSION NUMBER: EMBL / AF036255
  ref <309>: DATABASE ENTRY DATE: 2000-03-03
cgcggcggcggcgccggcgcggggacagacggaggcgcgggacgtggggcggcgccgcgggcagggccgggcggacgagcgctggcagcgggggcagcgctgcgggccgctccgagtggctgcagtccgggccttgcactcccatcccgctcccacgccgtgagtgcgcggcgcgggccccaagggctggtgttagtggcaggaaccatctgtggtcaccatggcaaagagggaggacagccctggcccggaggtgcagccaatggacaagcagtttctggtatgcagtatctgcctggatcggtaccggtgccccaaagttctgccttgtctacacaccttctgcgaaagatgtctccagaactacatccctcctcagagcctgacactctcgtgtccagtatgccggcagacatccatcctcccagaacagggtgtctcagccctacaaaacaacttcttcatcagcagcctcatggaggccatgcagcaggcacctgatggggcccacgaccctgaagacccccaccccctcagcgcagtggctggccgccctctctcctgccccaaccatgaaggcaagacgatggagttttactgtgaggcctgtgagactgccatgtgtggtgagtgccgcgcaggggagcaccgtgaacacggcacagtgctgttgcgggacgtggtggagcagcacaaggcagctctacagcgccagcttgaagctgtgcgtggccgattgccacagctgtctgcagctatcgccttggttgggggcatcagccagcagctgcaagagcgcaaggcagaggccctggcccagataagtgcagcctttgaggacctggagcaagctctgcagcagcgcaagcaggctctggtcagcgacttggagagcatttgtggggccaagcagaaggtgttgcagacacagttagacacactgcgccagggtcaggaacacattggcagtagctgcagctttgcagagcaggcactgagactgggctctgcccctgaggttttgctagtaagaaagcacatgcgagagaggctggctgctctggcagctcaggccttcccagaaaggccccatgagaatgcacagctggaactggtccttgaagtagatgggttgcggagatcggtgctcaatctgggtgcactgctcaccaccagtgctgctgcacacgagacagtggccaccggcgagggcctgcgccaggcactggttggccagcctgcctcactcactgtcaccaccaaagacaaagatgggcggctggtgcgcacgggcagcgcagagctgtgtgcagagatcactggccccgatggcatgcgccttgcggtaccggtggtggaccacaaaaatggcacatatgagctggtgtacacagcacgtacagaaggcgacctgctcctctcagtgctgctctatggacagccggtgcgtggcagccctttccgtgtgcgtgccctgagacccggagacttgccaccttccccagatgatgtgaagcgccgggtcaagtctcccggtggtcctggcagtcatgtgcgccagaaggcagtgcgtaggccgagctccatgtacagcaccggtggcaaacggaaagacaatccaattgtggatgaactcgtctttcgtgttggcagtcgtggaagggagaaaggtgaattcaccaatttacacccgctgtccgctgctagcagtggccgaatagtggtagcagacagcaacaaccaatgtattcaggttttctccaatgagggccagttcaagttccgatttggagtccgtgggcgctcgcctgggcaactacagcgtcctacgggtgtggcagtggacaccaatggagacattattgtggcagactatgacaaccgttgggtcagcatcttctctcctgagggcaagttcaagaccaaaattggagctggccgcctcatggggcccaagggagtggctgtggaccggaatgggcatatcattgtggtggataacaagtcttgctgtgtcttcaccttccagcccaatggcaagcttgttgggcgttttggaggccgtggggccactgaccgccacttcgcagggccccactttgtggctgtgaacaacaagaatgagattgtagtaacggatttccacaaccattcagtgaaggtgtacagtgctgatggagagttcctcttcaaatttggctcacatggcgagggcaatggacagttcaatgcccccacgggagtagctgtggattccaatggaaacatcatcgtggctgactggggcaatagtcgcatacaggtattcgacagctctggttccttcctgtcctatatcaacacgtctgcagagccactgtatggcccacagggcttggcattgacctcggatggccacgtagtagtggctgatgctggcaaccactgctttaaggcctatcgatacctccagtagctgcacaagggccctgcttggctcatggagggacggacataggggtgattggacaagagggtctggctaagaggtgggccagacccggcagcactgaatgtgggcgtgggcatggatgtgcccaatgcccttcccttcctccccaaccccacggttgcactttatttattcggttcttgctttggtgactgggtgggcctggactggtcccaaggatgtgtgcagagcttcaccctaactcctttacacaccctcccttacaccctcagtctgctctctgacccccagcctgggccagaacagcctcttacttcagaagtccctctggttggctccctaacaccccatacacactgacagagacagcaataccccaccccatattaaataaatgtgttcgccaaggtgggaattcctggctgatgcggtctcaaa

SEQ ID NO: 735 - protein, 744 aa, Rattus norvegicus
  ref <308>: DATABASE ACCESSION NUMBER: SWISS-Prot / O70277
  ref <309>: DATABASE ENTRY DATE: 2002-06-15
MAKREDSPGPEVQPMDKQFLVCSICLDRYRCPKVLPCLHTFCERCLQNYIPPQSLTLSCPVCRQTSILPEQGVSALQNNFFISSLMEAMQQAPDGAHDPEDPHPLSAVAGRPLSCPNHEGKTMEFYCEACETAMCGECRAGEHREHGTVLLRDVVEQHKAALQRQLEAVRGRLPQLSAAIALVGGISQQLQERKAEALAQISAAFEDLEQALQQRKQALVSDLESICGAKQKVLQTQLDTLRQGQEHIGSSCSFAEQALRLGSAPEVLLVRKHMRERLAALAAQAFPERPHENAQLELVLEVDGLRRSVLNLGALLTTSAAAHETVATGEGLRQALVGQPASLTVTTKDKDGRLVRTGSAELCAEITGPDGMRLAVPVVDHKNGTYELVYTARTEGDLLLSVLLYGQPVRGSPFRVRALRPGDLPPSPDDVKRRVKSPGGPGSHVRQKAVRRPSSMYSTGGKRKDNPIVDELVFRVGSRGREKGEFTNLHPLSAASSGRIVVADSNNQCIQVFSNEGQFKFRFGVRGRSPGQLQRPTGVAVDTNGDIIVADYDNRWVSIFSPEGKFKTKIGAGRLMGPKGVAVDRNGHIIVVDNKSCCVFTFQPNGKLVGRFGGRGATDRHFAGPHFVAVNNKNEIVVTDFHNHSVKVYSADGEFLFKFGSHGEGNGQFNAPTGVAVDSNGNIIVADWGNSRIQVFDSSGSFLSYINTSAEPLYGPQGLALTSDGHVVVADAGNHCFKAYRYLQ

SEQ ID NO: 736 - DNA, 2227 bp, Homo sapiens
  ref <308>: DATABASE ACCESSION NUMBER: EMBL / AF220021
  ref <309>: DATABASE ENTRY DATE: 2001-05-21
atggcaaagagggaggacagccctggcccagaggtccagccaatggacaagcagttcttggtatgcagcatctgcctggatcggtaccagtgccccaaggttcttccttgcctgcacaccttctgtgagagatgtctccaaaactatatccctgcccagagcctgacgctatcctgtccagtatgccggcagacgtccatcctcccagagcagggcgtctcggcactgcagaacaacttcttcatcagcagcctcatggaggcaatgcagcaggcacctgatggggcccacgacccggaagacccccaccccctcagtgtagtggctggccgccctttctcctgccccaaccatgaaggcaagacgatggagttttactgtgaggcctgtgagacggccatgtgtggtgagtgccgcgccggggagcatcgtgagcagcacaaggcggccctgcagcgccagctcgaggctgtgcgtggccgattgccacagctgtccgcagcaattgccttagtcgggggcatcagccagcagctgcaggagcgcaaggcagaggccctggcccagatcagtgcagcgttcgaggacctggagcaagcactgcagcagcgcaagcaggctctggtcagcgacctggagaccatttgtggggccaaacagaaggtgttgcaaacccagctggacacactgcgccagggtcaggaacacatcggcagtagctgcagctttgcagagcaggcactgcgcctgggctcggccccggaggtgttgctggtgcgcaagcacatgcgagagcggctggctgcattggcggcacaggccttcccggagcggccacatgagaatgcacagctggaactggtccttgaggtggacggtctgcggcgatcggtgctcaatctgggtgcactgctcaccacgagcgccactgcacacgaaacggtggccacgggagagggcctgcgccaggcgctagtgggccagcctgcctcgctcactgtcactgccaaagacaaggacgggcggttggtgcgcacaggcagcgctgagctgcgtgcagagatcaccggcccggacggcacgcgccttccggtgccagtggtggaccacaagaatggcacatatgagctagtgtacacagcgcgcacggaaggcgagctgctcctctcggtgctgctctacggacagccagtgcgcggcagccccttccgcgtgcgtgccctgcgtccgggggacctgccaccttccccggacgatgtgaagcgccgtgtcaagtcccctggcggccccggcagccatgtgcgccagaaggcagtgcgtaggcccagctccatgtacagcacaggcggcaaacgaaaggacaacccaattgaggatgagctcgtcttccgtgttggcagtcgtggaagggagaaaggtgaattcaccaatttacaaggtgtgtccgcagccagcagcggccgcatcgtggtagcagacagcaacaaccagtgtattcaggttttctccaatgagggccagttcaagttccgttttggggtccgaggacgctcacctgggcagctgcagcgccccacaggtgtggcagtggacaccaatggagacataattgtggcagactatgacaaccgttgggtcagcatcttctcccctgagggcaagttcaagaccaagattggagctggccgcctcatgggccccaagggagtggccgtagaccggaatggacatatcattgtggtcgacaacaagtcttgctgcgtctttaccttccagcccaatggcaaactggttggccgttttgggggccgtggggccactgaccgccactttgcagggccccattttgtggctgtaagcaacaagaatgaagttgtagtaacggacttccataaccattcagagaaggtgtacagtgccgatggagagttcctcttcaagtttggctcccatggcgagggcaatgggcagttcaatgcccccacaggagtagctgtggactccaatggaaacatcattgtggctgactggggcaacagccgcatccaggtattcgacagctctggctccttcctgtcctatatcaacacatctgcagaaccactgtatggtccacagggcctggcactgacctcggatggccatgtggtggtggctgatgctggcaaccactgctttaaagcctatcgctacctccagtagctgtacagaggccctgcctggcttg

SEQ ID NO: 737 - protein, 744 aa, Homo sapiens
  ref <308>: DATABASE ACCESSION NUMBER: SWISS-Prot / O75382
  ref <309>: DATABASE ENTRY DATE: 2002-06-15
MAKREDSPGPEVQPMDKQFLVCSICLDRYQCPKVLPCLHTFCERCLQNYIPAQSLTLSCPVCRQTSILPEQGVSALQNNFFISSLMEAMQQAPDGAHDPEDPHPLSVVAGRPFSCPNHEGKTMEFYCEACETAMCGECRAGEHREHGTVLLRDVVEQHKAALQRQLEAVRGRLPQLSAAIALVGGISQQLQERKAEALAQISAAFEDLEQALQQRKQALVSDLETICGAKQKVLQTQLDTLRQGQEHIGSSCSFAEQALRLGSAPEVLLVRKHMRERLAALAAQAFPERPHENAQLELVLEVDGLRRSVLNLGALLTTSATAHETVATGEGLRQALVGQPASLTVTAKDKDGRLVRTGSAELRAEITGPDGTRLPVPVVDHKNGTYELVYTARTEGELLLSVLLYGQPVRGSPFRVRALRPGDLPPSPDDVKRRVKSPGGPGSHVRQKAVRRPSSMYSTGGKRKDNPIEDELVFRVGSRGREKGEFTNLQGVSAASSGRIVVADSNNQCIQVFSNEGQFKFRFGVRGRSPGQLQRPTGVAVDTNGDIIVADYDNRWVSIFSPEGKFKTKIGAGRLMGPKGVAVDRNGHIIVVDNKSCCVFTFQPNGKLVGRFGGRGATDRHFAGPHFVAVSNKNEVVVTDFHNHSEKVYSADGEFLFKFGSHGEGNGQFNAPTGVAVDSNGNIIVADWGNSRIQVFDSSGSFLSYINTSAEPLYGPQGLALTSDGHVVVADAGNHCFKAYRYLQ

SEQ ID NO: 738 - DNA, 1039 bp, Rattus norvegicus
  ref <308>: DATABASE ACCESSION NUMBER: EMBL / AF036335
  ref <309>: DATABASE ENTRY DATE: 1999-01-20
gaaacgcctcctcgttttgctcagcatggcacatttgagtatgaatattctcaacgatggaagtctttggatgaaatggaaaaacagcaaagggaacaagttgaaaaaaacatgaaggatgcaaaagacaagttggaaagtgaaatggaagatgcctaccatgaacaccaagcaaatcttttgcgccaagatctgatgagacgccaggaagaattaaggcgcatggaggaacttcacagtcaagaaatgcagaaacgtaaagaaatgcagttgaggcaagaggaggaacggcgtacaagagaggaagagatgatgattcgccaacgtgagatggaagaacaaatgagacgccaacgagaagaaagctacagcaggatgggctacatggatcccaagagaaagagacatgagaatgggtggtggtggaacaatgaacatgggagatccctatggttcaggaggccagaaatttccaccgctaggtggtggtggtggcataggttatgaagctaatcctggagttccaccagcaaccatgagtggttccatgatgggaagcgacatgcgtactgagcgctttgggcagggaggtgcgggtcctgtgggtggacagggtcctagaggaatggggcctggaacgccagcaggatatggtagagggagagaagagtatgaagggccaaataaaaaaccccgattttagatacttaggctttcattccagtttggttttgtcttcttgtttagataccacttaaattcttggcattttagtaagaaagctacctttttatggatgttagcagtttattgacctgatatttgtaaatggcctgtttgggcaggtaaaattatgtaacgcagtgttcaaaacaggagaaaaattttttcatttactttttttttaactgtataatgtttctcaagttaatggcagtgtaccttgtgccactgaatttccaaagtgtaccattttttttttactgtgcttcaaataaatagaaaaaaatagttatgaacaaaaaaaaaaaaaaaaaaa

SEQ ID NO: 739 - protein, 168 aa, Rattus norvegicus
  ref <308>: DATABASE ACCESSION NUMBER: SWISS-Prot / AAD05362
  ref <309>: DATABASE ENTRY DATE: 2002-10-01
ETPPRFAQHGTFEYEYSQRWKSLDEMEKQQREQVEKNMKDAKDKLESEMEDAYHEHQANLLRQDLMRRQEELRRMEELHSQEMQKRKEMQLRQEEERRTREEEMMIRQREMEEQMRRQREESYSRMGYMDPKRKRHENGWWWNNEHGRSLWFRRPEISTARWWWWHRL

SEQ ID NO: 740 - protein, 707 aa, Homo sapiens
  ref <308>: DATABASE ACCESSION NUMBER: SWISS-Prot / P23246
  ref <309>: DATABASE ENTRY DATE: 2002-06-15
MSRDRFRSRGGGGGGFHRRGGGGGRGGLHDFRSPPPGMGLNQNRGPMGPGPGQSGPKPPIPPPPPHQQQQQPPPQQPPPQQPPPHQPPPHPQPHQQQQPPPPPQDSSKPVVAQGPGPAPGVGSAPPASSSAPPATPPTSGAPPGSGPGPTPTPPPAVTSAPPGAPPPTPPSSGVPTTPPQAGGPPPPPAAVPGPGPGPKQGPGPGGPKGGKMPGGPKPGGGPGLSTPGGHPKPPHRGGGEPRGGRQHHPPYHQQHHQGPPPGGPGGRSEEKISDSEGFKANLSLLRRPGEKTYTQRCRLFVGNLPADITEDEFKRLFAKYGEPGEVFINKGKGFGFIKLESRALAEIAKAELDDTPMRGRQLRVRFATHAAALSVRNLSPYVSNELLEEAFSQFGPIERAVVIVDDRGRSTGKGIVEFASKPAARKAFERCSEGVFLLTTTPRPVIVEPLEQLDDEDGLPEKLAQKNPMYQKERETPPRFAQHGTFEYEYSQRWKSLDEMEKQQREQVEKNMKDAKDKLESEMEDAYHEHQANLLRQDLMRRQEELRRMEELHNQEMQKRKEMQLRQEEERRRREEEMMIRQREMEEQMRRQREESYSRMGYMDPRERDMRMGGGGAMNMGDPYGSGGQKFPPLGGGGGIGYEANPGVPPATMSGSMMGSDMRTERFGQGGAGPVGGQGPRGMGPGTPAGYGRGREEYEGPNKKPRF

SEQ ID NO: 741 - DNA, 1039 bp, Rattus norvegicus; identical to SEQ ID NO: 738
  ref <308>: DATABASE ACCESSION NUMBER: EMBL / AF036335
  ref <309>: DATABASE ENTRY DATE: 1999-01-20

SEQ ID NO: 742 - protein, 168 aa, Rattus norvegicus; identical to SEQ ID NO: 739
  ref <308>: DATABASE ACCESSION NUMBER: SWISS-Prot / AAD05362
  ref <309>: DATABASE ENTRY DATE: 2002-10-01

SEQ ID NO: 743 - protein, 707 aa, Homo sapiens; identical to SEQ ID NO: 740
  ref <308>: DATABASE ACCESSION NUMBER: SWISS-Prot / P23246
  ref <309>: DATABASE ENTRY DATE: 2002-06-15

SEQ ID NO: 744 - DNA, 1039 bp, Rattus norvegicus; identical to SEQ ID NO: 738
  ref <308>: DATABASE ACCESSION NUMBER: EMBL / AF036335
  ref <309>: DATABASE ENTRY DATE: 1999-01-20

SEQ ID NO: 745 - protein, 168 aa, Rattus norvegicus; identical to SEQ ID NO: 739
  ref <308>: DATABASE ACCESSION NUMBER: SWISS-Prot / AAD05362
  ref <309>: DATABASE ENTRY DATE: 2002-10-01

SEQ ID NO: 746 - protein, 707 aa, Homo sapiens; identical to SEQ ID NO: 740
  ref <308>: DATABASE ACCESSION NUMBER: SWISS-Prot / P23246
  ref <309>: DATABASE ENTRY DATE: 2002-06-15

SEQ ID NO: 747 - DNA, 1039 bp, Rattus norvegicus; identical to SEQ ID NO: 738
  ref <308>: DATABASE ACCESSION NUMBER: EMBL / AF036335
  ref <309>: DATABASE ENTRY DATE: 1999-01-20

SEQ ID NO: 748 - protein, 168 aa, Rattus norvegicus; identical to SEQ ID NO: 739
  ref <308>: DATABASE ACCESSION NUMBER: SWISS-Prot / AAD05362
  ref <309>: DATABASE ENTRY DATE: 2002-10-01

SEQ ID NO: 749 - protein, 707 aa, Homo sapiens; identical to SEQ ID NO: 740
  ref <308>: DATABASE ACCESSION NUMBER: SWISS-Prot / P23246
  ref <309>: DATABASE ENTRY DATE: 2002-06-15

SEQ ID NO: 750 - DNA, 1039 bp, Rattus norvegicus; identical to SEQ ID NO: 738
  ref <308>: DATABASE ACCESSION NUMBER: EMBL / AF036335
  ref <309>: DATABASE ENTRY DATE: 1999-01-20

SEQ ID NO: 751 - protein, 168 aa, Rattus norvegicus; identical to SEQ ID NO: 739
  ref <308>: DATABASE ACCESSION NUMBER: SWISS-Prot / AAD05362
  ref <309>: DATABASE ENTRY DATE: 2002-10-01

SEQ ID NO: 752 - protein, 707 aa, Homo sapiens; identical to SEQ ID NO: 740
  ref <308>: DATABASE ACCESSION NUMBER: SWISS-Prot / P23246
  ref <309>: DATABASE ENTRY DATE: 2002-06-15

SEQ ID NO: 753 - DNA, 1039 bp, Rattus norvegicus; identical to SEQ ID NO: 738
  ref <308>: DATABASE ACCESSION NUMBER: EMBL / AF036335
  ref <309>: DATABASE ENTRY DATE: 1999-01-20

SEQ ID NO: 754 - protein, 168 aa, Rattus norvegicus; identical to SEQ ID NO: 739
  ref <308>: DATABASE ACCESSION NUMBER: SWISS-Prot / AAD05362
  ref <309>: DATABASE ENTRY DATE: 2002-10-01

SEQ ID NO: 755 - protein, 707 aa, Homo sapiens; identical to SEQ ID NO: 740
  ref <308>: DATABASE ACCESSION NUMBER: SWISS-Prot / P23246
  ref <309>: DATABASE ENTRY DATE: 2002-06-15

SEQ ID NO: 756 - DNA, 639 bp, Rattus norvegicus
  ref <308>: DATABASE ACCESSION NUMBER: EMBL / AF036761
  ref <309>: DATABASE ENTRY DATE: 2001-08-16
cggctgcccctgaggctctttctcatcatcgccaacaccatggcattccagaacgatgtgtacgaatgggcccgggatcaccgcgcccaccacaagttctcagagacacacgccgaccctcacaactcccgccgtggctttttcttctctcacgtgggttggctgcttgtgcgcaaacacccggctgtcaaagagaagggcggaaagctggacatgtctgacctgaaagctgagaagctggtgatgttccagaggaggtattacaagcccggcctcctgctcatgtgcttcatcctgcccacgctggtgccctggtactgctggggtgagacgtttgtaaacagcctgtgcgtcagcaccttcttacggtacgctgtggtgctcaacgccacctggctggtgaacagcgccgcccacctctatggatatcgcccctacgacaagaacatcagctctcgggagaacatcctggtgtcgatgggagctgtgggcgagggcttccacaactaccatcacgccttcccctatgactactctgccagtgagtaccgctggcacatcaacttcaccacgttcttcatcgactgcatggccctcctgggcctggcttatgaccggaagagggtgtccaaggccgct

SEQ ID NO: 757 - protein, 213 aa, Rattus norvegicus
  ref <308>: DATABASE ACCESSION NUMBER: SWISS-Prot / AAB88865
  ref <309>: DATABASE ENTRY DATE: 2002-10-01
RLPLRLFLIIANTMAFQNDVYEWARDHRAHHKFSETHADPHNSRRGFFFSHVGWLLVRKHPAVKEKGGKLDMSDLKAEKLVMFQRRYYKPGLLLMCFILPTLVPWYCWGETFVNSLCVSTFLRYAVVLNATWLVNSAAHLYGYRPYDKNISSRENILVSMGAVGEGFHNYHHAFPYDYSASEYRWHINFTTFFIDCMALLGLAYDRKRVSKAA

SEQ ID NO: 758 - DNA, 5221 bp, Homo sapiens
  ref <308>: DATABASE ACCESSION NUMBER: EMBL / AF097514
  ref <309>: DATABASE ENTRY DATE: 2000-03-03
ataaaagggggctgaggaaataccggacacggtcacccgttgccagctctagcctttaaattcccggctcggggacctccacgcaccgcggctagcgccgacaaccagctagcgtgcaaggcgccgcggctcagcgcgtaccggcgggcttcgaaaccgcagtcctccggcgaccccgaactccgctccggagcctcagccccctggaaagtgatcccggcatccgagagccaagatgccggcccacttgctgcaggacgatatctctagctcctataccaccaccaccaccattacagcgcctccctccagggtcctgcagaatggaggagataagttggagacgatgcccctctacttggaagacgacattcgccctgatataaaagatgatatatatgaccccacctacaaggataaggaaggcccaagccccaaggttgaatatgtctggagaaacatcatccttatgtctctgctacacttgggagccctgtatgggatcactttgattcctacctgcaagttctacacctggctttggggggtattctactattttgtcagtgccctgggcataacagcaggagctcatcgtctgtggagccaccgctcttacaaagctcggctgcccctacggctctttctgatcattgccaacacaatggcattccagaatgatgtctatgaatgggctcgtgaccaccgtgcccaccacaagttttcagaaacacatgctgatcctcataattcccgacgtggctttttcttctctcacgtgggttggctgcttgtgcgcaaacacccagctgtcaaagagaaggggagtacgctagacttgtctgacctagaagctgagaaactggtgatgttccagaggaggtactacaaacctggcttgctgctgatgtgcttcatcctgcccacgcttgtgccctggtatttctggggtgaaacttttcaaaacagtgtgttcgttgccactttcttgcgatatgctgtggtgcttaatgccacctggctggtgaacagtgctgcccacctcttcggatatcgtccttatgacaagaacattagcccccgggagaatatcctggtttcacttggagctgtgggtgagggcttccacaactaccaccactcctttccctatgactactctgccagtgagtaccgctggcacatcaacttcaccacattcttcattgattgcatggccgccctcggtctggcctatgaccggaagaaagtctccaaggccgccatcttggccaggattaaaagaaccggagatggaaactacaagagtggctgagtttggggtccctcaggtttcctttttcaaaaaccagccaggcagaggttttaatgtctgtttattaactactgaataatgctaccaggatgctaaagatgatgatgttaacccattccagtacagtattcttttaaaattcaaaagtattgaaagccaacaactctgcctttatgatgctaagctgatattatttcttctcttatcctctctctcttctaggcccattgtcctccttttcactttattgctatcgccctcctttcccttattgcctcccaggcaagcagctggtcagtctttgctcagtgtccagcttccaaagcctagacaacctttctgtagcctaaaacgaatggtctttgctccagataactctctttccttgagctgttgtgagctttgaagtaggtggcttgagctagagataaaacagaatcttctgggtagtcccctgttgattatcttcagcccaggcttttgctagatggaatggaaaagcaacttcatttgacacaaagcttctaaagcaggtaaattgtcgggggagagagttagcatgtatgaatgtaaggatgagggaagcgaagcaagaggaacctctcgccatgatcagacatacagctgcctacctaatgaggacttcaagccccaccacatagcatgcttcctttctctcctggctcggggtaaaaagtggctgcggtgtttggcaatgctaattcaatgccgcaacatatagttgaggccgaggataaagaaaagacattttaagtttgtagtaaaagtggtctctgctggggaagggttttcttttctttttttctttaataacaaggagatttcttagttcatatatcaagaagtcttgaagttgggtgtttccagaattggtaaaaacagcagctcatggaattttgagtattccatgagctgctcattacagttctttcctctttctgctctgccatcttcaggatattggttcttcccctcatagtaataagatggctgtggcatttccaaacatccaaaaaaagggaaggatttaaggaggtgaagtcgggtcaaaaataaaatatatatacatatatacattgcttagaacgttaaactattagagtatttcccttccaaagagggatgtttggaaaaaactctgaaggagaggaggaattagttgggatgccaatttcctctccactgctggacatgagatggagaggctgagggacaggatctataggcagcttctaagagcgaacttcacataggaagggatctgagaacacgttgccaggggcttgagaaggttactgagtgagttattgggagtcttaataaaataaactagatattaggtccattcattaattagttccagtttctccttgaaatgagtaaaaactagaaggcttctctccacagtgttgtgccccttcactcatttttttttgaggagaagggggtctctgttaacatctagcctaaagtatacaactgcctggggggcagggttaggaatctcttcactaccctgattcttgattcctggctctaccctgtctgtcccttttctttgaccagatctttctcttccctgaacgttttcttctttccctggacaggcagcctcctttgtgtgtattcagaggcagtgatgacttgctgtccaggcagctccctcctgcacacagaatgctcagggtcactgaaccactgcttctcttttgaaagtagagctagctgccactttcacgtggcctccgcagtgtctccacctacacccctgtgctcccctgccacactgatggctcaagacaaggctggcaaaccctcccagaaacatctctggcccagaaagcctctctctccctccctctctcatgaggcacagccaagccaagcgctcatgttgagccagtgggccagccacagagcaaaagagggtttattttcagtcccctctctctgggtcagaaccagagggcatgctgaatgccccctgcttacttggtgagggtgccccgcctgagtcagtgctctcagctggcagtgcaatgcttgtagaagtaggaggaaacagttctcactgggaagaagcaagggcaagaacccaagtgcctcacctcgaaaggaggccctgttccctggagtcagggtgaactgcaaagctttggctgagacctgggatttgagataccacaaaccctgctgaacacagtgtctgttcagcaaactaaccagcattccctacagcctagggcagacaatagtatagaagtctggaaaaaaacaaaaacagaatttgagaaccttggaccactcctgtccctgtagctcagtcatcaaagcagaagtctggctttgctctattaagattggaaatgtacactaccaaacactcagtccactgttgagccccagtgctggaagggaggaaggcctttcttctgtgttaattgcgtagaggctacaggggttagcctggactaaaggcatccttgtcttttgagctattcacctcagtagaaaaggatctaagggaagatcactgtagtttagttctgttgacctgtgcacctaccccttggaaatgtctgctggtatttctaattccacaggtcatcagatgcctgcttgataatatataaacaataaaaacaactttcacttcttcctattgtaatcgtgtgccatggatctgatctgtaccatgaccctacataaggctggatggcacctcaggctgagggccccaatgtatgtgtggctgtgggtgtgggtgggagtgtgtctgctgagtaaggaacacgattttcaagattctaaagctcaattcaagtgacacattaatgataaactcagatctgatcaagagtccggatttctaacagtccctgctttggggggtgtgctgacaacttagctcaggtgccttacatcttttctaatcacagtgttgcatatgagcctgccctcactccctctgcagaatccctttgcacctgagaccctactgaagtggctggtagaaaaaggggcctgagtggaggattatcagtatcacgatttgcaggattcccttctgggcttcattctggaaacttttgttagggctgcttttcttaagtgcccacatttgatggagggtggaaataatttgaatgtatttgatttataagtttttttttttttttgggttaaaagatggttgtagcatttaaaatggaaaattttctccttggtttgctagtatcttgggtgtattctctgtaagtgtagctcaaataggtcatcatgaaaggttaaaaaagcgaggtggccatgttatgctggtggttaaggccagggcctctccaaccactgtgccactgacttgctgtgtgaccctgggcaagtcacttaactataaggtgcctcagttttccttctgttaaaatggggataataatactgacctacctcaaagggcagttttgaggcatgactaatgctttttagaaagcattttgggatccttcagcacaggaattctcaagacctgagtattttttataataggaatgtccaccatgaacttgatacgtccgtgtgtcccagatgctgtcattagtctatatggttctccaagaaactgaatgaatccattggagaagcggtggataactagccagacaaaatttgagaatacataaacaacgcattgccacggaaacatacagaggatgccttttctgtgattgggtgggattttttccctttttatgtgggatatagtagttacttgtgacaaaaataattttggaataatttctattaatatcaactctgaagctaattgtactaatctgagattgtgtttgttcataataaaagtgaagtgaatctaaaaaaaaaaaaaaa

SEQ ID NO: 759 - protein, 359 aa, Homo sapiens
  ref <308>: DATABASE ACCESSION NUMBER: SWISS-Prot / O00767
  ref <309>: DATABASE ENTRY DATE: 2002-06-15
MPAHLLQDDISSSYTTTTTITAPPSRVLQNGGDKLETMPLYLEDDIRPDIKDDIYDPTYKDKEGPSPKVEYVWRNIILMSLLHLGALYGITLIPTCKFYTWLWGVFYYFVSALGITAGAHRLWSHRSYKARLPLRLFLIIANTMAFQNDVYEWARDHRAHHKFSETHADPHNSRRGFFFSHVGWLLVRKHPAVKEKGSTLDLSDLEAEKLVMFQRRYYKPGLLMMCFILPTLVPWYFWGETFQNSVFVATFLRYAVVLNATWLVNSAAHLFGYRPYDKNISPRENILVSLGAVGEGFHNYHHSFPYDYSASEYRWHINFTTFFIDCMAALGLAYDRKKVSKAAILARIKRTGDGNYKSG

SEQ ID NO: 760 - DNA, 639 bp, Rattus norvegicus; identical to SEQ ID NO: 756
  ref <308>: DATABASE ACCESSION NUMBER: EMBL / AF036761
  ref <309>: DATABASE ENTRY DATE: 2001-08-16

SEQ ID NO: 761 - protein, 213 aa, Rattus norvegicus; identical to SEQ ID NO: 757
  ref <308>: DATABASE ACCESSION NUMBER: SWISS-Prot / AAB88865
  ref <309>: DATABASE ENTRY DATE: 2002-10-01

SEQ ID NO: 762 - DNA, 5221 bp, Homo sapiens; identical to SEQ ID NO: 758
  ref <308>: DATABASE ACCESSION NUMBER: EMBL / AF097514
  ref <309>: DATABASE ENTRY DATE: 2000-03-03

SEQ ID NO: 763 - protein, 359 aa, Homo sapiens; identical to SEQ ID NO: 759
  ref <308>: DATABASE ACCESSION NUMBER: SWISS-Prot / O00767
  ref <309>: DATABASE ENTRY DATE: 2002-06-15

SEQ ID NO: 764 - DNA, 639 bp, Rattus norvegicus; identical to SEQ ID NO: 756
  ref <308>: DATABASE ACCESSION NUMBER: EMBL / AF036761
  ref <309>: DATABASE ENTRY DATE: 2001-08-16

SEQ ID NO: 765 - protein, 358 aa, Rattus norvegicus
  ref <308>: DATABASE ACCESSION NUMBER: SWISS-Prot / BAA92436
  ref <309>: DATABASE ENTRY DATE: 2002-10-01
MPAHILQEISGSYSATTTITAPPSGGQQNGGEKFEKNPHHWGADVRPEIKDDLYDPSYQDEEGPPPKLEYVWRNIILMALLHIGALYGITLVPSCKVYTCLFAYLYYVISALGITAGAHRLWSHRTYKARLPLRLFLIIANTMAFQNDVYEWARDHRAHHKFSETHADPHNSRRGFFFSHVGWLLVRKHPAVKEKGGKLDMSDLKAEKLVMFQRRYYKPGLLLMCFILPTLVPWYCWGETFVNSLCVSTFLRYAVVLNATWLVNSAAHLYGYRPYDKNISSRENILVSMGAVGEGFHNYHHAFPYDYSASEYRWHINFTTFFIDCMALLGLAYDRKRVSKAAVLARIKRTGEESCKSG

SEQ ID NO: 766 - DNA, 5221 bp, Homo sapiens; identical to SEQ ID NO: 758
  ref <308>: DATABASE ACCESSION NUMBER: EMBL / AF097514
  ref <309>: DATABASE ENTRY DATE: 2000-03-03

SEQ ID NO: 767 - protein, 359 aa, Homo sapiens; identical to SEQ ID NO: 759
  ref <308>: DATABASE ACCESSION NUMBER: SWISS-Prot / O00767
  ref <309>: DATABASE ENTRY DATE: 2002-06-15

SEQ ID NO: 768 - DNA, 639 bp, Rattus norvegicus; identical to SEQ ID NO: 756
  ref <308>: DATABASE ACCESSION NUMBER: EMBL / AF036761
  ref <309>: DATABASE ENTRY DATE: 2001-08-16

SEQ ID NO: 769 - protein, 213 aa, Rattus norvegicus; identical to SEQ ID NO: 757
  ref <308>: DATABASE ACCESSION NUMBER: SWISS-Prot / AAB88865
  ref <309>: DATABASE ENTRY DATE: 2002-10-01

SEQ ID NO: 770 - DNA, 5221 bp, Homo sapiens; identical to SEQ ID NO: 758
  ref <308>: DATABASE ACCESSION NUMBER: EMBL / AF097514
  ref <309>: DATABASE ENTRY DATE: 2000-03-03

SEQ ID NO: 771 - protein, 359 aa, Homo sapiens; identical to SEQ ID NO: 759
  ref <308>: DATABASE ACCESSION NUMBER: SWISS-Prot / O00767
  ref <309>: DATABASE ENTRY DATE: 2002-06-15

SEQ ID NO: 772 - DNA, 639 bp, Rattus norvegicus; identical to SEQ ID NO: 756
  ref <308>: DATABASE ACCESSION NUMBER: EMBL / AF036761
  ref <309>: DATABASE ENTRY DATE: 2001-08-16

SEQ ID NO: 773 - protein, 213 aa, Rattus norvegicus; identical to SEQ ID NO: 757
  ref <308>: DATABASE ACCESSION NUMBER: SWISS-Prot / AAB88865
  ref <309>: DATABASE ENTRY DATE: 2002-10-01

SEQ ID NO: 774 - DNA, 5221 bp, Homo sapiens; identical to SEQ ID NO: 758
  ref <308>: DATABASE ACCESSION NUMBER: EMBL / AF097514
  ref <309>: DATABASE ENTRY DATE: 2000-03-03

SEQ ID NO: 775 - protein, 359 aa, Homo sapiens; identical to SEQ ID NO: 759
  ref <308>: DATABASE ACCESSION NUMBER: SWISS-Prot / O00767
  ref <309>: DATABASE ENTRY DATE: 2002-06-15

SEQ ID NO: 776 - DNA, 639 bp, Rattus norvegicus; identical to SEQ ID NO: 756
  ref <308>: DATABASE ACCESSION NUMBER: EMBL / AF036761
  ref <309>: DATABASE ENTRY DATE: 2001-08-16

SEQ ID NO: 777 - protein, 358 aa, Rattus norvegicus; identical to SEQ ID NO: 765
  ref <308>: DATABASE ACCESSION NUMBER: SWISS-Prot / BAA92436
  ref <309>: DATABASE ENTRY DATE: 2002-10-01

SEQ ID NO: 778 - DNA, 5221 bp, Homo sapiens; identical to SEQ ID NO: 758
  ref <308>: DATABASE ACCESSION NUMBER: EMBL / AF097514
  ref <309>: DATABASE ENTRY DATE: 2000-03-03

SEQ ID NO: 779 - protein, 359 aa, Homo sapiens; identical to SEQ ID NO: 759
  ref <308>: DATABASE ACCESSION NUMBER: SWISS-Prot / O00767
  ref <309>: DATABASE ENTRY DATE: 2002-06-15

SEQ ID NO: 780 - DNA, 1053 bp, Rattus norvegicus
  ref <308>: DATABASE ACCESSION NUMBER: EMBL / AF037072
  ref <309>: DATABASE ENTRY DATE: 2000-10-26
ggagctgtccagcgctgagagacaggaaaggccatggctaaggagtggggttacgccagccacaatggtcctgagcactggcatgaactttatccaattgccaaaggggacaaccagtcacccattgaactgcatactaaagacatcaggcatgatccttctctgcagccttggtcagtatcttatgatcctggctctgctaagaccatcctgaacaatgggaagacctgcagagttgtgtttgatgataccttcgacaggtccatgctgagaggtggccctctctctggaccctaccgacttcgccaattccatcttcactggggctcctcggatgaccatggctctgagcacacagtggatggagtgaagtatgctgctgagcttcacctggttcactggaacccgaagtataacaccttcggagaggctctgaagcagcccgatgggattgctgtggttggcatttttctgaagataggacgggagaaaggcgagttccaaattctccttgatgccctggacaaaattaagactaagggcaaggaggctccttttaatcacttcgacccatcgtgcctgttccctgcttgccgggactattggacctaccatggctccttcaccacgccaccctgcgaggagtgcattgtgtggctgctactgaaagagcccatgacagtgagctcagaccagatggccaagctgcgcagcctgttcgccagtgcagagaatgagcccccggtgcctctggtggggaattggcgccctcctcagccgatcaagggcagggtggtgagggcctccttcaagtaaggctctggacgtgccctcttcaggaaaggaattctgtccctgaagagccagcttgcctcctcctggtgctccctgctccaagctatcctacaacactgagagaaagaagagacgcagtcagatgaaaccgcagtgccttttgacatgatctaacccagaagcatgaatttcacacctaacctttttaataactaccttttctaaaaaaattagtatttctagtataaattcagtgaa

SEQ ID NO: 781 - protein, 259 aa, Rattus norvegicus
  ref <308>: DATABASE ACCESSION NUMBER: SWISS-Prot / P14141
  ref <309>: DATABASE ENTRY DATE: 2002-06-15
AKEWGYASHNGPEHWHELYPIAKGDNQSPIELHTKDIRHDPSLQPWSVSYDPGSAKTILNNGKTCRVVFDDTFDRSMLRGGPLSGPYRLRQFHLHWGSSDDHGSEHTVDGVKYAAELHLVHWNPKYNTFGEALKQPDGIAVVGIFLKIGREKGEFQILLDALDKIKTKGKEAPFNHFDPSCLFPACRDYWTYHGSFTTPPCEECIVWLLLKEPMTVSSDQMAKLRSLFASAENEPPVPLVGNWRPPQPIKGRVVRASFK

SEQ ID NO: 782 - DNA, 495 bp, Homo sapiens
  ref <308>: DATABASE ACCESSION NUMBER: EMBL / BM713112
  ref <309>: DATABASE ENTRY DATE: 2002-03-06
ggcatttcaccttggaaacattttcctgggcatctaaaagtattgtggacctgagacactgtgcttacagggcctactggttttcactgtatgagaccgagaatggattatggcagttcctcttacctccgctgcatacttgactccatccacggtgtgctcagagccatgatcatccgaagagccccagtgaagatgaaactggcgaagtcggtagggtccagggagaggaccccctctcagcactgtgattcagataagcttggtcaacagtgaattcatgcttcttttacagagctctactttaaccaagtgctcttagagccaaggcttaatggacaaaatgtggtcagtttgctgggtggatggtgccactcccaggacactggactcctcacaaaatgaagtctggggatatgtcaagataaatgattgttcttttctgtctttcttattttgtttgcttgtttcattattattgaaacatcattttta

SEQ ID NO: 783 - protein, 259 aa, Homo sapiens [sequence omitted]

SEQ ID NO: 784 - DNA, 1071 bp, Rattus norvegicus
  misc_feature (1)..(1071): n=a, c, g or t
  ref <308>: DATABASE ACCESSION NUMBER: EMBL / AF037272
  ref <309>: DATABASE ENTRY DATE: 2000-03-03
cggcacgaggaggtcactcgtgcagaaggaaagcctgccaccagcctcgggatgggtagctgcgacaggaaagccctctgggctctgagcttcctactgctgctactgggctccagctctgttcagggcacttgggaggcaatgttgccggtcaggctggctgagaagtcccaagctgaagaggttgcagcaacaggctcccggcagccccacgcagaccgctgcccaccaccgccacggacgctacccccgggtgcctgtcaggccacacgctgccagtctgactctgagtgcccacgacacagacgctgctgttacaacggctgtgcctatgcctgcctggaggcggtgccaccgccaccagttctagactggctggtgcagcccaaaccacggtggcttggtggcaatggctggctgctggatggtccggaggaagtgttacaagcagaggcctgcagcaccactgaggatggggcagagccactcctctgtccctcaggctatgagtgccacatcctgcagccaggggatgcggcccagggcatacccaaccatggacggtgtgttaagcaacgtcgacaagcagaggggcgggtcctgcgacagaagcttcacaaggagtacccagaaggtgactccaagtatgtggcagagcctgggaagggacaacagaggcactttccatgaagtggagactggctgcctttgtggggcctttcctgtgctttccacacactaccccttggaaacagcaaaagaatttgaccctagacgtcaaactccattccacagaacgggactccagagctcctgggaaacgggacttcagactcccaaccccagagtggcccagcctggtgcggcggtaacttggcggaagcccctgaccacctctgggtccccgctcagcatccttgtcacaggaacccgcagcttctaggtgacttttgcagattttgcctgcagaaggcatatattcatctctttttttccccgaataaatctgcccaccatgtagcagaaataagttcctttatcaggctcaagtccnaaaaaaaaaaaaaaaaa

SEQ ID NO: 785 - protein, 212 aa, Rattus norvegicus
  ref <308>: DATABASE ACCESSION NUMBER: SWISS-Prot / AAC40055
  ref <309>: DATABASE ENTRY DATE: 2002-06-15
MGSCDRKALWALSFLLLLLGSSSVQGTWEAMLPVRLAEKSQAEEVAATGSRQPHADRCPPPPRTLPPGACQATRCQSDSECPRHRRCCYNGCAYACLEAVPPPPVLDWLVQPKPRWLGGNGWLLDGPEEVLQAEACSTTEDGAEPLLCPSGYECHILQPGDAAQGIPNHGRCVKQRRQAEGRVLRQKLHKEYPEGDSKYVAEPGKGQQRHFP

SEQ ID NO: 786 - DNA, 1366 bp, Homo sapiens
  ref <308>: DATABASE ACCESSION NUMBER: EMBL / AF169631
  ref <309>: DATABASE ENTRY DATE: 2000-09-27
gtgctggacgcggacacatgatccgagggaccctgctgggtggaactaagaaagtccagcagactgtgcacgctcctgtccccactcacaggcccacgcagcgaggggggcccctcttctgtgtgcgtctggaaggtcgctgcccagggaggaaatgcctttaaccggcgtggggccgggcagctgcaggaggcagatcatccgggctctgtgcctcttgctacttctcctccacgccggctctgccaagaatatctggaaacgggcattgcctgcgaggctggccgagaaatcccgtgccgaggaggcgggcgcgcccggcggcccccggcagccccgagcagaccgctgcccgccgcctccgcggacgctgccccccggcgcctgccaggccgcgcgctgtcaggcggactccgagtgcccgcggcaccggcgctgctgctacaacggatgcgcctacgcctgcctagaagctgtgccgcccccgccagtcttagactggctggtgcagccgaaacctcgatggcttggtggcaatggctggctcctggatggccctgaggaggtgttacaagcagaggcgtgcagcaccacggaggatggggccgaacccctgctctgtccctcgggctatgagtgccacatcctgagcccaggtgacgtggccgaaggtatccccaaccgtgggcagtgcgtcaagcagcgccggcaagcagatgggcgaatcctacgacacaaactttacaaagaatatccagaaggtgactcaaagaatgtggcagaacctggaaggggacaacagaggcactttcagtaaagcaacggcaagcagctaggttgcaagaacattcctctactttctgctaagccttggaaacagttgggaaaagtagtttgaccctcacagttcacattcagctcagcagagcaagaccccagagatgcttagagacaggacacctggccatcaaacccagtttggcccagcctggttgggtgactttgtgggagccacttaacagctctgggtccctgttttaccatcctgggagcaaggccctgcagctccacgagacctttaccccgggaagaagccgccgcccatgaaagcatttctgaagcccctttctaagacaaggctcagcatcttgatatttttgacagattcctcccaagtctggctctgggaggtatgtacccatctcaaatgttcccaagataaattcatccttcaggaaatggaaatgaacttgcttactaatgtgtgattcctagttgtagccaccggatgtgctgaggcctaaatgttagcaggtgggaggaggccacagaacaataaaaacaaccaaataaaaaaaaaaaaaaa

SEQ ID NO: 787 - protein, 221 aa, Homo sapiens
  misc_feature (1)..(221): Xaa=Unknown amino acid
MPLTGVGPGSCRRQIIRALCLLLLLLHAGSAKNIWKRALPARLAEKSRAEEAGAPGGPRQPRADRCPPPPRTLPPGACQAARCQADSECPRHRRCCYNGCAYACLEAVPPPPVLDWLVQPKPRWLGGNGWLLDGPEEVLQAEACSTTEDGAEPLLCPSGYECHILSPGDVAEGIPNRGQCVKQRRQADGRILRHKLYKEYPEGDSKNVAEPGRGQQRHFQX

SEQ ID NO: 788 - DNA, 1108 bp, Rattus norvegicus
  ref <308>: DATABASE ACCESSION NUMBER: EMBL / AF039085
  ref <309>: DATABASE ENTRY DATE: 2000-10-28
ttgcttttaataacactgaaccccatcagagccagaagcaggtgcccgctgcagtttttgacacatgccactttccctacagctggaggccttgggttccatttacagtactggggtggggggataaggcctagtaaaaccctctcctcaaagatgcccttgagggtcggcggcgacggcgacatggagagcggggcctatggcgcggccaacgcgggcggctccttcgacctgcggcgctatgtgtcccagcctcaggtggtgacacgcctcgtgagcatggtcttggccttgatcgtattctcctgcatcttcggcgagggctacatcaaccttcactcatctgaccagctacactgtgtgttcaaccggaacgaagatgcctgccgctacggcagtgccattggggtgctggccttcctggcctcagccttcttccttgtggtggatgcgtttttctctcagataagcaatgccactgaccgcaagtatctggtcattggtgacctgctcttctcagctctctggaccttcctgtggtttgtcggtttctgctttctgaccaaccagtgggcagccaccaaacctgatgacgtgttggtgggagcagactcagcccgggctgccatcaccttcagtttcttctccatcttctcctggggtgtgctggcctccctggcctaccagcgttacaaggctggagtggatgccttcattcagaactatgtggaccccacgccggatcccaccacagcctacgcctcctaccctagtgcctcggtggaaaactaccagcagccgcccttcacccagaatgtggagactactgagggctaccagcctcccccagtgtactgagcagccagggacaaagaggcaggagggtgcttggtggggctgcccctccaccctggacttctctcaaggtttgctgtccagaactgtagtcccttggctgttacagttgacagcccgagtccatgcctttctgcaccccagcagccagagcacacctgaagtgcccatgcccagaggggcttcaccgccacccgcctgaccctcaagggcatctttgaggagagggttttactaggccttatccccccac

SEQ ID NO: 789 - protein, 234 aa, Rattus norvegicus
  ref <308>: DATABASE ACCESSION NUMBER: SWISS-Prot / O54980
  ref <309>: DATABASE ENTRY DATE: 2000-05-30
MPLRVGGDGDMESGAYGAANAGGSFDLRRYVSQPQVVTRLVSMVLALIVFSCIFGEGYINLHSSDQLHCVFNRNEDACRYGSAIGVLAFLASAFFLVVDAFFSQISNATDRKYLVIGDLLFSALWTFLWFVGFCFLTNQWAATKPDDVLVGADSARAAITFSFFSIFSWGVLASLAYQRYKAGVDAFIQNYVDPTPDPTTAYASYPSASVENYQQPPFTQNVETTEGYQPPPVY

SEQ ID NO: 790 - DNA, 1491 bp, Homo sapiens
  ref <308>: DATABASE ACCESSION NUMBER: EMBL / AJ002308
  ref <309>: DATABASE ENTRY DATE: 1998-03-03
gcggcggcggcagcggcggcgacggcgacatggagagcggggcctacggcgcggccaaggcgggcggctccttcgacctgcggcgcttcctgacgcagccgcaggtggtggcgcgcgccgtgtgcttggtcttcgccttgatcgtgttctcctgcatctatggtgagggctacagcaatgcccacgagtctaagcagatgtactgcgtgttcaaccgcaacgaggatgcctgccgctatggcagtgccatcggggtgctggccttcctggcctcggctttcttcttggtggtcgacgcgtatttcccccagatcagcaacgccactgaccgcaagtacctggtcattggtgacctgctcttctcagctctctggaccttcctgtggtttgttggtttctgcttcctcaccaaccagtgggcagtcaccaacccgaaggacgtgctggtgggggccgactctgtgagggcagccatcaccttcagcttcttttccatcttctcctggggtgtgctggcctccctggcctaccagcgctacaaggctggcgtggacgacttcatccagaattacgttgaccccactccggaccccaacactgcctacgcctcctacccaggtgcatctgtggacaactaccaacagccacccttcacccagaacgcggagaccaccgagggctaccagccgccccctgtgtactgagcggcggttagcgtgggaagggggacagagagggccctcccctctgccctggactttcccatgagcctcctggaactgccagcccctctctttcacctgttccatcctgtgcagctgacacacagctaaggagcctcatagcctggcgggggctggcagagccacaccccaagtgcctgtgcccagagggcttcagtcagccgctcactcctccagggcacttttaggaaagggtttttagctagtgtttttcctcgcttttaatgacctcagccccgcctgcagtggctagaagccagcaggtgcccatgtgctactgacaagtgcctcagcttccccccggcccgggtcaggccgtgggagccgctattatctgcgttctctgccaaagactcgtgggggccatcacacctgccctgtgcagcggagccggaccaggctcttgtgtcctcactcaggtttgcttcccctgtgcccactgctgtatgatctgggggccaccaccctgtgccggtggcctctgggctgcctcccgtggtgtgagggcggggctggtgctcatggcacttcctccttgctcccacccctggcagcagggaagggctttgcctgacaacacccagctttatgtaaatattctgcagttgttacttaggaagcctggggagggcaggggtgccccatggctcccagactctgtctgtgccgagtgtattataaaatcgtgggggagatgcccggcctgggatgctgtttggagacggaataaatgttttctcattcagta

SEQ ID NO: 791 - protein, 224 aa, Homo sapiens
  ref <308>: DATABASE ACCESSION NUMBER: SWISS-Prot / O43760
  ref <309>: DATABASE ENTRY DATE: 2001-10-16
MESGAYGAAKAGGSFDLRRFLTQPQVVARAVCLVFALIVFSCIYGEGYSNAHESKQMYCVFNRNEDACRYGSAIGVLAFLASAFFLVVDAYFPQISNATDRKYLVIGDLLFSALWTFLWFVGFCFLTNQWAVTNPKDVLVGADSVRAAITFSFFSIFSWGVLASLAYQRYKAGVDDFIQNYVDPTPDPNTAYASYPGASVDNYQQPPFTQNAETTEGYQPPPVY

SEQ ID NO: 792 - DNA, 1514 bp, Rattus norvegicus
  ref <308>: DATABASE ACCESSION NUMBER: EMBL / AF039583
  ref <309>: DATABASE ENTRY DATE: 1998-11-16
atgatccgcacgcgggcgccggggactcgggctccgccgccgccgccgctgctgctgtcgctgtcgctgctgctgctgctgctgtccccgactgtaagcggagactgcggcccacctccagacattcctaatgccacgccaaactcgggtaaacacaccaagtttgcccaccaaagccaagtgacatattcgtgtaataagggcttcaaacaaattccagacaagccaaacacagtggtctgccttgaaaatgaccaatggtctaactacgaaactttctgtaataaaacctgtagtgctccactgagactgaattatgcatccctcaaaaaggagtatcgtaacatgaattttttcccaattggcaccactgtggaatttgagtgtcggccaggatttcaaaaagtaacttcacgcacaggaaaatcaacttgccttgaggaattagtatggtctccagttgttgaattttgtaaaaaaagagcatgccctaatcctagagaactgaaaaatggtcacatcaacataccaactgacatattattcggatcagaaataatcttctcatgcgacaaagggtacaagctggtcggtgtaacttctacattctgttctattacggggaatgctgtggactgggatgacgtatttccagtgtgcacaacaattttttgtccagacccaccaaaaatcaataatggaagaattcgagaggaaagcgactcctacgcatatagacagtcggtgacctattcctgtgaccaaggcttcattctggttggaaattcttccgttcattgtactctgaacggtgaagtaggagaatggagtagtgcaccacccaagtgcatagagagacacaaggtcccaactaagaccccaccagaagttgatattccaagtacaatgcctcatgaatccaccttaattaattttccaagtacaagagccccactgtctcataaacccactacagttaaagttccaggtacaagagtcaagccaacgtctcacaagcctactgaagttaaagttccagcaacacagcatgtacctgtttccaagacaacggtacgtcatccaacgagaacatctaaagacagaggagagtctaattcaggtggtgaccattttatatatggacatacatgtttaataaccatgacaattttgcatgtgatgctcttactcactggctagttgacgtagccaacgaagagttaagaagaaagtatatacaaccactgagaatacttctagtttgttagaatgtccaggaagaatggatacaataaatttaatagtgttgttggttctgtatgctgtcatcgtcttgaaggtgtgctagaaatgataacaaagcaagaagaaaggaggttgtctggaatggtcttttcaatgcatataagtctcttgaaaatatttcaaaactagacaaattcacaatgttgtgtagtatcttttctaaaaaaaagtgtgggaaagtgtagaaaatttttcaggggagagggaaa

SEQ ID NO: 793 - protein, 399 aa, Rattus norvegicus
  ref <308>: DATABASE ACCESSION NUMBER: SWISS-Prot / AAC77438
  ref <309>: DATABASE ENTRY DATE: 2001-12-01
MIRTRAPGTRAPPPPPLLLSLSLLLLLLSPTVSGDCGPPPDIPNATPNSGKHTKFAHQSQVTYSCNKGFKQIPDKPNTVVCLENDQWSNYETFCNKTCSAPLRLNYASLKKEYRNMNFFPIGTTVEFECRPGFQKVTSRTGKSTCLEELVWSPVVEFCKKRACPNPRELKNGHINIPTDILFGSEIIFSCDKGYKLVGVTSTFCSITGNAVDWDDVFPVCTTIFCPDPPKINNGRIREESDSYAYRQSVTYSCDQGFILVGNSSVHCTLNGEVGEWSSAPPKCIERHKVPTKTPPEVDIPSTMPHESTLINFPSTRAPLSHKPTTVKVPGTRVKPTSHKPTEVKVPATQHVPVSKTTVRHPTRTSKDRGESNSGGDHFIYGHTCLITMTILHVMLLLTG

SEQ ID NO: 794 - DNA, 2102 bp, Homo sapiens
  ref <308>: DATABASE ACCESSION NUMBER: Refseq / NM_000574
  ref <309>: DATABASE ENTRY DATE: 2000-10-31
ccgctgggcgtagctgcgactcggcggagtcccggcggcgcgtccttgttctaacccggcgcgccatgaccgtcgcgcggccgagcgtgcccgcggcgctgcccctcctcggggagctgccccggctgctgctgctggtgctgttgtgcctgccggccgtgtggggtgactgtggccttcccccagatgtacctaatgcccagccagctttggaaggccgtacaagttttcccgaggatactgtaataacgtacaaatgtgaagaaagctttgtgaaaattcctggcgagaaggactcagtgatctgccttaagggcagtcaatggtcagatattgaagagttctgcaatcgtagctgcgaggtgccaacaaggctaaattctgcatccctcaaacagccttatatcactcagaattattttccagtcggtactgttgtggaatatgagtgccgtccaggttacagaagagaaccttctctatcaccaaaactaacttgccttcagaatttaaaatggtccacagcagtcgaattttgtaaaaagaaatcatgccctaatccgggagaaatacgaaatggtcagattgatgtaccaggtggcatattatttggtgcaaccatctccttctcatgtaacacagggtacaaattatttggctcgacttctagtttttgtcttatttcaggcagctctgtccagtggagtgacccgttgccagagtgcagagaaatttattgtccagcaccaccacaaattgacaatggaataattcaaggggaacgtgaccattatggatatagacagtctgtaacgtatgcatgtaataaaggattcaccatgattggagagcactctatttattgtactgtgaataatgatgaaggagagtggagtggcccaccacctgaatgcagaggaaaatctctaacttccaaggtcccaccaacagttcagaaacctaccacagtaaatgttccaactacagaagtctcaccaacttctcagaaaaccaccacaaaaaccaccacaccaaatgctcaagcaacacggagtacacctgtttccaggacaaccaagcattttcatgaaacaaccccaaataaaggaagtggaaccacttcaggtactacccgtcttctatctgggcacacgtgtttcacgttgacaggtttgcttgggacgctagtaaccatgggcttgctgacttagccaaagaagagttaagaagaaaatacacacaagtatacagactgttcctagtttcttagacttatctgcatattggataaaataaatgcaattgtgctcttcatttaggatgctttcattgtctttaagatgtgttaggaatgtcaacagagcaaggagaaaaaaggcagtcctggaatcacattcttagcacacctacacctcttgaaaatagaacaacttgcagaattgagagtgattcctttcctaaaagtgtaagaaagcatagagatttgttcgtatttagaatgggatcacgaggaaaagagaaggaaagtgatttttttccacaagatctgtaatgttatttccacttataaaggaaataaaaaatgaaaaacattatttggatatcaaaagcaaataaaaacccaattcagtctcttctaagcaaaattgctaaagagagatgaaccacattataaagtaatctttggctgtaaggcattttcatctttccttcgggttggcaaaatattttaaaggtaaaacatgctggtgaaccaggggtgttgatggtgataagggaggaatatagaatgaaagactgaatcttcctttgttgcacaaatagagtttggaaaaagcctgtgaaaggtgtcttctttgacttaatgtctttaaaagtatccagagatactacaatattaacataagaaaagattatatattatttctgaatcgagatgtccatagtcaaatttgtaaatcttattcttttgtaatatttatttatatttatttatgacagtgaacattctgattttacatgtaaaacaagaaaagttgaagaagatatgtgaagaaaaatgtatttttcctaaatagaaataaatgatcccattttttggt

SEQ ID NO: 795 - protein, 381 aa, Homo sapiens
  ref <308>: DATABASE ACCESSION NUMBER: SWISS-Prot / P08174
  ref <309>: DATABASE ENTRY DATE: 2002-06-15
MTVARPSVPAALPLLGELPRLLLLVLLCLPAVWGDCGLPPDVPNAQPALEGRTSFPEDTVITYKCEESFVKIPGEKDSVTCLKGSQWSDIEEFCNRSCEVPTRLNSASLKQPYITQNYFPVGTVVEYECRPGYRREPSLSPKLTCLQNLKWSTAVEFCKKKSCPNPGEIRNGQIDVPGGILFGATISFSCNTGYKLFGSTSSFCLISGSSVQWSDPLPECREIYCPAPPQIDNGIIQGERDHYGYRQSVTYACNKGFTMIGEHSIYCTVNNDEGEWSGPPPECRGKSLTSKVPPTVQKPTTVNVPTTEVSPTSQKTTTKTTTPNAQATRSTPVSRTTKHFHETTPNKGSGTTSGTTRLLSGHTCFTLTGLLGTLVTMGLLT

SEQ ID NO: 796 - DNA, 1514 bp, Rattus norvegicus; identical to SEQ ID NO: 792
  ref <308>: DATABASE ACCESSION NUMBER: EMBL / AF039583
  ref <309>: DATABASE ENTRY DATE: 1998-11-16

SEQ ID NO: 797 - protein, 399 aa, Rattus norvegicus; identical to SEQ ID NO: 793
  ref <308>: DATABASE ACCESSION NUMBER: SWISS-Prot / AAC77438
  ref <309>: DATABASE ENTRY DATE: 2001-12-01

SEQ ID NO: 798 - DNA, 2102 bp, Homo sapiens; identical to SEQ ID NO: 794
  ref <308>: DATABASE ACCESSION NUMBER: Refseq / NM_000574
  ref <309>: DATABASE ENTRY DATE: 2000-10-31

SEQ ID NO: 799 - protein, 381 aa, Homo sapiens; identical to SEQ ID NO: 795
  ref <308>: DATABASE ACCESSION NUMBER: SWISS-Prot / P08174
  ref <309>: DATABASE ENTRY DATE: 2002-06-15

SEQ ID NO: 800 - DNA, 1807 bp, Rattus norvegicus
  misc_feature (1)..(1807): n=a, c, g or t
  ref <308>: DATABASE ACCESSION NUMBER: EMBL / AF039584
  ref <309>: DATABASE ENTRY DATE: 1998-11-16
atgatccgcacgcgggcgccggggactcgggctccgccgccgccgccgctgctgctgtcgctgtcgctgctgctgctgctgctgtccccgactgtaagcggagactgcggcccacctccagacattcctaatgccacgccaaactcgggtaaacacaccaagtttgcccaccaaagccaagtgacatattcgtgtaataagggcttcaaacaaattccagacaagccaaacacagtggtctgccttgaaaatgaccaatggtctaactacgaaactttctgtaataaaacctgtagtgctccactgagactgaattatgcatccctcaaaaaggagtatcgtaacatgaattttttcccaattggcaccactgtggaatttgagtgtcggccaggatttcaaaaagtaacttcacgcacaggaaaatcaacttgccttgaggaattagtatggtctccagttgttgaattttgtaaaaaaagagcatgccctaatcctagagaactgaaaaatggtcacatcaacataccaactgacatattattcggatcagaaataatcttctcatgcgacaaagggtacaagctggtcggtgtaacttctacattctgttctattacggggaatgctgtggactgggatgacgtatttccagtgtgcacaacaattttttgtccagacccaccaaaaatcaataatggaagaattcgagaggaaagcgactcctacgcatatagacagtcggtgacctattcctgtgaccaaggcttcattctggttggaaattcttccgttcattgtactctgaacggtgaagtaggagaatggagtagtgcaccacccaagtgcatagagagacacaaggtcccaactaagaccccaccagaagttgatattccaagtacaatgcctcatgaatccaccttaattaattttccaagtacaagagccccactgtctcataaacccactacagttaaagttccagcaacacagcatgtacctgtttccaagacaacggtacgtcatccaacgagaacatctaaagacagaggagagtctaattcaggtggtgaccattttatatatggaaagtttgacccacagggagttaaaagaaattgccatcactgtgggagacatagtccatatttctggaagagaatcttctcttataactgcctgagaaaaactatcaaaatgcagtgcctatgggtgcctaagggcagatgggtaaagccttttaatcggctggttttttggacaccgttaggcatccagcatggtccttcatatccccaacagtgctcctgctctaaggcagtcttaggacagcttcgggtcatctggccaatcagtcaggtagcactgagtgcccgctgtgtcagtgtgtcattttagtgacagaagaaacccaggaacaacagtcaatacagttcttatccaaagagcatagttaacgccatctccaaccatttttaggtctctgtcataggccaaacgtgaccaagagccccacttttcattatatctttccttcatctctagtaaagctttaagcagagttcttttagaatataccctctacatgcnaatatagtcggcgaaggtacaaaactgtctctgtgttgtgattccttttagcatttggtcagtattttttctttgtacattatacttactgttacttattaataaggtccacaaatccctgaacgaaatggtaaggggcattgttaagtgggaaaatagccaagtagtgtaccaaagtcntgggcgactgtaaataccctttcatggaaagatg

SEQ ID NO: 801 - protein, 466 aa, Rattus norvegicus
  ref <308>: DATABASE ACCESSION NUMBER: SWISS-Prot / AAC77439
  ref <309>: DATABASE ENTRY DATE: 2001-12-01
MIRTRAPGTRAPPPPPLLLSLSLLLLLLSPTVSGDCGPPPDIPNATPNSGKHTKFAHQSQVTYSCNKGFKQIPDKPNTVVCLENDQWSNYETFCNKTCSAPLRLNYASLKKEYRNMNFFPIGTTVEFECRPGFQKVTSRTGKSTCLEELVWSPVVEFCKKRACPNPRELKNGHINIPTDILFGSEIIFSCDKGYKLVGVTSTFCSITGNAVDWDDVFPVCTTIFCPDPPKINNGRIREESDSYAYRQSVTYSCDQGFILVGNSSVHCTLNGEVGEWSSAPPKCIERHKVPTKTPPEVDIPSTMPHESTLINFPSTRAPLSHKPTTVKVPATQHVPVSKTTVRHPTRTSKDRGESNSGGDHFIYGKFDPQGVKRNCHHCGRHSPYFWKRIFSYNCLRKTIKMQCLWVPKGRWVKPFNRLVFWTPLGIQHGPSYPQQCSCSKAVLGQLRVIWPISQVALSARCVSVSF

SEQ ID NO: 802 - DNA, 1686 bp, Rattus norvegicus
  ref <308>: DATABASE ACCESSION NUMBER: EMBL / AF040261
  ref <309>: DATABASE ENTRY DATE: 2000-03-03
gctccagaagccggcgctaactggggcggattggcagctcctggtagaagcctcaggcataaccatctaccggctgctggaccagtcaactggactttacgagtataaagtgtttggagtcctggaaagttgcataccatctctactcgcagacgtttacatggacttagactacaggaaaaaatgggaccagtacgtgaaagaactctatgagaagtcgtttgacggacagatggtggcatactgggaagtgaagtaccctttccctctgtccaacagagattatgtctacacccgccagcggcgagacctggatgtggacgggaggaagatctacgtggtcctggcccagaatatctctgtacctcagtttccggagaagtctggggtaatccgagtgaagcagtacaagcagagcctggcgatcgagagcgatggcaagaaggggagcagagttttcatgtactactttgataacccgggtggccaaattccgtcctggctcattaactgggcagccaagaatggagttccaagctttttgaaagacatggtgaaagcgtgtcagaactaccacaagaaaacctaaggaggagaccgggaccccggcatccatgaaagacacctctggatgtgctacaccaactgaagctcgcccttctgttcccaccttcaaagcgctacacacccccaaggcatgcttgcctctgtccggctccatcactgacttctttcccactggtcatagtcagagcctactaccttcttccactgtcgaatggggggtcccatacttgtgtatgtttcattaggaaaatccttagtggggaaaaggagctattctgttgtgccatttttggggggatgagtgagaagaggaagggtggcaagatataagagcggcccttcctggaaagcaggctcacttcagcattctctcttgcaactagaagtggcttttggtccacagttgaccttctaggttcgaatcccacagtgatgcctgttctcttgatgcctcgctgactcaggctgggatttgaggtgacaagcaagtgtggctgtgtttctacttgggcatgatcagtagttgctgtggtatcagaccactctgaggagtgtcccaggcctgactgagcacatgctgagatgagcaaggtttcctaattgtcaacatctggatctttttcctttcccataatccactgagaaaacgctgtctatacctcttgagcagtgcatttcactgcaagccccaggtttccaaagacagcgtgtgtgtagtacgctgactgtatcttactaaagtgacttccccttctagagcgtttggagatgttgaagggacaataatggtttacaacagagtgaaattgacgtagtgatttggtgtgctctccacctttttttcgggaattctacctcttcagaacagggactctcagaaccctgcgtctgatcctcaatttttgtaggaaaatagattcagtggccaagacacagccttaatgatctcagggaaaagttgtagtcaatcactctgtgcaaaccttgactaaaggatatggaaactcaagatgcaaagacagaggaaaggatctgtttgagtgggatttcttagagtgtgtgttctttctgggaagaaagttgtgttccatgaataaacacagtgacttatgttaaaaa

SEQ ID NO: 803 - protein, 214 aa, Rattus norvegicus
  ref <308>: DATABASE ACCESSION NUMBER: SWISS-Prot / P53809
  ref <309>: DATABASE ENTRY DATE: 2002-06-15
MAGPAAHFSDEQFREACAELQKPALTGADWQLLVEASGITIYRLLDQSTGLYEYKVFGVLESCIPSLLADVYMDLDYRKKWDQYVKELYEKSFDGQMVAYWEVKYPFPLSNRDYVYTRQRRDLDVDGRKIYVVLAQNISVPQFPEKSGVIRVKQYKQSLAIESDGKKGSRVFMYYFDNPGGQIPSWLINWAAKNGVPSFLKDMVKACQNYHKKT

SEQ ID NO: 804 - DNA, 2060 bp, Homo sapiens
  ref <308>: DATABASE ACCESSION NUMBER: EMBL / AK058120
  ref <309>: DATABASE ENTRY DATE: 2001-10-31
agaatgcgccggggtcgacctccccgcagggagtgcggggcggcagtcgcggaagggacaggggcgggtcttctccggctcaggaaggagctccgcccggaccctgtctcaagctctggagctagcgcaggggcggtgcctccaagtgactgccgtgcagatccaggggagttggaaggtcacaggagttcagcctcagaagactggactttatgagtataaagtctttggtgttctggaggactgctcaccaactctactggcagacatctatatggactcagattacagaaaacaatgggaccagtatgttaaagaactctatgaacaagaatgcaacggagagactgtggtctactgggaagtgaagtacccttttcccatgtccaacagagacgtatcctttccacaagcttgtggcgctttccttctgtctgtctacaatgctggcgttggtgtcttgccttgactggccatgcagtatgtctaccttcggcagcggcgagacctggacatggaagggaggaagatccatgtgatcctggcccggagcacctccatgcctcagcttggcgagaggtctggggtgatccgggtgaagcaatacaagcagagcctggcgattgagagtgacggcaagaaggggagcaaagttttcatgtattacttcgataacccgggtggccaaattccgtcctggctcattaactgggccgccaagaatggagttcctaacttcttgaaagacatggcaagagcctgtcagaactacctcaagaaaacctaagaaagagaactgggaacattgcatccatgggttgatgtctctggaagtgcaaccacccaatgtctctggaagtgccacctggaagtgccacctggaagtgtctctggaagagcacccaccactgttcagccttcccctgctgtttctgtcttcagaggcctacacactaccacatcctttctaagcatgtttgcctgacatccagctcactcgtctgcttcctttctcgctccccccatcctgggctgggctgccttcttctacagttcaatatggggcagactagggaaacctttgcttgcttactattaggaggggaagtcttcagtagggaacacgatcattccattgtgcaattttacggggatgggtgggcggagggacacaacaaaatttaagaatgactatttgggcgggctggctcttttgcagcttgtgatttcttccagcttgggaggggctgctggaagtggcatttcgttcagagctgactttcagtgcacccaaactggatgacgtgccaatgtccatttgccttatgctttgtggagctgattaggctgggatttgaggtgataatccagtaagtctttcctcgttcctacttgtggaggatcagtagctgttatgatgccagaccatttggagaagtatcagaggcctgaccggacacataatacgacaaccacatttttcctcatcatccatgaggaaatggatgatttctcttttccatatgtcactgggggaaaggctgcctgtacctctcaagctttgcattttactggaaactgaggcgtcaagatggctgtggcagctagcaaaagcaaagatgctttgtgcatagccttgtgaaaaagtatctttctatgcaataagatgaattttcctcccagaatatttagaaatgtagaagggataacagttcacagccaggtaaaatttaactggtggcttaatgactctgcacctttttctcaggaattctgcctaagttgtctgccttttctaccaccaaaaagacttttagttttctatgctttctcctgaattttggtagggtaaggtatttctatgtcaaaggcacagccttgatgatctcagggaaaaattttaatcactgtgtataatgatactgaaccttgattaataacagaaattcaggatgtaaagccacagaatgggatttattaatgtgggatacctcagactgtttgttttctttctgggaagaaaagtgtgttctataatgaataaatatagagtggttttt

SEQ ID NO: 805 - protein, 214 aa, Homo sapiens
  ref <308>: DATABASE ACCESSION NUMBER: SWISS-Prot / Q9UKL6
  ref <309>: DATABASE ENTRY DATE: 2002-06-15
MELAAGSFSEEQFWEACAELQQPALAGADWQLLVETSGISIYRLLDKKTGLYEYKVFGVLEDCSPTLLADIYMDSDYRKQWDQYVKELYEQECNGETVVYWEVKYPFPMSNRDYVYLRQRRDLDMEGRKIHVILARSTSMPQLGERSGVIRVKQYKQSLAIESDGKKGSKVFMYYFDNPGGQIPSWLINWAAKNGVPNFLKDMARACQNYLKKT

SEQ ID NO: 806 - DNA, 4258 bp, Rattus norvegicus
  ref <308>: DATABASE ACCESSION NUMBER: EMBL / AF041106
  ref <309>: DATABASE ENTRY DATE: 1998-01-20
ttttcgcggccctgaaatccggaacgtcactgttgagcgagccaaagtaaataaagaggacacgagccccaaactgcctcctcttaatagtgagactggcggcagcagcgctaatgttcctgacctgatggatgagtttatcgcagagcgacttcgaagtggcaatgcctcgactatgacaagaaggggaagtagtccaggcagccttgaaattccgaaagaccttcctgatattctaaacaagcagaatcagatgcgccctgttgatgaccctggtgtgccctcggaatggacgtctcctgccagtgcagggagcagtgatctcatgagctcagatagtcactcggattccttcagtgccttccagtgtgagggccgaaaatttgacaactttggcttcgggactgacattgggatcccatcttctgctgatgtggattcaggctctggccatcatcaaagcactgaggagcaggaagtggctagcctaacgacgcttcatttagactcagagacaagcagccttaatcaacaagcattctctgctgaagttgcaactgtcactggttcagaaagtgcttcccctgttcattcagctctggggtccaggtcacagacaccttccccttctacgctgaatatagatcacatggaacagaaggatctacagcttgatgagaagctccaccactctgttcttcagacgccagatgacctagaaatcagtgaatttccttctgaatgttgtagtgtgatggcaggaggtacgctcactgggtggcatgctgatgttgctactgttatgtggcgaagaatgcttggcattttgggagatgtcaatgctattatggatcctgaaatacatgctcaagtttttgattacctctgtgaactttggcagaatctagccaagatcagagataatcttggcatttcagccgataacctgacttcaccttctccacctgttttgattcctccactaagaattcttacaccttggctttttaaggcaaccatgttgactgataagtataaacaaggtaaattacatgcattgtggattgcttcatattgaccaggacatcgtcaatacgatcatcaagcactgctcacctcagtttttttcacttggtttgcctggggccacaatgcttattatggattttattatagcggctgggagagtggcttcttcagcttttcttaatgcaccaagagtggaagcacaggttcttctgggatctttggtttgcttccccaacttatactgtgagctgcctgctctgcatccaagcacgcctgacatcgctgtgtctcagttcacagacgtcaaggaacttataattaaaactgtcttaagctcggcaagagacgaaccctctggccctgcacgatgtgtagcactttgcagtttaggtatatggatttgtgaagaattagtccacgaatctcatcatcctcaaattaaagaagcactgaatgtaatttgtgtttcattaaagtttactaataaaacagttgcccatgtagcttgtaacatgcttcacatgctggttcattatgcacctagacttcagacttaccagcctgactctcccttgaaaattattcagatcctaatagcaactatcacacaccttttgccaagtacagaagcttcatcatatgaaatggacaagaggttggttgtgtcattacttctttgccttctggactggatcatggccttacctttaaagacactactccaatcagtccattctacaggagcagaaaatgagaagacagaaaaatctgtcctcaactgtatttataaggttttacatgggtgtgtatatggagcacaaagttttagccatccaaagtactttccaataagcctttctgatttggcatctgtagattatgacccttttatgcatttggaaagtctgagagagcctgaacctctacactctcctgattcagaacggtcttctaaactgcagccggtgacagaagtgaaaactcagatgcaacaaggattaatttctatagcagcccgtactgttattacccatctggtgaatcacctgggccattatccaatgagtggtggtcctgctatgctaacgagtcaggtgtgtgagaatcatgacaatcattatagcgaaagtactgaactttctcctgagctctttgacagtccaaatattcagttctttgtgctgaataatacaaccttagtgtcttgtatccagataagatcagaagagagtgtgcctggaggaggtttagctgctggccttgtgtcagccaactcaaatgttagaatcatagtacgtgatctctctggaaagtactcatgggattctgccatactgtatgggccacccattgtaagtggtttgcctgaacctacatctttcatactttcaatgtcttaccaagagaaaccagaagaacctcctacatctaatgaatgcttagaagacataacagtaaaagatggactttctctccagcttagaagatttagagaaactgttccaacttggtctacaataagagaagaagaagatgttcttgatgagctcctgcagtatttacgcactacaagtcctgaatgtttacagagaactggaatctccctcaatgttcctgctccacaacctgtgtgcatttctgaaaaacaggagaatgatgtcattaatgctatccttaagcaatacacagaagaaaaagagtttgtagaaaagcactttaatgacttaaacatgaaagcctcagaacaagatgaaccaacacctcagaaacctcagtcagcattttattactgcagattgcttcttagtatattgggaatgaattcctgggacaaacggaggagctttcatctcctgaagaaaaatgaaaagctgctcagagaactgaggaacttggattcaaggcagtgccgagaaacacacaagattgcagtattttacgttgctgaaggacaagaagataaatactccattctcaccaatataggaggaagccaagcatatgaagattttgttgctggccttggttgggaggtaaaccttacaaatcactgtggcttcatgggaggactgcagaagaacaaaagcactggactgaccactccatattttgctacctctacagtagaagtaatatttcatgtatctacaagaatgccttctgaatctgatgactctctgaccaaaaaaataaattggagaattgctctttctttctctataaaggattcagttggaattttgatggggattccattgactctgtagattgctttagttgagacatctaggaaatgatgaagtacacattgtttggtctgaacatactagagactacaggagaggaattattcctacagagtttggtgatgtcctcattgtaatatatccaatgaaaaaccacatgttcagtatccagatcatgaaaaagccagaggttcccttctttggtcccctttttgatggtgctattgtgaatggaaaagttctgcccattatggttcgatccacagcaataaatgctagccgtgctctgaaatcactgattccattgtatcaaaacttctacgaggagagagcacggtacctgcagacaattgtccagcaccacttagagccaacgacatttgaagactttgcagcccaggttttctctccagctccctaccatcatttccctgctgatgcagatcattaagtgtcagttctgtttatctgaaggatcctacccagagatcgcacccagtgacgctcccacagcagcacaggtagatggggctgacctggcttctcccatgtctcctcgaactagcaaaagccgcatgtccatgaagctgcgtcggtcctctggctcagccaataaatcctaaggagacaggcagcctggcagctcagcagcagtgttaactcttccaggccttgtgttcgccatgctccttcctgtgcatttatttgagaaaacactggacttaaaataattttcaacttactattttaaatttggactacttatttaattcagtttttttccacactgcaagctgccgtattttgagggttgagttttattccatacttcacgttcctagataatcatgtctaagtagtgttaccttcaagttcatgatgaatgttgagccaaaatatgattggacagatagtctcgtgttatttattgtgcctcattacaaactatgtgtttattgaatctcgtgccgaattcctgcagc

SEQ ID NO: 807 - protein, 747 aa, Rattus norvegicus
  ref <308>: DATABASE ACCESSION NUMBER: SWISS-Prot / AAB97075
  ref <309>: DATABASE ENTRY DATE: 2002-06-01
MHCGLLHIDQDIVNTIIKHCSPQFFSLGLPGATMLIMDFIIAAGRVASSAFLNAPRVEAQVLLGSLVCFPNLYCELPALHPSTPDIAVSQFTDVKELIIKTVLSSARDEPSGPARCVALCSLGIWICEELVHESHHPQIKEALNVICVSLKFTNKTVAHVACNMLHMLVHYAPRLQTYQPDSPLKIIQILIATITHLLPSTEASSYEMDKRLVVSLLLCLLDWIMALPLKTLLQSVHSTGAENEKTEKSVLNCIYKVLHGCVYGAQSFSHPKYFPISLSDLASVDYDPFMHLESLREPEPLHSPDSERSSKLQPVTEVKTQMQQGLISIAARTVITHLVNHLGHYPMSGGPAMLTSQVCENHDNHYSESTELSPELFDSPNIQFFVLNNTTLVSCIQIRSEESVPGGGLAAGLVSANSNVRIIVRDLSGKYSWDSAILYGPPIVSGLPEPTSFILSMSYQEKPEEPPTSNECLEDITVKDGLSLQLRRFRETVPTWSTIREEEDVLDELLQYLRTTSPECLQRTGISLNVPAPQPVCISEKQENDVINAILKQYTEEKEFVEKHFNDLNMKASEQDEPTPQKPQSAFYYCRLLLSILGMNSWDKRRSFHLLKKNEKLLRELRNLDSRQCRETHKIAVFYVAEGQEDKYSILTNIGGSQAYEDFVAGLGWEVNLTNHCGFMGGLQKNKSTGLTTPYFATSTVEVIFHVSTRMPSESDDSLTKKINWRIALSFSIKDSVGILMGIPLTL

SEQ ID NO: 808 - DNA, 2121 bp, Homo sapiens
  ref <308>: DATABASE ACCESSION NUMBER: EMBL / AL050050
  ref <309>: DATABASE ENTRY DATE: 2000-02-18
aaagatggactttccagtttaaaagatttagagaaactgtaccaacttgggatacaataagagatgaagaagatgctcttgatgaactcttgcagtatttgggtgttactagtcctgaatgcttacagagaactggaatctcacttaatattcctgctccacaacctgtgtgcatttctgaaaaacaagaaagtgatgttattaatgctatccttaagcaacatacagaagaaaaagaatttgttgagaagcactttaatgacttaaacatgaaagctgtggaacaagatgaaccaatacctcaaaaacctcagtcagcattttattattgcagattgcttcttagtatattgggaatgaattcctgggacaaacggaggagctttcatctcctgaagaaaaatgaaaagctacttagagaacttaggaacttggattcaaggcagtgccgagagacacacaagattgcagtattttatgttgctgaaggacaagaagacaaacactccattctcaccaatacaggaggaagtcaagcatatgaagattttgtagctggtcttggttgggaggtaaatcttacaaaccattgtggttttatgggaggactacaaaaaaacaaaagcactggattgaccactccatattttgctacctctacagtagaagtaatatttcacatgtcaacaagaatgccttctgattctgatgattctttgaccaaaaaattgagacatttgggaaatgatgaagtgcacattgtttggtcagagcatactagagactacaggagaggaattattcccacagaatttggtgatgtccttattgtaatatatccaatgaaaaatcacatgttcagtattcagataatgagaaaaccagaggttcccttctttggtcccctttttgatggtgctattgtgaatggaaaggttctacccattatggttagagcaacagctataaatgcaagccgtgctctgaaatctctgattccattgtatcaaaacttctatgaggagagagcacgatacctgcaaacaattgtccagcaccacttagaaccaacaacatttgaagattttgcagcacaggttttttctccagctccctaccaccatttaccatctggtgccgatcattaaatatcagttctgtttatctgaaggctcctacccagagattctacccagtgaaactcccacagcagcgcaggtagatggggctgacctggcctctccaatgtctcctcgaactagcaaaagccgcatgtccatgaagctgcgtcgttcctctggctcagccaataaatcctaaggagacaagcagcccagcagtgatcagcagtagccaccttagcatggacatagggttaaccctttcaggccttcatgtctgccataacatgcatgtttcttcctgtacatttatttgagaaaacactggatttaaataattttaaataatttgtagcttaatattaaagatttaagttatttattgtttcatttttttcccacaatccaagctgccatattttgagggcagggggagttttattctacaccctttaccttcctagataattatgtctaagtagttttatctttaatttcatggttaactgtgagccaaaatacaattggacaattagtctcattatttattgtgctccattgcaactttatggttcaataaatatataattttttacaaatgtaaaattttacatttaagcatttgtaaagttacagcaaaagatgtacctgttaatacacagaatgtgtacagattatttgttatgacaataaaacactcaaaataaatggtctttagcatctcaaattccaactgaaatcattttagtattaactcttcttcccaaagcaatgtctcatttcttggctgtgcaggtgatgccatgttatatccaataactagaaaaatcactgtgctgaacttttatgtttagcttccaagtatttttctaatgttttgcatttcaagtggtatcactgttaaatgccatttgttttcagattgtggccttttattattggctgctagatcctggtgtttctatgttcttttttaagcaccaaaaaaaaaaaaaaaaaa

SEQ ID NO: 809 - protein, 1023 aa, Homo sapiens
  ref <308>: DATABASE ACCESSION NUMBER: SWISS-Prot / BAA86586
  ref <309>: DATABASE ENTRY DATE: 2002-10-01
TILVRRSSSPAELDLKDDLQQTQGKCRERQKSESTNSDTTLGCTNEAELSMGPWQTCEEDPELNTPTDVVADADARHWLQLSPTDASNLTDSSECLTDDCSIIAGGSLTGWHPDSAAVLWRRVLGILGDVNNIQSPKIHARVFCYLYELWYKLAKIRDNLAISLDNQSSPSPPVLIPPLRMFASWLFKAATLPNEYKEGKLQAYRLICAMMTRRQDVLPNSDFLVHFYLVMHLGLTSEDQDILNTIIRHCPPRFFSLGFPGFSMLVGDFITAAARVLSTDILTAPRSEAVTVLGSLVCFPNTYQEIPLLQSVPEVNEAITGTEDVKHYLINILLKNATEEPNEYARCIAVCSLGVWICEELAQCTSHPQVKEAINVIGVTLKFPNKIVAQVACDVLQLLVSYWEKLQMFETSLPRKMAEILVATVAFLLPSAEYSSVETDKKFIVSLLLCLLDWCMALPVSVLLHPVSTAVLEEQHSARAPLLDYIYRVLHCCVCGSSTYTQQSHYILTLADLSSTDYDPFLPLANVKSSEPVQYHSSAELGNLLTVEEEKKRRSLELIPLTARMVMAHLVNHLGHYPLSGGPAILHSLVSENHDNAHVEGSELSFEVFRSPNLQLFVFNDSTLISYLQTPTEGPVGGSPVGSLSDVRVIVRDISGKYSWDGKVLYGPLEGCLAPSGRNPSFLISSWHRDTFGPQKDSSQVEEGDDVLDKLLENIGHTSPECLLPSQLNLNEPSLTPCGMNYDQEKEIIEVILRQNAQEDEYIQSHNFDSAMKVTSQGQPSPVEPRGPFYFCRLLLDDLGMNSWDRRKNFHLLKKNSKLLRELKNLDSRQCRETHKIAVFYIAEGQEDKCSILSNERGSQAYEDFVAGLGWEVDLSTHCGFMGGLQRNGSTGQTAPYYATSTVEVIFHVSTRMPSDSDDSLTKKLRHLGNDEVHIVWSEHSRDYRRGIIPTAFGDVSIIIYPMKNHMFFIAITKKPEVPFFGPLFDGAIVSGKLLPSLVCATCINASRAVKCLIPLYQSPRVR

SEQ ID NO: 810 - DNA, 3344 bp, Rattus norvegicus
  misc_feature (1)..(3344): n=a, c, g or t
  ref <308>: DATABASE ACCESSION NUMBER: EMBL / AF041107
  ref <309>: DATABASE ENTRY DATE: 1998-01-20
gcattatggagtagttattcatngcaccccggcttaaaatttangttccggntngtatgtggggggaattggagcggataacaattcacacnggaaacagttagaccatgattangatttctaacaccttggctttttaaggcaaccatgttgactgataagtataaacaagntaaattacatgcatataaatttatttgtaatacaatgaagagagacaagatgtatccccaaatagagattttttaacgcatttctacaatataatgcattgtggattgcttcatattgaccaggacatcgtcaatacgatcatcaagcactgctcacctcagtttttttcacttggtttgcctggggccacaatgcttattatggattttattatagcggctgggagagtggcttcttcagcttttcttaatgcaccaagagtggaagcacaggttcttctgggatctttggtttgcttccccaacttatactgtgagctgcctgctctgcatccaagcacgcctgacatcgctgtgtctcagttcacagacgtcaaggaacttataattaaaactgtcttaagctcggcaagagacgaaccctctggccctgcacgatgtgtagcactttgcagtttaggtatatggatttgtgaagaattagtccacgaatctcatcatcctcaaattaaagaagcactgaatgtaatttgtgtttcattaaagtttactaataaaacagttgcccatgtagcttgtaacatgcttcacatgctggttcattatgcacctagacttcagacttaccagcctgactctcccttgaaaattattcagatcctaatagcaactatcacacaccttttgccaagtacagaagcttcatcatatgaaatggacaagaggttggttgtgtcattacttctttgccttctggactggatcatggccttacctttaaagacaatactccaatcagtccattctacaggagcagaaaatgagaagacagaaaaatctgtcctcaactgtatttataaggttttacatgggtgtgtatatggagcacaaagttttagccatccaaagtactttccaataagcctttctgatttggcatctgtagattatgacccttttatgcatttggaaagtctgagagagcctgaacctctacactctcctgattcagaacggtcttctaaactgcagccggtgacagaagtgaaaactcagatgcaacaaggattaatttctatagcagcccgtactgttattacccatctggtgaatcacctgggccattatccaatgagtggtggtcctgctatgctaacgagtcaggtgtgtgagaatcatgacaatcattatagcgaaagtactgaactttctcctgagctctttgacagtccaaatattcagttctttgtgctgaataatacaaccttagtgtcttgtatccagataagatcagaagagagtgtgcctggaggaggtttagctgctggccttgtgtcagccaactcaaatgttagaatcatagtacgtgatctctctggaaagtactcatgggattctgccatactgtatgggccacccattgtaagtggtttgcctgaacctacatctttcatactttcaatgtcttaccaagagaaaccagaagaacctcctacatctaatgaatgcttagaagacataacagtaaaagatggactttctctccagcttagaagatttagagaaactgttccaacttggtctacaataagagaagaagaagatgttcttgatgagctcctgcagtatttacgcactacaaatcctgaatgtttacagagaactggaatctccctcaatgttcctgctccacaacctgtgtgcatttctgaaaaacaggagaatgatgtcattaatgctatccttaagcaatacacagaagaaaaagagtttgtagaaaagcactttaatgacttaaacatgaaagcctcagaacaagatgaaccaacacctcagaaacctcagtcagcattttattactgcagattgcttcttagtatattgggaatgaattcctgggacaaacggaggagctttcatctcctgaagaaaaatgaaaagctgctcagagaactgaggaacttggattcaaggcagtgccgagaaacacacaagattgcagtattttacgttgctgaaggacaagaagataaatactccattctcaccaatataggaggaagccaagcatatgaagattttgttgctggccttggttgggaggtaaaccttacaaatcactgtggcttcatgggaggactgcagaagaacaaaagcactggactgaccactccatattttgctacctctacagtagaagtaatatttcatgtatctacaagaatgccttctgaatctgatgactctctgaccaaaaaattgagacatctaggaaatgatgaagtacacattgtttggtctgaacatactagagactacaggagaggaattattcctacagagtttggtgatgtcctcattgtaatatatccaatgaaaaaccacatgttcagtatccagatcatgaaaaagccagaggttcccttctttggtcccctttttgatggtgctattgtgaatggaaaagttctgcccattatggttcgatccacagcaataaatgctagccgtgctctgaaatcactgattccattgtatcaaaacttctacgaggagagagcacggtacctgcagacaattgtccagcaccacttagagccaacgacatttgaagactttgcagcccaggttttctctccagctccctaccatcatttccctgctgatgcaggtaagaataaaagagagtgttgatcacttgtcacaaacccaaaatgcaatacccttttcttctcaatcatggttgaataaaattcaggtcattgaaatatattattcatgactgagtttggcctgtaaatttcattgtttccttttatgtaaatgtggttgcttaaatatccagtaatcctcatcaaagtgcatgacccatatctaaccacagtccctggctcctgcttttcatgagaatctgaagtatctgcagaaagaactctcaacttcagaggatcaaattttatggccaaaaatacagtgtcatcatctctaantttacaagtaaagctaaaccagtctagattaaaagcatttagtacagcaaattatgttataatattcaaagactttaagaaggtactgcattaatacatttaactaattttaaggaaatcagcaataaaaatgctcatggctcgtgccgaattcctgcagcccggggggatcactaattct

SEQ ID NO: 811 - protein, 1809 aa, Rattus norvegicus
  ref <308>: DATABASE ACCESSION NUMBER: SWISS-Prot / P49816
  ref <309>: DATABASE ENTRY DATE: 2002-06-15
MAKPTSKDSGLKEKFKILLGLGTSRPNPRCAEGKQTEFIITAEILRELSGECGLNNRIRMIGQICDVAKTKKLEEHAVEALWKAVSDLLQPERPPEARHAVLALLKAIVQGQGDRLGVLRALFFKVIKDYPSNEDLHERLEVFKALTDNGRHITYLEEELAEFVLQWMDVGLSSEFLLVLVNLVKFNSCYLDEYIAPMVHMICLLCIRTVSSVDIEVSLQVLDAVVCYNCLPAESLPLFIITLCRTVNVKELCEPCWKLMRNLLGTHLGHSAIYNMCRIMENRSYMEDAPLLRGAVFFVGMALWGAHRLYSLKNSPTSVLPSFYEAMTCPNEVVSYEIVLSITRLIKKYRKELQAVTWDILLDIIERLLQQLQNLDSPELRTIVHDLLTTVEELCDQNEFHGSQERYYELVESYADQRPESSLLNLITYRAQSIHPAKDGWIQNLQLLMERFFRNECRSAVRIKVLDVLSFVLLINRQFYEEELINSVVISQLSHIPEDKDHQVRKLATQLLVDLAEGCHTHHFNSLLDIIEKVMARSLSPPLELEERDLAVYSASLEDVKTAVLGLLVILQTKLYTLPASHATRVYETLISHIQLHYKHGYSLPIASSIRLQAFDFLLLLRADSLHRLGLPNKDGVVRFSPYCLCDCAELDRASEKKASGPLSPPTGPPSPVPTGPAVRLGHLPYSLLFRVLLQCLKQETDWKVLKLVLSKLPESLRYKVLIFTSPCSVDQLSSALCSMLSAPKTLERLRGTPEGFSRTDLHLAVVPVLTALISYHNYLDKTRQREMVYCLEQGLIYRCASQCVVALAICSVEMPDIIIKALPVLVVKLTHISATASMAIPLLEFLSTLARLPHLYRNFAAEQYASVFAISLPYTNPSKFNQYIVCLAHHVIAMWFIRCRLPFRKDFVPYITKGLRSNVLLSFDDTPEKDKFRARSTSLNERPKSLRIARAPKQGLNNSPPVKEFKESCAAEAFRCRSISVSEHVVRSRIQTSLTSASLGSADENSMAQADDNLKNLHLELTETCLDMMARYVFSNFTAVPKRSPVGEFLLAGGRTKTWLVGNKLVTVTTSVGTGTRSLLGLDSGDLQGGSASSSDPGTHVRQTKEAPAKLESQAGQQVSRGARDRVRSMSGGHGLRVGVLDTSAPYTPGGPASLGAQAAPAARPEKPCAGAQLPAAEKANLAAYVPLLTQGWAEILVRRPTGNTSWLMSLENPLSPFSSDINNMPLQELSNALMAAERFKEHRDTALYKSLSVPAAGTAKPPTLPRSNTVASFSSLYQPSCQGQLHRSVSWADSAVVLEEGSPGEAHVPVEPPELEDFEAALGTDRHCQRPDAYSRSSSASSQEEKSHLEELAAGGIPIERAISSEGARPTVDLSFQPSQPLSKSSSSPELQTLQDILGDLGDKTDIGRLSPEAKVRSQSGILDGEAATWSAPGEESRITVPPEGPLPSSSPRSPSGLRPRGYTISDSAPSRRGKRVERDNFKSRTAASSAEKVPGINPSFVFLQLYHSPFCGDESNKPILLPNESFERSVQLLDQIPSYDTHKIAVLYVGEGQSSSELAILSNEHGSYRYTEFLTGLGRLIELKDCQPDKVYLGGLDVCGEDGQFTYCWHDDIMQAVFHIATLMPTKDVDKHRCDKKRHLGNDFVSIIYNDSGEDFKLGTIKGQFNFVHVIITPLDYKCNLLTLQCRKDMEGLVDTSVAKIVSDRNLSFVARQMALHANMASQVHHRRSNPTDIYPSKWIARLRHIKRLRQRIREEVHYSNPSLPLMHPPAHTKVPAQAPTEATPTYETGQRKRLISSVDDFTEFV

SEQ ID NO: 812 - DNA, 2121 bp, Homo sapiens; identical to SEQ ID NO: 808
  ref <308>: DATABASE ACCESSION NUMBER: EMBL / AL050050
  ref <309>: DATABASE ENTRY DATE: 2000-02-18

SEQ ID NO: 813 - DNA, 3344 bp, Rattus norvegicus; identical to SEQ ID NO: 810
  misc_feature (1)..(3344): n=a, c, g or t
  ref <308>: DATABASE ACCESSION NUMBER: EMBL / AF041107
  ref <309>: DATABASE ENTRY DATE: 1998-01-20

SEQ ID NO: 814 - protein, 1809 aa, Rattus norvegicus; identical to SEQ ID NO: 811
  ref <308>: DATABASE ACCESSION NUMBER: SWISS-Prot / P49816
  ref <309>: DATABASE ENTRY DATE: 2002-06-15

SEQ ID NO: 815 - DNA, 2121 bp, Homo sapiens; identical to SEQ ID NO: 808
  ref <308>: DATABASE ACCESSION NUMBER: EMBL / AL050050
  ref <309>: DATABASE ENTRY DATE: 2000-02-18

SEQ ID NO: 816 - DNA, 3344 bp, Rattus norvegicus; identical to SEQ ID NO: 810
  misc_feature (1)..(3344): n=a, c, g or t
  ref <308>: DATABASE ACCESSION NUMBER: EMBL / AF041107
  ref <309>: DATABASE ENTRY DATE: 1998-01-20

SEQ ID NO: 817 - protein, 1809 aa, Rattus norvegicus; identical to SEQ ID NO: 811
  ref <308>: DATABASE ACCESSION NUMBER: SWISS-Prot / P49816
  ref <309>: DATABASE ENTRY DATE: 2002-06-15

SEQ ID NO: 818 - DNA, 2121 bp, Homo sapiens; identical to SEQ ID NO: 808
  ref <308>: DATABASE ACCESSION NUMBER: EMBL / AL050050
  ref <309>: DATABASE ENTRY DATE: 2000-02-18

SEQ ID NO: 819 - DNA, 3344 bp, Rattus norvegicus; identical to SEQ ID NO: 810
  misc_feature (1)..(3344): n=a, c, g or t
  ref <308>: DATABASE ACCESSION NUMBER: EMBL / AF041107
  ref <309>: DATABASE ENTRY DATE: 1998-01-20

SEQ ID NO: 820 - protein, 1809 aa, Rattus norvegicus; identical to SEQ ID NO: 811
  ref <308>: DATABASE ACCESSION NUMBER: SWISS-Prot / P49816
  ref <309>: DATABASE ENTRY DATE: 2002-06-15

SEQ ID NO: 821 - DNA, 2121 bp, Homo sapiens; identical to SEQ ID NO: 808
  ref <308>: DATABASE ACCESSION NUMBER: EMBL / AL050050
  ref <309>: DATABASE ENTRY DATE: 2000-02-18

SEQ ID NO: 822 - DNA, 1921 bp, Rattus norvegicus
  ref <308>: DATABASE ACCESSION NUMBER: EMBL / AF041373
  ref <309>: DATABASE ENTRY DATE: 2001-09-11
gaggggtggcggacgagctgcagagatgtctggccagagcctgacggaccgaatcaccgcggcccagcacagtgtcactggctccgcggtatctaagacagtatgcaaggccacgacccacgagatcatgggccccaagaaaaagcacctggactacttaattcagtgtacaaatgagatgaatgtgaatatcccacagttggcagacagtttgtttgaaagaactactaatagtagttgggtggtggtcttcaaatcactcattacaactcatcatttgatggtgtatggaaacgagcgtttcattcagtatttggcttcaagaaacacattgtttaacttaagcaactttttggataaaagtggattgcaaggatatgatatgtctacatttattagacgatatagtaggtacctaaatgaaaaggcagtttcatacagacaagttgcattcgatttcacaaaagtgaagagaggagctgatggagttatgagaacaatgaacacagaaaaactgttaaaaactgtaccaattatccaaaatcaaatggatgcacttcttgattttaatgttaatagtaatgaacttacaaatggggtaataaatgctgccttcatgctcctgttcaaagatgccattagactatttgcagcatacaatgaaggaattattaatttattggaaaaatattttgatatgaaaaagaaccagtgcaaagaaggtcttgacatctataagaagtttttgactaggatgacaagaatctcagagtttctgaaagttgcagagcaagttggaattgacagaggagatattccagatctttcacaggcccccagcagtcttcttgatgctttagaacaacatttagcttccttggaagggaagaaaatcaaagattccacagctgcaagcagggctacaacactttccaatgcagtctcttctttggcaagcactggcctatctctgaccaaagtggatgaaagggaaaagcaggcagcattagaggaagaacaggctcgattaaaagcactaaaggaacagcgtctaaaagaacttgcaaagaaaccgcatacctctttaacaactgcagcctctcctgtgtccacctcagcagggggaataatgactgcaccagccatcgacatattttctacccctagttcttctaacagcacatccaagctgccaaatgacctgcttgatttgcagcagccaacctttcatccatctgtccatgctatgtcagctgctcctcaggtagcaagtacatggggaggattcagtccttctccggttacacagccacatccttcagctggccttaatgttgactttgaatctgtgtttggaaataagtctacgaatgttgctgtagattctggtggtggacttctcaaaccaacagtggcctctcagaaccagagtcttcctgttgccaaacttccgcctaacaaattagtgtctgatgacttggattcatctttagccaaccttgtgggcaatcttggcattggaaatggaaccactaagaatgatgtaagttgcagtcaaccaggtgaaaagaagttaactggaggatctaactggcaaccaaaggtcgcaccaacaactgcctggagtgctgcaacaatggcaccccctgtaatggcctatcctgctactacaccaacgggcatgataggatatggaattcctcctcagatgggaagtgtacctgtaatgacacagccaaccttaatatacagccagcctgtcatgagaccgccaaacccctttggccctgtaccaggagcacagatacagtttatgtaactagatggaagagaatggaattactccaagaatagaagtgcacaggtggcgactccttacttccagcaaaatccaaactgctgtctctaagactcttcctcc

SEQ ID NO: 823 - protein, 597 aa, Rattus norvegicus
  ref <308>: DATABASE ACCESSION NUMBER: SWISS-Prot / AAB97078
  ref <309>: DATABASE ENTRY DATE: 2001-12-01
MSGQSLTDRITAAQHSVTGSAVSKTVCKATTHEIMGPKKKHLDYLIQCTNEMNVNIPQLADSLFERTTNSSWVVVFKSLITTHHLMVYGNERFIQYLASRNTLFNLSNFLDKSGLQGYDMSTFIRRYSRYLNEKAVSYRQVAFDFTKVKRGADGVMRTMNTEKLLKTVPIIQNQMDALLDFNVNSNELTNGVINAAFMLLFKDAIRLFAAYNEGIINLLEKYFDMKKNQCKEGLDIYKKFLTRMTRISEFLKVAEQVGIDRGDIPDLSQAPSSLLDALEQHLASLEGKKIKDSTAASRATTLSNAVSSLASTGLSLTKVDEREKQAALEEEQARLKALKEQRLKELAKKPHTSLTTAASPVSTSAGGIMTAPAIDIFSTPSSSNSTSKLPNDLLDLQQPTFHPSVHAMSAAPQVASTWGGFSPSPVTQPHPSAGLNVDFESVFGNKSTNVAVDSGGGLLKPTVASQNQSLPVAKLPPNKLVSDDLDSSLANLVGNLGIGNGTTKNDVSCSQPGEKKLTGGSNWQPKVAPTTAWSAATMAPPVMAYPATTPTGMIGYGIPPQMGSVPVMTQPTLIYSQPVMRPPNPFGPVPGAQIQFM

SEQ ID NO: 824 - DNA, 2343 bp, Homo sapiens
  misc_feature (1)..(2343): n=a, c, g or t
  ref <308>: DATABASE ACCESSION NUMBER: Refseq / NM_007166
  ref <309>: DATABASE ENTRY DATE: 2000-11-02
gcgcggccccgaaccgccgccaggccggcacgggggaaggagccggtgggggtagggggtgcggtggggggtggggaccctccggctcttgggggtcccagtccccgccggctgctgagcgggtggggtggtggaggagctgcagagatgtccggccagagcctgacggaccgaatcactgccgcccagcacagtgtcaccggctctgccgtatccaagacagtatgcaaggccacgacccacgagatcatggggcccaagaaaaagcacctggactacttaattcagtgcacaaatgagatgaatgtgaacatcccacagttggcagacagtttatttgaaagaactactaatagtagttgggtggtggtcttcaaatctctcattacaactcatcatttgatggtgtatggaaatgagcgttttattcagtatttggcttcaagaaacacgttgtttaacttaagcaattttttggataaaagtggattgcaaggatatgacatgtctacatttattaggcggtatagtagatatttaaatgagaaagcagtttcatacagacaagttgcatttgatttcacaaaagtgaagagaggggctgatggagttatgagaacaatgaacacagaaaaactcctaaaaactgtaccaattattcagaatcaaatggatgcacttcttgattttaatgttaatagcaatgaacttacaaatggggtaataaatgctgccttcatgctcctgttcaaagatgccattagactgtttgcagcataccatgaaggaattattaatttgttggaaaaatattttgatatgaaaaagaaccaatgcaaagaaggtcttgacatctataagaagttcctaactaggatgacaagaatctcagagttcctcaaagttgcagagcaagttggaattgacagaggtgatataccagacctttcacaggcccctagcagtcttcttgatgctttggaacaacatttagcttccttggaaggaaagaaaatcaaagattctacagctgcaagcagggcaactacactttccaatgcagtgtcttccctggcaagcactggtctatctctgaccaaagtggatgaaagggaaaagcaggcagcattagaggaagaacaggcacgtttgaaagctttaaaggaacagcgcctaaaagaacttgcaaagaaacctcatacctctttaacaactgcagcctctcctgtatccacctcagcaggagggataatgactgcaccagccattgacatattttctacccctagttcttctaacagcacatcaaagctgcccaatgatctgcttgatttgcagcagccaacttttcacccatctgtacatcctatgtcaactgcttctcaggtagcaagtacatggggagatcctttctctgctactgtagatgctgttgatgatgccattccaagcttaaatcctttcctcacaaaaagtagtggtgatgttcacctttccatttcttcagatgtatctacttttactactaggacacctactcatgaaatgtttgttggattcactccttctccagttgcacagccacacccttcagctggccttaatgttgactttgaatctgtgtttggaaataaatctacaaatgttattgtagattctgggggctttgatgaactaggtggacttctcaaaccaacagtggcctctcagaaccagaaccttcctgttgccaaactcccacctagcaagttagtatctgatgacttggattcatctttagccaaccttgtgggcaatcttggcatcggaaatggaaccactaagaatgatgtaaattggagtcaaccaggtgaaaagaagttaactgggggatctaactgcgaaccaaaggttgcaccaacaaccgcttggaatgctgcaacaatggcaccccctgtaatggcctatcctgctactacaccaacaggcatgataggatatggaattcctccacaaatgggaagtgttcctgtaatgacgcaaccaaccttaatatacagccagcctgtcatgagacctccaaacccctttggccctgtatcaggagcacagatacagtttatgtaacttgatggaagaaaatggaattactccaaaaagacaagtgctcaagcagcaaaatccttacttccagcaaaatccaaactgctgtctcttaaatctcttaaactctcttcttccattaggatgctacaagtanctcagtgaaggcccatgaagggaattggggactagtttatagggngaacgtattcattacagtttataaaggccaggattggnttggattttaggattangttc

SEQ ID NO: 825 - protein, 652 aa, Homo sapiens
  ref <308>: DATABASE ACCESSION NUMBER: Refseq / NP_009097
  ref <309>: DATABASE ENTRY DATE: 2000-11-02
MSGQSLTDRITAAQHSVTGSAVSKTVCKATTHEIMGPKKKHLDYLIQCTNEMNVNIPQLADSLFERTTNSSWVVVFKSLITTHHLMVYGNERFIQYLASRNTLFNLSNFLDKSGLQGYDMSTFIRRYSRYLNEKAVSYRQVAFDFTKVKRGADGVMRTMNTEKLLKTVPIIQNQMDALLDFNVNSNELTNGVINAAFMLLFKDAIRLFAAYHEGIINLLEKYFDMKKNQCKEGLDIYKKFLTRMTRISEFLKVAEQVGIDRGDIPDLSQAPSSLLDALEQHLASLEGKKIKDSTAASRATTLSNAVSSLASTGLSLTKVDEREKQAALEEEQARLKALKEQRLKELAKKPHTSLTTAASPVSTSAGGIMTAPAIDIFSTPSSSNSTSKLPNDLLDLQQPTFHPSVHPMSTASQVASTWGDPFSATVDAVDDAIPSLNPFLTKSSGDVHLSISSDVSTFTTRTPTHEMFVGFTPSPVAQPHPSAGLNVDFESVFGNKSTNVIVDSGGFDELGGLLKPTVASQNQNLPVAKLPPSKLVSDDLDSSLANLVGNLGIGNGTTKNDVNWSQPGEKKLTGGSNCEPKVAPTTAWNAATMAPPVMAYPATTPTGMIGYGIPPQMGSVPVMTQPTLIYSQPVMRPPNPFGPVSGAQIQFM

SEQ ID NO: 826 - DNA, 1272 bp, Rattus norvegicus
  ref <308>: DATABASE ACCESSION NUMBER: EMBL / AF045464
  ref <309>: DATABASE ENTRY DATE: 2000-03-03
gaattcgactgctggaaccaacgtcctctcttaccctccaccttcttctgccacctctaccacggtcaccatgtcgcaagcccggcctgccactgtgctgggtgccatggagatgggtcgccgcatggatgtgacctccagctccgcgtcggtgcgcgccttcctgcagcgcggccacacggagatagacaccgccttcgtgtatgcgaacggtcagtctgagaccatcctaggagacctggggctcggactgggccgcagcggctgcaaagtaaaaattgccaccaaggctgccccaatgtttgggaagacactgaagccagccgatgttcggttccagctggagacgtcactgaagaggctgcagtgtccccgggtggacctcttctatttacactttccagaccacggcactcctatagaggagaccctgcaggcctgccaccagctgcatcaggagggcaagtttgtggagcttggtctgtccaactatgtctcctgggaagtggctgagatttgtaccctctgcaagaaaaatggctggatcatgccaactgtgtaccagggcatgtacaacgccatcaccaggcaggtggagactgagctcttcccctgcctcagacacttcggactaaggttctacgccttcaaccctttggctgggggcctgctgactggcagatataaataccaggataaggatgggaagaatcctgagagccgcttctttgggaatccattttctcaactgtacatggaccgctactggaaggaggaacacttcaatggcatcgccttggtggagaaggctctgaagactacctatggccccactgcccccagtatgatctcagctgccgtacggtggatgtaccatcactcacagctcaagggcacccaaggggatgcagtcattctgggcatgtccagtctggaacaactggagcagaacttggccttggtcgaggaagggcctctggagccagctgttgtggatgcctttgaccaagcctggaacctagttgcccacgagtgtcccaactatttccgctaagatacatctgccttggggatggcgcagcttactgcctgccccgccttgtcctgggctcgatctgatctggttctttcctttttagacaggtcactgtctttttcttccctgctttctatacagccagttgctttcaaagtgagagctggctgagccccaatacctcctgctgaataaaactgttccctgtcacagcctgggctacaactggcggccga

SEQ ID NO: 827 - protein, 327 aa, Rattus norvegicus
  ref <308>: DATABASE ACCESSION NUMBER: SWISS-Prot / P38918
  ref <309>: DATABASE ENTRY DATE: 2001-10-16
MSQARPATVLGAMEMGRRMDVTSSSASVRAFLQRGHTEIDTAFVYANGQSETILGDLGLGLGRSGCKVKIATKAAPMFGKTLKPADVRFQLETSLKRLQCPRVDLFYLHFPDHGTPIEETLQACHHVHQEGKFVELGLSNYVSWEVAEICTLCKKNGWIMPTVYQGMYNAITRQVETELFPCLRHFGLRFYAFNPLAGGLLTGRYKYQDKDGKNPESRFFGNPFSQLYMDRYWKEEHFNGIALVEKALKTTYGPTAPSMISAAVRWMYHHSQLKGTQGDAVILGMSSLEQLEQNLALVEEGPLEPAVVDAFDQAWNLVAHECPNYFR

SEQ ID NO: 828 - DNA, 1247 bp, Homo sapiens
  misc_feature (1)..(1247): n=a, c, g or t
  ref <308>: DATABASE ACCESSION NUMBER: Refseq / NM_012067
  ref <309>: DATABASE ENTRY DATE: 2000-11-02
ggaattcgccgcccgctccgagcctggtgcttccgaccgctgcgcgcggctcctgggctgtcacagtctcccgttgccgccgtcatgtcccggcagctgtcgcgggcccggccagccacggtgctgggcgccatggagatggggcgccgcatggacgcgcccaccagcgccgcagtcacgcgcgccttcctggagcgcggccacaccgagatagacacggccttcgtgtacagcgacggccagtccgagaccatccttggcggcctggggctccggctgggcggcagcgactgcagagtgaaaattgataccaaggccattccactgtttgggaactccctgaagcctgacagtctccggttccagctggagacgtcactgaagcggctgcagtgtccccgagtggacctcttctacctgcatatgccagaccacagcaccccggtggaagagacactgcgtgcctgccaccagctgcaccaggagggcaagttcatggagcttggcctctccaactatgcagcctgggaagtggccgagatctgtaccctctgcaagagcaacggctggatcctgcccactgtgtaccagggcatgtacaatgccatcacccggcaggtggaaacggagctcttcccctgcctcaggcactttggactgaggttctatgccttcaaccctctggctgggggcctgctgaccggcaagtacaagtatgaggacaaggatgggaaacagcctgtgggccgcttctttgggaatacctgggcagagatgtacaggaatcgctactggaaggagcaccactttgagggcattgccctggtggagaaggccctgcaggccgcgtatggcgccagcgcccccagcatgacctcggccaccctccggtggatgtaccaccactcacagctgcagggtgcccacggggacgcggtcatcctgggcatgtccagcctggagcagctggagcagaacttggcagcggcagaggaagggcccctggagccggctgtcgtggacgcctttaatcaagcctggcatttggttgctcacgaatgtcccaactacttccgctaggcccatcgtttctcaggctgcccaaggctcttctgtaacatcttttgttactcacattttctttaatttagaactgcctcagtaaattcttagggatggaagtntttggacaaaaacctaatagaagagtcaccaccaaatgaagaataaaactcccaaaaaaaaaa

SEQ ID NO: 829 - protein, 331 aa, Homo sapiens
  ref <308>: DATABASE ACCESSION NUMBER: SWISS-Prot / O95154
  ref <309>: DATABASE ENTRY DATE: 2001-10-16
MSRQLSRARPATVLGAMEMGRRMDAPTSAAVTRAFLERGHTEIDTAFVYSEGQSETILGGLGLRLGGSDCRVKIDTKAIPLFGNSLKPDSLRFQLETSLKRLQCPRVDLFYLHMPDHSTPVEETLRACHQLHQEGKFVELGLSNYAAWEVAEICTLCKSNGWILPTVYQGMYNAITRQVETELFPCLRHFGLRFYAFNPLAGGLLTGKYKYEDKNGKQPVGRFFGNTWAEMYRNRYWKEHHFEGIALVEKALQAAYGASAPSMTSATLRWMYHHSQLQGAHGDAVILGMSSLEQLEQNLAAAEEGPLEPAVVDAFNQAWHLVTHECPNYFR

SEQ ID NO: 830 - DNA, 2718 bp, Rattus norvegicus
  ref <308>: DATABASE ACCESSION NUMBER: EMBL / AF045564
  ref <309>: DATABASE ENTRY DATE: 1999-05-21
gaccgagtgactcaggcttttgtttgccccttctggttcagcaaattcccttctcggcaagatgccggagtgctgggatggggaacatgacattgagacgccttatggcctcctgcatgtggtgatccggggctctcccaaagggaaccgcccagccatccttacctaccacgatgtgggtctcaatcacaagctgtgcttcaacaccctgttcaacttggaggacatgcaggagatcaccaaacacttcgtggtgtgccatgtggacgcccctgggcagcaggtgggagcgtcacagttccctcagggataccagttcccctccatggagcagctggcgaccatgctcccgaatgtggtacagcactttggattcaagtacgtgattggcatcggagtgggggccggagcgtatgtgctcgccaagtttgcactcatcttccctgatttggtggaggggctggtgttgatgaacattgaccccaatggcaaaggctggattgattgggctgccacgaagctctccggcttgaccagcactttgccagatactgtactctcccatctcttcagccaggaggagctggtgaacaacacggagctggtgcagagctaccggcagcagatctcgagcgtggtgaaccaggccaaccttcagctcttctggaacatgtacaatagccgcagagatcttgacattaaccggcctgggacagtgcccaatgccaagacactccgctgcccagtgatgctggtggtcggtgacaatgcacctgctgaggacggggtggttgagtgtaactccaaactggacccaaccactacaaccttcctgaagatggcagactctggtggtcttcctcaggtgacccagccagggaagctgactgaggccttcaaatacttcctgcagggcatgggctacattgcacacttgaaggaccgaaggctcagtggaggagcagtgccctcagccagcatgacccgccttgcgcgctctcgtaccgcgtccctcaccagcgccagttctgtggatggtagccgccctcagccctgcacccactcagacagcagtgaggggatgggccaggtcaaccacaccatggaggtgtcctgctgaagtcctcgtcctgcccaagacacccgcttacctgcccccaggtcccactgccatcttcgcaccggctcatcttccctctggtttatttttgtgagagtgaaggggaggaaatggggttacttctcttttacttaaaacgaagggatccaccttaggacggcgcagaacaacagtcttagaggatgtgaagggctcaccttatacactcgcatctcaccggccaccggttgatacggcccccttcgtctgcccgtctggggtgtggccaggatgtaggacatagtacgaaagaaagcacagcccaccccctggagctggcagatagggagtttgaagatggcaggtgctgagccaaggctctgttgtgagtgggagtcagaccagtggggagccgtcccttttctgtaacccttgtaccaagcacacctaacagtagaggtgacagtcatgaggacagtagccacaagagagcgctctgagcagtcagccattttcctggtgctctctgggcaggacatgatagaaggctagccaggctgaagacagaatatggagaaccctgacatgggggcaggaaccccatactctgccaccacagggccatgtcccaccctgaggcaaaggtcacctggtctctcttgtccccgttggtagaggtgaaatgttgatggctttgtatgctgtgtacagcccctgagaacttcatggttgcccctttgggagctggcaggtactgtaggtccctcctatcccaggtttcaaacagcgagtgtttgtcacagtgccctggtcgacctgggccggcgtgtcacagacattattacttgagaagtgagcattaggaagatacaagacagaaagatacaatgacctctgcttgctgaaggggctggaaatggcctgctccttgtgtgggagatgggttattctccagatgaacaaaggctccgtacctcctacagcccgcaactatgtctgccacctgaccatgtagactctcacagcccagagctattgtgtcagccatccccagagaagagagagcacttaagtgtgaatatggggtgggcgtgatgtatgtggtgttgtgtgggtgttctgaggcaggaggacacctacatccgtgtgtctgtggcatatgccaccccttctttctgtaactgtaagccatttccagactgctctgaagtccagtggagtgtatcctatccctggttctgttcactcacgtgcttccgtgaataccgagtgtgactgtttaaagctggcagaattaatcccttactgtagatagcacttcaagtattggacatctttttgctgtgttcttaagatatctataaatacctatacattatatatatatgtatgtatatcgggtccttctgtatgtggtttcccattgatggttgtcttctctttggtcaggatgaacttttaatggagttcattacttccctctctgtacaaagttaagagcctaattttgtgtattctggtggctgataagagactttgagattacaaaatgcaaaacaaaaatccttattgatatagaaagatatctgtgcagaaaaactaataaagaaattaagcgt

SEQ ID NO: 831 - protein, 352 aa, Rattus norvegicus
  ref <308>: DATABASE ACCESSION NUMBER: SWISS-Prot / Q9Z2L9
  ref <309>: DATABASE ENTRY DATE: 2002-06-15
MPECWDGEHDIETPYGLLHVVIRGSPKGNRPAILTYHDVGLNHKLCFNTLFNLEDMQEITKHFVVCHVDAPGQQVGASQFPQGYQFPSMEQLATMLPNVVQHFGFKYVIGIGVGAGAYVLAKFALIFPDLVEGLVLMNIDPNGKGWIDWAATKLSGLTSTLPDTVLSHLFSQEELVNNTELVQSYRQQISSVVNQANLQLFWNMYNSRRDLDINRPGTVPNAKTLRCPVMLVVGDNAPAEDGVVECNSKLDPTTTTFLKMADSGGLPQVTQPGKLTEAFKYFLQGMGYIAHLKDRRLSGGAVPSASMTRLARSRTASLTSASSVDGSRPQPCTHSDSSEGMGQVNHTMEVSC

SEQ ID NO: 832 - DNA, 2994 bp, Homo sapiens
  ref <308>: DATABASE ACCESSION NUMBER: EMBL / AB033006
  ref <309>: DATABASE ENTRY DATE: 2002-05-14
ctcccactcgagctgcccccgccctctggacccgagtgactcaggcctttgtttgtccttcctggtagaggcgggttccctccctcggcaagatgccggagtgctgggatggggaacatgacatcgagacaccctacggccttctgcatgtagtgatccggggctcccccaaggggaaccgcccagccatcctcacctaccatgatgtgggcctcaaccacaaactatgcttcaacaccttcttcaacttcgaggacatgcaggagatcaccaagcactttgtggtgtgtcacgtggatgcccctggacaacaggtgggggcgtcgcagtttcctcaggggtaccagttcccctccatggagcagctggctgccatgctccccagcgtggtgcagcatttcgggttcaagtatgtgattggcatcggagtgggcgccggagcctatgtgctggccaagtttgcactcatcttccccgacctggtggaggggctggtgctggtgaacatcgaccccaatggcaaaggctggatagactgggctgccaccaagctctccggcctaactagcactttacccgacacggtgctctcccacctcttcagccaggaggagctggtgaacaacacagagttggtgcagagctaccggcagcagattgggaacgtggtgaaccaggccaacctgcagctcttctggaacatgtacaacagccgcagagacctggacattaaccggcctggaacggtgcccaatgccaagacgctccgctgccccgtgatgctggtggttggggataatgcacccgctgaggacggggtggtggagtgcaactccaaactggacccgaccactacaaccttcctgaagatggcagactctggagggctgccccaggtcacacagccagggaagctgactgaagccttcaaatacttcctgcaaggcatgggctacattgcgtacttgaaggaccgaaggctgagtggaggagcagtgccctcagccagcatgacccgcctggcacgctcccgcactgcatccctcaccagtgccagctcggtggatggcagccgcccacaggcctgcacccactcggagagcagcgaggggctgggccaggtcaaccacaccatggaggtgtcctgttgaagcccttgatcccgctgacgacgcccacgtcgaggccccaccgccatccttgcgccggctcatgttccctttagtttatttttgtgagggcaaaggggaggaaatggggttctgtttgaaaaaaatgaggggatcttagatgctgcagcagaacagtctccaggtgttttaaggggctcagtcctcctcatcccatctcactctccgtggtaacttagccaacttgacccctctcatcccactcccggcggcccaggcacagaagggcagggccatagggagggagattcgctacggatccaggtcattcctgggtgagcccttgggcaggcatgtttggagatgagagaggcttcgagagggtgggtgctgggccacaggggtgcggggccagctcaggcactggcgtgggagccctgggagaccccttcccccaccctccaccaagcacacctgtttctgtctcatagcacatgtgacaatcatctggacaacagccacaagggggcgctcggaccaggcagccactttcctggtgctctctgggcccagctggtgctgtagggccacgcaggcaggggcgtcaaggggtttctctgcccaaggaagacagaacatggagaaccgtcagggcaggaaccccacagactgtcccttccagcccacactctgccacctcctggccctgtcccaattctgagccaaggcctccccgaggcagaagttgcctggtcctctgtccccacagtgacctgactgggggtgagggagaaggaggagagagcccatgtgtggtgtgtgtgcccctgagaactttgtggtgactgcctttgggagcccgcaggtggccagaggcaggggtagctgagttcctggagaccccttttttgcccccaggttccccagagggcaacgccatcagtagcagtgtggtgtttcaggcagagctctggccaggctgtgccagtgtgtcccggacgcatcactaaggaagagagagtttatttagtcaactggcccaaggcagcgaggcttctacagtcccacaccccatagccgcctgggctggggcttactgggggctgaaggttctggacatgaacaagggtcaggtagaagagaaaggcttcccctacaccccagcctcctgctgtcccctgaagcccaggactgcgttgtatgctttccatccactcaccttaccccatagcatcttgcggcccagaaaccagagccatttgtctcagaccctaaatcaataatcacaaaccccaaaacgggagagagcagtgaaaacatgcagggctgtggacgggggaagggttgtggcgggtgttctgaggctgagaggacacctatatgcgtatttcctctacacacatcaccccccttctataatcttaagccatgactagcctggtggcgtgttagtttctgcccagttctaccccctcatgtgcttcttctgaatactgaatgtgactgtttgaaagctggtagaattcatccctcttactgtagataacactgcaaatcttggaattttgttttttgctgtttccagatgtatctataaatatctatacattatatgtgtgtgtgtgtgtgtgtgtgtgtgtgtgtgtgtacatcgggtcctcccatgtgtggtgttcttctggaggttgtctctttggtcaaggtgaacttttaatgtttattattttcttctccgcacaaagtaaagagcctaattttgtgtattctggtggctgctgtcatgagatgataaaatgtaaaacaaaactctagtcaacgtagaaagagttaactgtgctgaaaaactaataaagaacctaagaag

SEQ ID NO: 833 - protein, 352 aa, Homo sapiens
  ref <308>: DATABASE ACCESSION NUMBER: SWISS-Prot / Q9ULP0
  ref <309>: DATABASE ENTRY DATE: 2002-06-15
MPECWDGEHDIETPYGLLHVVIRGSPKGNRPAILTYHDVGLNHKLCFNTFFNFEDMQEITKHFVVCHVDAPGQQVGASQFPQGYQFPSMEQLAAMLPSVVQHFGFKYVIGIGVGAGAYVLAKFALIFPDLVEGLVLVNIDPNGKGWIDWAATKLSGLTSTLPDTVLSHLFSQEELVNNTELVQSYRQQIGNVVNQANLQLFWNMYNSRRDLDINRPGTVPNAKTLRCPVMLVVGDNAPAEDGVVECNSKLDPTTTTFLKMADSGGLPQVTQPGKLTEAFKYFLQGMGYIAYLKDRRLSGGAVPSASMTRLARSRTASLTSASSVDGSRPQACTHSESSEGLGQVNHTMEVSC

SEQ ID NO: 834 - DNA, 2718 bp, Rattus norvegicus; identical to SEQ ID NO: 830
  ref <308>: DATABASE ACCESSION NUMBER: EMBL / AF045564
  ref <309>: DATABASE ENTRY DATE: 1999-05-21

SEQ ID NO: 835 - protein, 352 aa, Rattus norvegicus; identical to SEQ ID NO: 831
  ref <308>: DATABASE ACCESSION NUMBER: SWISS-Prot / Q9Z2L9
  ref <309>: DATABASE ENTRY DATE: 2002-06-15

SEQ ID NO: 836 - DNA, 2994 bp, Homo sapiens; identical to SEQ ID NO: 832
  ref <308>: DATABASE ACCESSION NUMBER: EMBL / AB033006
  ref <309>: DATABASE ENTRY DATE: 2002-05-14

SEQ ID NO: 837 - protein, 352 aa, Homo sapiens; identical to SEQ ID NO: 833
  ref <308>: DATABASE ACCESSION NUMBER: SWISS-Prot / Q9ULP0
  ref <309>: DATABASE ENTRY DATE: 2002-06-15

SEQ ID NO: 838 - DNA, 2611 bp, Rattus norvegicus
  ref <308>: DATABASE ACCESSION NUMBER: EMBL / AF047707
  ref <309>: DATABASE ENTRY DATE: 1999-09-07
atacgactcactatagggctcgagcggtcgcccgggcaggtagcggccgctgaattctagaacagcgggccgggggatggcgctgctggacctggcccaggagggaatggccttgttcggcttcgtgctcttcgtggtgctgtggctgatgcatttcatgtccatcatctacacccggttacacctcaacaagaaggcaacagacaaacagccgtacagcaagctccctggagtctctcttctgaaaccactgaagggggtggaccctaacctaatcaacaacttggagacattctttgaactggattatcccaaatatgaagtactcctttgtgtacaagatcatgatgatccagccattgaggtgtgtaagaaactgcttggaaaatacccaaacgttgatgctagattatttataggtggtaaaaaggttggcattaatcctaaaattaataatttgatgccagcatatgaagttgcaaagtatgatctcatatggatttgtgatagcggaatacgagtcattccagacacattaactgacatggtcaatcagatgacggagagagtggggctggtccacgggcttccatacgtagctgacagacaaggctttgctgccaccttagagcaggtatattttggaacttcacacccaagatcctatatctctgccaatgtgaccggcttcaagtgtgtgacggggatgtcttgcttgatgaggaaggatgtgctagatcaggcaggagggctcatagcctttgctcagtacattgcggaagattacttcatggccaaagcaatagcggaccgaggctggaagttttcaatgtctacgcaagttgccatgcaaaactctggttcatactccatttctcagtttcaatccagaatgatcaggtggaccaaattgaggattaacatgcttcctgccacaataatttgtgagccaatttcagaatgctttgttgccagtttaattatcgggtgggcagcccaccacgtgttccgatgggatatcatggttttcttcatgtgtcactgcctggcatggtttatatttgactacattcaactcaggggtgtccagggtggcacactatgcttttcaaaacttgattatgctgtggcttggttcatccgcgaatccatgacaatatacattttcttgtcggcactgtgggaccctactataagctggagagccggtcgctacaggttgcgctgtggagggacggccgaggagatcctggatgtgtaacaaggcctctgtggccgactggacaggatggaatggaagtgttatagattatgtttatagagactttccaggacctgccttcagtggctcatccgtgtatgtgtggtatccgctctttaatttattcgcatggcccttgcatctgtgaaaagcaaaaaaacaaaagcaaaacatgtctgtagtcgtggccaaacagtgtattttatggaggtagagaatcaagacaattggttctaggaagtgggttttgttgttgtttatttttttaaacaaatatatatatatatctatcaatacacacacacacacacacacacacacacacacgactgctctgcagcagacactatgacagtatccttcagtagggaaagtttcttacctgagttactcactctgaggtccgcacgggcagaacagcagctctgtgagagggaaggggcaggtgctggccgcccctgtgtgaagggaatgggttgtacagggaggcgctgactgagaaactttttcatgctttatgcctacctcttgtagttgttgcagagcaaatagaagttagaagttgtgatatggtagctaggccttgcaaaaacaaatgggaaactttaataataaaagagccgagtctagtatttatataaatctgtgaggttttttttgttttgtttttttgtttttgttttgttttgttttattttttggtctcattgcaatgaaccaaaagtggttgagattggtttttagtggtaaccatgaattgaaggcatcttttggaccaactgttgttggttctgtcttgaaccatattaatcactgtgctgtaattaggagagctgaatctttccttccctgctcctcgcccagcccgccccatctttccattaatattcattctctctctctctccctctctccctctctccttctccctctctccctccctctctctctctctctctctctctctctccttctctccctctctctctctctctctctttctcgccttatgatgaatttgtttgaagggcattttctccgtgagcaaaggcttggatgcatattccagtttttatttttttttctgtgaaatgggtactattaccccctgaggaaaagttgcacagtgagaaccagtctagttatgacccactacatgtttatttttttacattactctctcacgagctgagttttgctgagtgcgtttgtcggtttgtttagtggcgtttggtggaagcccttctttgcgctgctgaagtgaaatcttgctgactagttagcttttttgttgatctcagtatgggcaaagaaacaaaatccaaatggctggacagacttctgtaaata

SEQ ID NO: 839 - protein, 394 aa, Rattus norvegicus
  ref <308>: DATABASE ACCESSION NUMBER: SWISS-Prot / AAD02464
  ref <309>: DATABASE ENTRY DATE: 2003-02-01
MALLDLAQEGMALFGFVLFVVLWLMHFMSIIYTRLHLNKKATDKQPYSKLPGVSLLKPLKGVDPNLINNLETFFELDYPKYEVLLCVQDHDDPAIEVCKKLLGKYPNVDARLFIGGKKVGINPKINNLMPAYEVAKYDLIWICDSGIRVIPDTLTDMVNQMTERVGLVHGLPYVADRQGFAATLEQVYFGTSHPRSYISANVTGFKCVTGMSCLMRKDVLDQAGGLIAFAQYIAEDYFMAKAIADRGWKFSMSTQVAMQNSGSYSISQFQSRMIRWTKLRINMLPATIICEPISECFVASLIIGWAAHHVFRWDIMVFFMCHCLAWFIFDYIQLRGVQGGTLCFSKLDYAVAWFIRESMTIYIFLSALWDPTISWRAGRYRLRCGGTAEEILDV

SEQ ID NO: 840 - DNA, 1637 bp, Homo sapiens
  ref <308>: DATABASE ACCESSION NUMBER: EMBL / D50840
  ref <309>: DATABASE ENTRY DATE: 1999-01-21
gaggcgaaccggagcgcggggccgcggtcgccccgaccagagccgggagaccgcagcacccgcagccgcccgcgagcgcgccgaagacagcgcgcaggcgagagcgcgcgggcgggggcgcgcaggccctgcccgccccttccgtccccacccccctccgccctttcctctccccaccttcctctcgcctcccgcgcccccgcaccgggcgcccaccctgtcctcctcctgcgggagcgttgtccgtgttggcggccgcagcgggccgggccggtccggcgggccgggggatggcgctgctggacctggccttggagggaatggccgtcttcgggttcgtcctcttcttggtgctgtggctgatgcatttcatggctatcatctacacccgattacacctcaacaagaaggcaactgacaaacagccttatagcaagctcccaggtgtctctcttctgaaaccactgaaaggggtagatcctaacttaatcaacaacctggaaacattctttgaattggattatcccaaatatgaagtgctcctttgtgtacaagatcatgatgatccagccattgatgtatgtaagaagcttcttggaaaatatccaaatgttgatgctagattgtttataggtggtaaaaaagttggcattaatcctaaaattaataatttaatgccaggatatgaagttgcaaagtatgatcttatatggatttgtgatagtggaataagagtaattccagatacgcttactgacatggtgaatcaaatgacagaaaaagtaggcttggttcacgggctgccttacgtagcagacagacagggctttgctgccaccttagagcaggtatattttggaacttcacatccaagatactatatctctgccaatgtaactggtttcaaatgtgtgacaggaatgtcttgtttaatgagaaaagatgtgttggatcaagcaggaggacttatagcttttgctcagtacattgccgaagattactttatggccaaagcgatagctgaccgaggttggaggtttgcaatgtccactcaagttgcaatgcaaaactctggctcatattcaatttctcagtttcaatccagaatgatcaggtggaccaaactacgaattaacatgcttcctgctacaataatttgtgagccaatttcagaatgctttgttgccagtttaattattggatgggcagcccaccatgtgttcagatgggatattatggtatttttcatgtgtcattgcctggcatggtttatatttgactacattcaactcaggggtgtccagggtggcacactgtgtttttcaaaacttgattatgcagtcgcctggttcatccgcgaatccatgacaatatacatttttttgtctgcattatgggacccaactataagctggagaactggtcgctacagattacgctgtgggggtacagcagaggaaatcctagatgtataactacagctttgtgactgtatataaaggaaaaaagagaagtattataaattatgtttatataaatgcttttaaaaatctaccttctgtagttttatcacatgtatgttttggtatctgttctttaatttatttttgcatggcacttgcatctgtgaaaaaaaa

SEQ ID NO: 841 - protein, 394 aa, Homo sapiens
  ref <308>: DATABASE ACCESSION NUMBER: SWISS-Prot / Q16739
  ref <309>: DATABASE ENTRY DATE: 2002-06-15
MALLDLALEGMAVFGFVLFLVLWLMHFMAIIYTRLHLNKKATDKQPYSKLPGVSLLKPLKGVDPNLINNLETFFELDYPKYEVLLCVQDHDDPAIDVCKKLLGKYPNVDARLFIGGKKVGINPKINNLMPGYEVAKYDLIWICDSGIRVIPDTLTDMVNQMTEKVGLVHGLPYVADRQGFAATLEQVYFGTSHPRYYISANVTGFKCVTGMSCLMRKDVLDQAGGLIAFAQYIAEDYFMAKAIADRGWRFAMSTQVAMQNSGSYSISQFQSRMIRWTKLRINMLPATIICEPISECFVASLIIGWAAHHVFRWDIMVFFMCHCLAWFIFDYIQLRGVQGGTLCFSKLDYAVAWFIRESMTIYIFLSALWDPTISWRTGRYRLRCGGTAEEILDV

SEQ ID NO: 842 - DNA, 2611 bp, Rattus norvegicus; identical to SEQ ID NO: 838
  ref <308>: DATABASE ACCESSION NUMBER: EMBL / AF047707
  ref <309>: DATABASE ENTRY DATE: 1999-09-07

SEQ ID NO: 843 - protein, 394 aa, Rattus norvegicus; identical to SEQ ID NO: 839
  ref <308>: DATABASE ACCESSION NUMBER: SWISS-Prot / AAD02464
  ref <309>: DATABASE ENTRY DATE: 2003-02-01

SEQ ID NO: 844 - DNA, 1637 bp, Homo sapiens; identical to SEQ ID NO: 840
  ref <308>: DATABASE ACCESSION NUMBER: EMBL / D50840
  ref <309>: DATABASE ENTRY DATE: 1999-01-21

SEQ ID NO: 845 - protein, 394 aa, Homo sapiens; identical to SEQ ID NO: 841
  ref <308>: DATABASE ACCESSION NUMBER: SWISS-Prot / Q16739
  ref <309>: DATABASE ENTRY DATE: 2002-06-15

SEQ ID NO: 846 - DNA, 5729 bp, Rattus norvegicus
  ref <308>: DATABASE ACCESSION NUMBER: EMBL / AF048687
  ref <309>: DATABASE ENTRY DATE: 1998-06-29
agcctgcaggggtctcggggcgcacagggctgccgggattgtcctcgtgggtgtccgcagtccgagatcgccgcgtgtctgtcatctgtttccttcgtcctccgggccccggccgcgcgcatccgccgggtagtccggggtccgtgcggggggcggcggcgcctctccctcgggccgggcggcgggaatgcggttgccttggccggctgggcagcgggcgcggctgcaaacggaacccgggtgcactcgccgctggccgggacgccgccctggcctgctctcggctcccgaggccgccctgcgctctggggcccggcgcggaatgaggtgcaggccgcgcaccgccgacgccccctccgcggccccctggttcaacgcggccgcccgcgcctcgcgtgccccagcgcccacgttagagcctcgcactggcagcgctcgcggaggcacaggcctgcagagcgcacgccactcggcccgggtcccgatcgcggggactcgcctcttggacaccgccccaggtgcgggaccccgacacgctgcaagcgcgcgggccgcctccgcatcgcagagctcctctagcctggcccgtggctttggcctccacggagccggatctccctgcctccctccacatttctccgcatcctttcaacacccttcccgctgctctaccacctcccattcattgcatccatttctccttcccggctcggttcttcttcccataacctccccggccggaccccgctacccacccggtacattcatggaagtttagggcctggaccgtggctcggagtctggcctgagagcgcagcggagctgctggtagggcagaggaagatgtctgcgctcaagcggatgatgcgggtctccaatcgctccctgatcgccttcatcttcttcttctccctctccacgtcctgtctctatttcatctatgtggctccaggcatcgccaacacatacctctttatggtacaagctagaggcatcatgctgagagaaaatgtgaaaacaattggacacatgatcaggctgtataccaataaaaacactacgctcaatgggacagattatcccgaaggcaataatacaagtgactatcttgttcaaacaacaacgtatcttccgcagaacttcacgtattcaccgcacctcccctgtccagagaagctgccttatatgcggggattcctcagtgtcaacgtgagtgaaatcagctttgatgaagtccatcagctcttctccaaggactcggagattgagccgggaggccactggaggccccaggactgcaagcctagatggaaggtggcagttctcatccccttccgtaaccgccatgaacacctcccgatctttttcctgcacctgatcccgatgctccagaaacagaggctggaatttgccttttatgtcatcgaacagaccggcacacaaccgttcaatcgtgccatgctctttaacgtgggtttcaaagaggccatgaaggacagagcctgggactgtgtgatcttccacgacgtggatcatcttcctgagaacgatcggaactattacggatgcggggagatgccgcggcactttgcagcgaagctggacaagtacatgtacattcttccttataaggagttctttggtggggtgagtggcctgacagtggagcaatttaggaagatcaatggctttcccaatgccttctggggatggggaggagaggatgacgacctttggaacagagttcactactctggatacaatgtaacccggccagagggggacttgggaaaatatacatctattccccatcaccatcgaggggaagtacaatttttaggacggtataaattacttcgctattctaaggagcgtcagttcattgatggattgaacaatttattatacacacccaaaatactggttgacaggctgtatacaaatatatctgtaaacctcatgccggagttagctccagttgaagactattaaaaagaagtcattcccgtggtggggtagaccacagcactgaatcatgaacttggcttggaatgcactcaccgtggaagttagagattggtgtgtatctcagtgtcccagtctgtaaaaagaaccagcagtccttaatgtttacagcgtgggctccatctgtcacactccccactctcctccctgctgggagcacctcccatggcgagcactgtcgagatacaaacccattgcttgggattggaagtgaagaaaactccctacacagagaagattttttttatactgaaatctataatttaattcaagagaatgcttttatttccgttcaaacatattttgtacatatgtgatgtaaattaaatatgttcaaattgttggaaaataagatgtcataattttgcatgtaattggttatgccttcattggacttttatagacattttttttatttgcatggggggaaaaaactgtaaatttatgtcgccagacaaaggttaagccttgtgtgaaatgaagggactgtcagcgacggacaaagataataccgtaactgtttcgttgaactggtgttcagctttagccttcagcctcatgggaagaggcacagtcctctgagggctttgaaggaaggaaggaaggactcgaatagcttttcttcctgccaggattacctgttttgtttgtttgtttttttcacttgcttgcagtctcatcagatcttgccaagtcagcagccatattgtttatgcatactgcatgagtattaccaagaaaatcttcagagttgtaaagtgacatgctgtacaggacctcttcgtgttaaatgtctctatgtacctctgctgtgtcagggatcttgtgcctcaaaaaaaaaatgtccccaaggttgtgtttatacacggtctatatttttttcaatctcataatgaacagcattattatttccactttagaagaaccaaaagaaggtatcttcttttaaaaacattttttttaaagaatgaatttatggaaaatccagtagtgcttatacagatgaattatactattagatgagaaattagatgctctatttttatgaagataaatgcttagattaaaacagactttaactttaattctcaaacgtacatagttccctttcacatcagccagtcacttgaactgttttttttttctttttttccgctttcaagaaatctctggtgttattcaaatttttttttcactaccagtataatttaatgcccccccccccccccgtccccagtggagctgggaattgaatctagggcctgtagacttaccttaaaatcattattgtatgtgtggatgctgtgacttctgaactaggtctcacagcctaacgccaggtctgctcatcctcctcacttgggtgaggcttttgacaaccaaagaacaacaaagcccaaacagtgttctgaaaattatcaattctaaagattcttgaaaaatagcttgtattctcatgtaagatcttatctcccatatttaaacaaattgaaaacatcgcctatctgtcaagtgaaccctcccaaagagcaaagagtgagagaattctgaatgtggggaagtttgtccccttgtctgacgtgagagcttagcttgcagttgtccttgtctgtcacagttttaatgctgatggccacaagccaaagtaattagatccttacaccggagaagacagacaccctatctgttgtgacagcagtctttccaggttcttcttagacgtgcttctaaaatacttacctcccaacttttttggttactcaaagtagtggggggggggggaatcacaacctgtggaaatgaagatttttgtatgctatcagttattctctgtctcttgtggctaatgaggtgtttaattcgacggaatgacagtaaagtgtaatgttaatgttaaggctggtgagacaggactctgggtgtgtggtgagcccagccctggtccctcctcctggttctgtggaatgtggtaccacgtggattcttactgggggaaacacactttataaggtgacaggctatccacagtcagcaccttttgcattgatatatagttcacagctttaggaaaattcagaactggtgaactgccttactctcttagggtaagtctggcattaacatggctgcgggagtcggatgtatttctgctaaatcttcatgctgaatctgctgtgtcagcttgtgagaaccgccttttctaattcagacctggaattattttctttttctttttctttttttttttttttttttttggagctgaggactgaacccagggccttgagcttgctaggcaagagctctaccactgagctaaatcctcaaccccctggaattattttcagtagtgaatagtgatctctatatgtcaccacaaatgacagttttgccctgttaccataaccacagtgaatctcctccttctatattagcccaagcagacagtctgatagaatcaaatgcacttggtggctttgcactgtctgcccacatccgctgccttgccaacggtggtatttaaacgtggtttttgtttgcttttgcctgaacaagtcaaatcgagacagttgaaacttacctgagattaggaagaatgtcctctggtaacttacctgtcacttgtcttagactcggagccagtgtggccacagatgctgggaggccctcgtggcactggggaaatgatcgatgcctttgaactgaagaaagaaagcatgactgacaggccgaaagttcccacgtccactgtaacattctgtctgattttttaatgaagatgtcatttaattatttgccaaaactagggttttaatgaagtggcttccccagtcccctttttatagttattttctggtgtagacccttgaggtggctcagggtataaaggtgcctctcccaagcctgacaacctacgcttgatccctggggttcacactgtagaaggagaggactaccctggtacattgttctcagacttctgtatgtgtgcggctcgcgctcacacacacacacacacacacacacacacgcgcgcgcgcaaggcaaattaaaaggtatataaaagttaaatttctgttttataaaacggtgtttaataagaaaatatttataaaatttaagtacaaaattatctattaaaaattcctattcctgccagtcaatggtggagtttgcctttaatccaagctctctggaagcaaggcaggttctctgaattggaggccagcctggcctgtggagtgagttccaagacagctggggcgacacagagaaactgtctcaaaaacaaaaccaaatcaaaacaaaaactgctattccagttgatactgataaccattgtaaaagagagcagaaatatcatcaatacaatatcgtccctttgggactccctgggggggaagcagattgtatttgtgtcattgtatctgccctgtttctttataaataacactctagatttcttgccttgggtttgcagagttgttgagaagcaaactgtcgccgtgttttttggaaggtggaagtgtacttaagattatttattatgaaatggagtacttctatgtaagtgcgttgatgtaaacgctagtgatttctcgctttttttttttgtcttgttttgcttctcatggaaatgtttgtactttttttatcattgtcttttatgaaatacaatgttctaaagaaaaaaaaaaaaaaaa

SEQ ID NO: 847 - protein, 382 aa, Rattus norvegicus
  ref <308>: DATABASE ACCESSION NUMBER: SWISS-Prot / AAC24515
  ref <309>: DATABASE ENTRY DATE: 2002-06-15
MSALKRMMRVSNRSLIAFIFFFSLSTSCLYFIYVAPGIANTYLFMVQARGIMLRENVKTIGHMIRLYTNKNTTLNGTDYPEGNNTSDYLVQTTTYLPQNFTYSPHLPCPEKLPYMRGFLSVNVSEISFDEVHQLFSKDSEIEPGGHWRPQDCKPRWKVAVLIPFRNRHEHLPIFFLHLIPMLQKQRLEFAFYVIEQTGTQPFNRAMLFNVGFKEAMKDRAWDCVIFHDVDHLPENDRNYYGCGEMPRHFAAKLDKYMYILPYKEFFGGVSGLTVEQFRKINGFPNAFWGWGGEDDDLWNRVHYSGYNVTRPEGDLGKYTSIPHHHRGEVQFLGRYKLLRYSKERQFIDGLNNLLYTPKILVDRLYTNISVNLMPELAPVEDY

SEQ ID NO: 848 - DNA, 2147 bp, Homo sapiens
  ref <308>: DATABASE ACCESSION NUMBER: EMBL / AF069054
  ref <309>: DATABASE ENTRY DATE: 2002-05-27
ctcgggccctctccccagagcctccccgcgcggaccccgctgcagtgtcggggttctcagcacatttatggaagtttagggcctggacagtggccccgagtccggcctgagagcgcagcctgggctgctggcagggaagaggaagatgtctgtgctcaggcggatgatgcgggtttccaatcgctctctcctcgccttcatcttctttttctccctctcttcgtcctgtctgtacttcatctatgtggccccaggcatcgattatcccgaaggcaataattcaagtgattatcttgttcaaacaacaacgtatctcccggaaaacttcacatactcaccatacctcccctgtccagaaaagctgccttatatgcgaggattcctcaatgtcaatgtaagcgaagtcagttttgatgaaattcatcaactcttctccaaggatttagatattgagccagggggtcattggaggccaaaagactgtaaacccagatggaaggtggcagttctcattcctttccgtaatcgccatgaacatcttccaatttttttcttacatctgattccaatgctccagaagcagcggctggaatttgcgttttatgtcgttgaacagactggcacacaaccttttaaccgtgcgatgcttttcaatgtgggcttcaaagaggccatgaaagacagtgtctgggactgtgtaatcttccacgatgtggatcatctacctgaaaatgaccggaactattacggatgtggagaaatgccacgtcattttgctgcaaagctggataaatacatgtatattcttccatataaagaattttttggtggtgtaagtgggctgacagtggaacaatttagaaagatcaatggttttcctaatgccttctggggatggggaggagaagatgatgacctttggaacagagttcactatgctggatataatgtaaccagaccagagggagacttaggaaaatacaagtcaattcctcatcaccatagaggtgaagtccagtttttaggacggtataaattactaaggtattccaaggagcgtcagtacatcgatggactgaacaatttaatatataggccaaaaatactggttgataggttgtatacaaacatatctgtaaacctcatgccagagttagctccaatcgaagactattaaaagaagtggctgtcgtggcaaggtagaccacaatgctggatcataaacttggagcgcgctcttagtggaggtcagtgattggctgtgtcacagtgcccttttctctgagaagagccagcagtccacagtgtttacagagtgggactatatacagtcacccttctctcaccccgtcctccctgctctgagacacacccctgtggcgagcaccgcagaaacgggaagccactacttaagatcggaagttaagagagctccctccgaagagaaaatttttatactaaaatctataatttaattcaagagaatgcttttatttccgtttaaacatattttgtatatatgtgatataaattaatgtgtgcaaattgtttaaaaattagatgtgttgcagttttgcatgtaatcggttatacctttattggacttttatagacattttttatttgcatgaaaaaaactcactaaatttacatcactaaacaaaggttaacccttgtgtgaaatgaaggaactgtcaataattgacagccaactaatacagtaaactgttatactagttttgagctttagacctcagccttttgtgtggaagaagtcacagctttcttaggctttaaaggaaaagaaggaaggacttaaatagcttttcttcctaccgggattacctatgtttttccttgcttgcaatctcatctgattttgctagaaatcacaaccatattgtttatgcatattgcatgagtattaccaagaaaaatctttaaaagttgtgatgtgacatgatataaaggatctctttatgttaaatgtctttccatgtacctctggtgtgtcagggattttgtgcctcaaaaaatgtttccaaggttgtgtgtttatactgtgtattttttttaaattcacggtgaacagcacttttattatttccagttcagaagagccaaaaaaaaaaaaaaaaaaaaaaaaa

SEQ ID NO: 849 - protein, 382 aa, Homo sapiens
  ref <308>: DATABASE ACCESSION NUMBER: SWISS-Prot / Q9UBX8
  ref <309>: DATABASE ENTRY DATE: 2002-06-15
MSVLRRMMRVSNRSLLAFIFFFSLSSSCLYFIYVAPGIANTYLFMVQARGIMLRENVKTIGHMIRLYTNKNSTLNGTDYPEGNNSSDYLVQTTTYLPENFTYSPYLPCPEKLPYMRGFLNVNVSEVSFDEIHQLFSKDLDIEPGGHWRPKDCKPRWKVAVLIPFRNRHEHLPIFFLHLIPMLQKQRLEFAFYVIEQTGTQPFNRAMLFNVGFKEAMKDSVWDCVIFHDVDHLPENDRNYYGCGEMPRHFAAKLDKYMYILPYKEFFGGVSGLTVEQFRKINGFPNAFWGWGGEDDDLWNRVHYAGYNVTRPEGDLGKYKSIPHHHRGEVQFLGRYKLLRYSKERQYIDGLNNLIYRPKILVDRLYTNISVNLMPELAPIEDY

SEQ ID NO: 850 - DNA, 1217 bp, Rattus norvegicus
  ref <308>: DATABASE ACCESSION NUMBER: EMBL / AF048828
  ref <309>: DATABASE ENTRY DATE: 2000-03-03
ctcggccaacccccgccgtagctgccgctgctcccgccgtcaccgcctccgagaacatggctgtgcctcccacatatgctgatcttggcaagtccgccagggatgtcttcaccaagggctacggctttggcttaataaaacttgatttgaaaacgaagtccgagaatggattggaatttactagctcaggttctgccaacacggagaccaccaaagtgacgggcagtctggaaaccaagtacagatggaccgagtatgggctgacgtttactgagaagtggaacacagacaacaccctgggctctgagatcaccgtggaagaccagcttgctcgtggactgaagctgacctttgattcatctttctcgcctaacactgggaaaaaaaatgctaaaatcaagacagggtacaagagggagcatatcaacctgggctgtgatatggactttgacatcgctgggccctcaatccggggcgctctggtgcttggctatgagggttttgacatcgctgggccctcaatccggggcgctctggtgcttggctatgagggttggcttgctggctaccagatgaattttgagacctcgaagtcccgagtgacccagagcaactttgcagttggctacaagacggacgaattccagcttcatactaatgtgaatgatgggacggagtttggtggctccatttaccagaaggtgaacaagaagttggagactgctgtcaatctcgcctggaccgcaggaaacagtaacactcgctttggaatagcagccaagtatcaggtcgaccctgatgcctgcttttcggccaaagtgaacaactccagtctaattggcttagggtacactcagaccctaaaaccaggtatcaaactgacactgtcagccctgctggatggcaagaacgtcaatgcgggtggccacaagcttggtttaggactggagtttcaagcgtaaatgaatattgtacaatcgttaattttaaactattttgcagcatagctaccttcagagtttagtgtaccttttaatgtcatatgttggggatgcgagagttgattgataccacgttagacctccaggctaaggatgactcggctttaaggtgtttaccgtttcagaggtacagcggaaaccccattccaggaagggtcctttttagctgtaggcgttgggctggggaggagctcctctagagatccgaggctcgaa

SEQ ID NO: 851 - protein, 300 aa, Rattus norvegicus
  ref <308>: DATABASE ACCESSION NUMBER: SWISS-Prot / Q9Z2L0
  ref <309>: DATABASE ENTRY DATE: 2001-10-16
AVPPTYADLGKSARDVFTKGYGFGLIKLDLKTKSENGLEFTSSGSANTETTKVTGSLETKYRWTEYGLTFTEKWNTDNTLGSEITVEDQLARGLKLTFDSSFSPNTGKKNAKIKTGYKREHINLGCDMDFDIAGPSIRGALVLGYEGFDIAGPSIRGALVLGYEGWLAGYQMNFETSKSRVTQSNFAVGYKTDEFQLHTNVNDGTEFGGSIYQKVNKKLETAVNLAWTAGNSNTRFGIAAKYQVDPDACFSAKVNNSSLIGLGYTQTLKPGIKLTLSALLDGKNVNAGGHKLGLGLEFQA

SEQ ID NO: 852 - DNA, 614 bp, Homo sapiens
  ref <308>: DATABASE ACCESSION NUMBER: EMBL / BI493778
  ref <309>: DATABASE ENTRY DATE: 2001-08-29
tttttttaaaacaaacattttatttaatgcagaaattctaaggtacaaaaacattttgtaaatgtcagctgtgatctactttcacctagttacagagttatgtacaaatcaagtcattaacattttcaatgtcaaaaatacagcacgctgttaagagttctgtcagtgctcattatcccactagatcccacaaagggcaaactcaaagatgaaacaaaggcaacgccatcaataaccaccatattccacaggctttctcccctaggacgtactaacagggagtttccacagggaaaaattctcttttaaaaaattaacagtaaaaataggagttacttactatctagatgaacacaattggttttcacaaaagcttttgctgctgtctggactcaccatgcttttttcttgagagaaacataccaaacttttctcgagtttttttttttttttttttttgaggtttcaatattttattcaagttttttaagtgttgttaattacagcatttgaaggggaggatctaattccaacaaaatggaagactctaaaatgtacccattaaactgctaaaaaacaaattgagtggtgagaatacaacagaagtccaattt

SEQ ID NO: 853 - protein, 282 aa, Homo sapiens
  ref <308>: DATABASE ACCESSION NUMBER: SWISS-Prot / MMHUP3
  ref <309>: DATABASE ENTRY DATE: 2002-06-15
AVPPTYADLGKSARDVFTKGYGFGLIKLDLKTKSENGLEFTSSGSANTETTKVTGSLETKYRWTEYGLTFTEKWNTDNTLGTEITVEDQLARGLKLTFDSSFSPNTGKKNAKIKTGYKREHINLGCDMDFDIAGPSIRGALVLGYEGWLAGYQMNFETAKSRVTQSNFAVGYKTDEFQLHTNVNDGTEFGGSIYQKVNKKLETAVNLAWTAGNSNTRFGIAAKYQIDPDACFSAKVNNSSLIGLGYTQTLKPGIKLTLSALLDGKNVNAGGHKLGLGLEFQA

SEQ ID NO: 854 - DNA, 1217 bp, Rattus norvegicus; identical to SEQ ID NO: 850
  ref <308>: DATABASE ACCESSION NUMBER: EMBL / AF048828
  ref <309>: DATABASE ENTRY DATE: 2000-03-03

SEQ ID NO: 855 - protein, 300 aa, Rattus norvegicus; identical to SEQ ID NO: 851
  ref <308>: DATABASE ACCESSION NUMBER: SWISS-Prot / Q9Z2L0
  ref <309>: DATABASE ENTRY DATE: 2001-10-16

SEQ ID NO: 856 - DNA, 614 bp, Homo sapiens; identical to SEQ ID NO: 852
  ref <308>: DATABASE ACCESSION NUMBER: EMBL / BI493778
  ref <309>: DATABASE ENTRY DATE: 2001-08-29

SEQ ID NO: 857 - protein, 282 aa, Homo sapiens; identical to SEQ ID NO: 853
  ref <308>: DATABASE ACCESSION NUMBER: SWISS-Prot / MMHUP3
  ref <309>: DATABASE ENTRY DATE: 2002-06-15

SEQ ID NO: 858 - DNA, 1217 bp, Rattus norvegicus; identical to SEQ ID NO: 850
  ref <308>: DATABASE ACCESSION NUMBER: EMBL / AF048828
  ref <309>: DATABASE ENTRY DATE: 2000-03-03

SEQ ID NO: 859 - protein, 300 aa, Rattus norvegicus; identical to SEQ ID NO: 851
  ref <308>: DATABASE ACCESSION NUMBER: SWISS-Prot / Q9Z2L0
  ref <309>: DATABASE ENTRY DATE: 2001-10-16

SEQ ID NO: 860 - DNA, 614 bp, Homo sapiens; identical to SEQ ID NO: 852
  ref <308>: DATABASE ACCESSION NUMBER: EMBL / BI493778
  ref <309>: DATABASE ENTRY DATE: 2001-08-29

SEQ ID NO: 861 - protein, 282 aa, Homo sapiens; identical to SEQ ID NO: 853
  ref <308>: DATABASE ACCESSION NUMBER: SWISS-Prot / MMHUP3
  ref <309>: DATABASE ENTRY DATE: 2002-06-15

SEQ ID NO: 862 - DNA, 1217 bp, Rattus norvegicus; identical to SEQ ID NO: 850
  ref <308>: DATABASE ACCESSION NUMBER: EMBL / AF048828
  ref <309>: DATABASE ENTRY DATE: 2000-03-03

SEQ ID NO: 863 - protein, 300 aa, Rattus norvegicus; identical to SEQ ID NO: 851
  ref <308>: DATABASE ACCESSION NUMBER: SWISS-Prot / Q9Z2L0
  ref <309>: DATABASE ENTRY DATE: 2001-10-16

SEQ ID NO: 864 - DNA, 614 bp, Homo sapiens; identical to SEQ ID NO: 852
  ref <308>: DATABASE ACCESSION NUMBER: EMBL / BI493778
  ref <309>: DATABASE ENTRY DATE: 2001-08-29

SEQ ID NO: 865 - protein, 282 aa, Homo sapiens; identical to SEQ ID NO: 853
  ref <308>: DATABASE ACCESSION NUMBER: SWISS-Prot / MMHUP3
  ref <309>: DATABASE ENTRY DATE: 2002-06-15

SEQ ID NO: 866 - DNA, 1217 bp, Rattus norvegicus; identical to SEQ ID NO: 850
  ref <308>: DATABASE ACCESSION NUMBER: EMBL / AF048828
  ref <309>: DATABASE ENTRY DATE: 2000-03-03

SEQ ID NO: 867 - protein, 300 aa, Rattus norvegicus; identical to SEQ ID NO: 851
  ref <308>: DATABASE ACCESSION NUMBER: SWISS-Prot / Q9Z2L0
  ref <309>: DATABASE ENTRY DATE: 2001-10-16

SEQ ID NO: 868 - DNA, 614 bp, Homo sapiens; identical to SEQ ID NO: 852
  ref <308>: DATABASE ACCESSION NUMBER: EMBL / BI493778
  ref <309>: DATABASE ENTRY DATE: 2001-08-29

SEQ ID NO: 869 - protein, 282 aa, Homo sapiens; identical to SEQ ID NO: 853
  ref <308>: DATABASE ACCESSION NUMBER: SWISS-Prot / MMHUP3
  ref <309>: DATABASE ENTRY DATE: 2002-06-15

SEQ ID NO: 870 - DNA, 1217 bp, Rattus norvegicus; identical to SEQ ID NO: 850
  ref <308>: DATABASE ACCESSION NUMBER: EMBL / AF048828
  ref <309>: DATABASE ENTRY DATE: 2000-03-03

SEQ ID NO: 871 - protein, 300 aa, Rattus norvegicus; identical to SEQ ID NO: 851
  ref <308>: DATABASE ACCESSION NUMBER: SWISS-Prot / Q9Z2L0
  ref <309>: DATABASE ENTRY DATE: 2001-10-16

SEQ ID NO: 872 - DNA, 614 bp, Homo sapiens; identical to SEQ ID NO: 852
  ref <308>: DATABASE ACCESSION NUMBER: EMBL / BI493778
  ref <309>: DATABASE ENTRY DATE: 2001-08-29

SEQ ID NO: 873 - protein, 282 aa, Homo sapiens; identical to SEQ ID NO: 853
  ref <308>: DATABASE ACCESSION NUMBER: SWISS-Prot / MMHUP3
  ref <309>: DATABASE ENTRY DATE: 2002-06-15

SEQ ID NO: 874 - DNA, 3512 bp, Rattus norvegicus
  ref <308>: DATABASE ACCESSION NUMBER: EMBL / AF049344
  ref <309>: DATABASE ENTRY DATE: 1998-11-04
aagagaggggccttgctcctgctgctgctactgctgctgttactgttgctacctcaactctctctccactccaggtaagcagagggcaagctgcaaggcaagcctttgtacgatgaacaagatccgaaagtttttccgaggaagtgggcgagtcttggcatttatatttgtagcttctgtcatctggctgctctttgatatggcagctctccgcctctcattcagtgagatcaacacagggatactcaaagaagatatcatgaggagggaacagacaggattcagagttgaggcagaccaaatgacgatcctttcccccagcagcagagggatgaggccgccccggaatggagcgggaggcaaggagagctttagaaaggctgagaaccgtgtactcaaggttgaggagaatgtggaccaagtccagaggaaagggaaaatgcagttcctcctgggaagggggaaggctgtgtctttgtggcatcgtacacatgtgcaaaccctcccagtgacactccccatgcagaagacccaggggagagacagcaagcctgaagtctcctccttgcacatgatgtccaagcagacaacagtgttagggtctgagaaggactctttcacagtgtcaagaggagttccattgaacaaaacagcagaacatacagaaaccttagataaaaaacaagaggccccagagaattataatctcagcagtgatacatcaaagcaagcctcccaaagggccctgaatgtgaccatcagtgtcaggactgacagatcaaagcagcaatcacagacagtaacaaaatcaagcatacaatttgccagcctaccaatcctgaaacctgaggaagtcacggtcacaaagaaaactgaggctcagggcaaagacctaaaatatgaagcccataaagcgcgccctcttcttaagttcactgctgatgtgggtcatttaaagaaacaatctacaaatgagacaggattgggagtattgccagaagccgatggggccaaagtggcgccagggaagaaactaaatttctctgaaagtcagattgtgattataactaaagaggaaggccagaagacagacaccaaagaggtacctaattctaaaatccaaactgtcttccctaaattactgggtgaaagccaaggaaaacatatccccaggagtcagagccagaccttgtcctctccattagctccaaagagagctgtgtctcagtccaagcccaccttagctgaggaactccatacagcaagaagcaacttgactgccaaggccacaactgtaggacaccagcaaagccatgcaaatatctctgaaaaccctggaaagcatcacgtgctcagaatcgatgtgaccctctctccaagagatctcaatgctccaggtcagttcgggcgccctgtcgtggttccccctggaaagaagaaggaggctgaacagagatggaaagaaggaaacttcaatgtctaccttagcgatttgattccagtggacagagccattgaagacacaaggcctgctgggtgtgcagagcaactagttcacaacgacctcccaaccaccagcatcatcatgtgcttcgtggatgaggtgtggtctgctctcctgaggtctgtgcacagtgtcctcaaccgctcccctccacacctcatcaaggagattctgctggtggatgatttcagcaccaaagactacctgaaagctaatttggataaatacatgtctcagtttccaaaagttcggattcttcgcctcaaggagagacatggcttgatcagagcaaggctggctggggcgcagaatgcaacaggtgatgtgctgacattcctagactcccatgtggaatgtaatgtgggctggctggaaccccttctggagagagtttatttaaatagaaagaaagtagcctgtccagtaattgaagtcatcaatgacaaggacatgagttacatgacagtggacaacttccaaagaggtgtcttcacctggcccatgaactttggctggagaacaatccctccagatgttattgcaaaaaatggaattaaagaaacagatataataaggtgcccagtcatggcaggtggattattttccattgacaaaagttacttttatgaacttggaacttatgaccctggtcttgatgtttggggtggagaaaatatggagctatcattcaaggtctggatgtgtggtggtgaaatcgagatcattccctgttccagagtgggccacatattcagaaatgacaatccctactccttccccaaggaccgcatgaagacggtggaacggaatctggtgcgggttgctgaggtctggctcgatgagtacaaggaactcttctatggccacggggatcacctcatagaccaagggctggatgtgggcaacctcacccagcaaagggagttgcgaaagaagctgaagtgccaaagtttcaagtggtacttggacaatgtctttcccgacttgaaggcgcctgttgtaagagctagtggtgtgtttattaatctggccttgggcaagtgtgtttccatcaaaaatatcacagttgtcctggaggactgcgatgggagcagtgagcttcaacaatttaattatacctgggtaagacttattaagcatggagagtggtgtgtggcgcccatccctgataaaggatccctgacgctgtacccgtgtgacaacagaaacaacaggcttaaatggctgcacagatcagcatctgcctttcatccagaactggtggaccacattgtttttgaaagctatcagcagttattatgtatggaagggaatttctctcagaagaccctgaaactggctgcttgtaacccgacggaaccacaacaaaagtggaaatttgaaaaatactacgatgtctaatgagaaatactttatctagttaaaccactagattctgtgaaaataacacaaaaacttggtgactgtatttctctccatagtagtttaaattccattttaatagcatttgaatggaaggcttttgaaaatgactacatttgaatcatcaaacaataactcagggaaagaagttgccattgggctgctgttcttcagctctgggtggcctttggaagtgtcttgtgtcccaccctgcattggggtgcatactgcaagtcttccttccggactctcacaggtaaccagaattggaaacaaagaatgatgtcatgcccgtgactgctgtcatggcccatgaatggcgctaaacccaaccacattctgatttcaccaaattcatctgcatggattcccacacctggaagacatagctagctgcacagagacaccaccttgttgaaagagctccatgtttacctggcagtgtagagcagtctgctcaggtctccatgactcctccttttttttccatgacccctcctaatagggggtcttgatctgaatgttttcttaatttgaagctattggggggggatttaatcaaaaaggaagaagccttaatgtactt

SEQ ID NO: 875 - protein, 930 aa, Rattus norvegicus
  ref <308>: DATABASE ACCESSION NUMBER: SWISS-Prot / AAC69708
  ref <309>: DATABASE ENTRY DATE: 2003-02-01
MNKIRKFFRGSGRVLAFIFVASVIWLLFDMAALRLSFSEINTGILKEDIMRREQTGFRVEADQMTILSPSSRGMRPPRNGAGGKESFRKAENRVLKVEENVDQVQRKGKMQFLLGRGKAVSLWHRTHVQTLPVTLPMQKTQGRDSKPEVSSLHMMSKQTTVLGSEKDSFTVSRGVPLNKTAEHTETLDKKQEAPENYNLSSDTSKQASQRALNVTISVRTDRSKQQSQTVTKSSIQFASLPILKPEEVTVTKKTEAQGKDLKYEAHKARPLLKFTADVGHLKKQSTNETGLGVLPEADGAKVAPGKKLNFSESQIVIITKEEGQKTDTKEVPNSKIQTVFPKLLGESQGKHIPRSQSQTLSSPLAPKRAVSQSKPTLAEELHTARSNLTAKATTVGHQQSHANISENPGKHHVLRIDVTLSPRDLNAPGQFGRPVVVPPGKKKEAEQRWKEGNFNVYLSDLIPVDRAIEDTRPAGCAEQLVHNDLPTTSIIMCFVDEVWSALLRSVHSVLNRSPPHLIKEILLVDDFSTKDYLKANLDKYMSQFPKVRILRLKERHGLIRARLAGAQNATGDVLTFLDSHVECNVGWLEPLLERVYLNRKKVACPVIEVINDKDMSYMTVDNFQRGVFTWPMNFGWRTIPPDVIAKNGIKETDIIRCPVMAGGLFSIDKSYFYELGTYDPGLDVWGGENMELSFKVWMCGGEIEIIPCSRVGHIFRNDNPYSFPKDRMKTVERNLVRVAEVWLDEYKELFYGHGDHLIDQGLDVGNLTQQRELRKKLKCQSFKWYLDNVFPDLKAPVVRASGVFINLALGKCVSIKNITVVLEDCDGSSELQQFNYTWVRLIKHGEWCVAPIPDKGSLTLYPCDNRNNRLKWLHRSASAFHPELVDHIVFESYQQLLCMEGNFSQKTLKLAACNPTEPQQKWKFEKYYDV

SEQ ID NO: 876 - DNA, 2007 bp, Homo sapiens
  ref <308>: DATABASE ACCESSION NUMBER: EMBL / AJ245539
  ref <309>: DATABASE ENTRY DATE: 2000-01-07
gccgagggtcttccttttcctaagttcactgtcaattcaaatcgcttaaggaagcaatctattaatgagacacctttgggaagtttgtcaaaggatgatggagctagaggggctcatgggaagaaactcaatttctctgaaagccatcttgtgattataaccaaagaggaagagcaaaaggcagaccccaaagaggtctctaattctaaaaccaaaacaatatttcctaaagtattgggtaaaagccaaagtaaacacatttccaggaatagaagtgagatgtcttcctcttcacttgctccacatagagtgccactgtcccaaactaaccatgctttaactggagggctagagccagcaaaaatcaacataactgccaaagccccctctacagaatacaaccagagtcatataaaagcccttttacctgaagacagtggaacgcaccaggtgttaagaattgatgtgacactttctccaagggaccccaaagctccagggcagtttgggcgtcctgtagttgtcccccatggaaaggagaaggaggcagaaagaagatggaaagaaggaaacttcaatgtctaccttagcgatttgatcccagtggatagagccattgaagacaccagacctgctggatgtgcagagcagctagttcacaataacctcccaaccaccagtgtcatcatgtgctttgtggatgaagtgtggtccactctcctgagatctgttcacagtgtcatcaatcgctctcctccacacctcatcaaggagattctgctggtagatgacttcagcaccaaagactatctaaaagataatttggataaatacatgtcccagtttccaaaagttcggattcttcgcctcaaagagagacatggcttaataagggccaggctggcaggagcacagaatgcaacaggtgatgtgttgacatttttagattctcatgtggaatgtaacgttggttggttggaacctcttctggaaagagtttatttaagtagaaagaaagtggcctgtccagtaatcgaagtcatcaatgataaggatatgagttacatgacagtggataactttcaaagaggcatctttgtgtggcccatgaactttggttggagaacaattcctccagatgtcattgcaaaaaacagaattaaagaaactgatacaataaggtgccctgtcatggctggtggattgttttctattgacaaaagttacttttttgaacttggaacatacgaccctggccttgatgtttggggtggggaaaatatggagctctcattcaaggtgtggatgtgtggtggtgaaattgagatcattccctgctcccgagtgggccatatattcagaaatgacaatccatattccttccccaaagaccggatgaagacagtggagcggaacttggtgcgggttgccgaggtctggctggatgagtataaggagctgttctatggccatggagaccacctcatcgaccaagggctagatgttggcaacctcacccagcaaagggagctgcgaaagaaactgaagtgcaaaagtttcaaatggtacttggagaatgtctttcctgacttaagggctcccattgtgagagctagtggtgtgcttattaatgtggctttgggtaaatgcatttccattgaaaacactacagtcattctggaagactgcgatgggagcaaagagcttcaacaatttaattacacctggttaagacttattaaatgtggagaatggtgtatagcccccatccctgataaaggagccgtaaggctgcacccttgtgataacagaaacaaagggctaaaatggctgcataaatcaacatcagtctttcatccagaactggtgaatcacattgtttttgaaaacaatcagcaattattatgcttggaaggaaatttttctcaaaagatcctgaaagtagctgcctgtgacccagtgaagccatatcaaaagtggaaatttgaaaaatattatgaagcctga

SEQ ID NO: 877 - protein, 610 aa, Homo sapiens
  misc_feature (1)..(610): Xaa=Unknown amino acid
  ref <308>: DATABASE ACCESSION NUMBER: SWISS-Prot / AAF15313
  ref <309>: DATABASE ENTRY DATE: 2003-02-01
QKADPKEVSNSKTKTIFPKVLGKSQSKHISRNRSEMSSSSLAPHRVPLSQTNHALTGGLEPAKINITAKAPSTEYNQSHIKALLPEDSGTHQVLRIDVTLSPRDPKAPGQFGRPVVVPHGKEKEAERRWKEGNFNVYLSDLIPVDRAIEDTRPAGCAEQLVXNNLPTTSVIMCFVDEVWSTLLRSVHSVINRSPPHLIKEILLVDDFSTKDYLKDNLDKYMSQFPKVRILRLKERHGLIRARLAGAQNATGDVLTFLDSHVECNVGWLEPLLERVYLSRKKVACPVIEVINDKDMSYMTVDNFQRGIFVWPMNFGWRTIPPDVIAKNRIKETDTIRCPVMAGGLFSIDKSYFFELGTYDPGLDVWGGENMELSFKVWMCGGEIEIIPCSRVGHIFRNDNPYSFPKDRMKTVERNLVRVAEVWLDEYKELFYGHGDHLIDQGLDVGNLTQQRELRKKLKCKSFKWYLENVFPDLRAPIVRASGVLINVALGKCISIENTTVILEDCDGSKELQQFNYTWLRLIKCGEWCIAPIPDKGAVRLHPCDNRNKGLKWLHKSTSVFHPELVNHIVFENNQQLLCLEGNFSQKILKVAACDPVKPYQKWKFEKYYEA

SEQ ID NO: 878 - DNA, 1421 bp, Rattus norvegicus
  ref <308>: DATABASE ACCESSION NUMBER: EMBL / AF051425
  ref <309>: DATABASE ENTRY DATE: 1998-03-16
ctactgctgctgctgctactgctgccgctgtgtgcagggggcattcactgtagggacaacgggacagttgggacagttaggacagcaagacgggacctttgagtatctttttctccgtcttcagtcatgacagagaactcggacaaagttcctatcaccatggtaggacctgaagacgttgagttttgcagtcccccggcatatgccactgtgaccgtgaagccctccgggagccctacacggctgctcaaggtgggagctgtggttctcatttctggcgcggtgctgctgctcttcggggccattggggccttctacttctggaagggaaatgacaatcacatttacaacgtccattacaccatgagtatcaatgggagactacaagacgcgtccatggagatagatgctgccaacaacttggagacctttaaaatgggaagcggagcggaggaagcgattgaagttaatgatttccaaaatggcatcactgggatccgttttgctggaggagagaagtgctacatcaaagcacaggtgaaggctcgcatccctgaggtcagcactgggaccaagcagagcatctctgaactggaaggcaagatcatgccagtcaaatatgaagagaattctctgatttgggtggccgtggaccagcctgtaaaggacaacagcttcctgagttctaaaatcctcgaattctgtggcgacctgcctattttctggcttaagcccatgtatccgaaagaaatcccaagagagagaagagaagtagtgagaagcagtgctccctctaccacaaggagaccacacagcgaacctcgaggcaacgcaggccctggaagactgagtaacagaaccagacccagcgttcaggatgacgaagaacctttcaaccctgacaatccttaccaccagcaggaaggagagagcatgacctttgaccctagactggatcacgaaggaatctgctgtatagagtgcagacggagctacacccactgccagaagatctgcgaaccgctgggaggttactacccgtggccttataattaccaagggtgtcgctcagcctgcagagtggtcatgccgtgcagctggtgggttgcccgcatcttgggcatggtgtaaatccatttcatctatcagcactgccaagcaagaattagcacgagagttgagaaccaaagaaccatgccaagggaccgcaaagtattttatactcaacctgaataacgttatcctaaacgctgcagcagaaccttggttgtgcaccgctgtgtgcaaatgtactgaaagggtagttttaagtctacagttactatccctttactatttgctttaccaataaagtctactgcaagtctttaaaagctacttttgaaataaacatgaagttatttacaaaaaaaaaaaaaaaa

SEQ ID NO: 879 - protein, 334 aa, Rattus norvegicus
  ref <308>: DATABASE ACCESSION NUMBER: SWISS-Prot / O70367
  ref <309>: DATABASE ENTRY DATE: 2002-06-15
MTENSDKVPITMVGPEDVEFCSPPAYATVTVKPSGSPTRLLKVGAVVLISGAVLLLFGAIGAFYFWKGNDNHIYNVHYTMSINGRLQDASMEIDAANNLETFKMGSGAEEAIEVNDFQNGITGIRFAGGEKCYIKAQVKARIPEVSTGTKQSISELEGKIMPVKYEENSLIWVAVDQPVKDNSFLSSKILEFCGDLPIFWLKPMYPKEIPRERREVVRSSAPSTTRRPHSEPRGNAGPGRLSNRTRPSVQDDEEPFNPDNPYHQQEGESMTFDPRLDHEGICCIECRRSYTHCQKICEPLGGYYPWPYNYQGCRSACRVVMPCSWWVARILGMV

SEQ ID NO: 880 - DNA, 363 bp, Homo sapiens
  ref <308>: DATABASE ACCESSION NUMBER: EMBL / AB005999
  ref <309>: DATABASE ENTRY DATE: 1999-11-07
gaagtggtaagaaaaattgttccaactaccacaaaaagaccacacagtggaccacggagcaacccaggcgctggaagactgaataatgaaaccagacccagtgttcaagaggactcacaagccttcaatcctgataatccttatcatcagcaggaaggggaaagcatgacattcgaccctagactggatcacgaaggaatctgttgtatagaatgtaggcggagctacacccactgccagaagatctgtgaacccctggggggctattacccatggccttataattatcaaggctgccgttcggcctgcagagtcatcatgccatgtagctggtgggtggcccgtatcttgggcatggtgtga

SEQ ID NO: 881 - protein, 334 aa, Homo sapiens
  ref <308>: DATABASE ACCESSION NUMBER: SWISS-Prot / O75829
  ref <309>: DATABASE ENTRY DATE: 2001-10-16
MTENSDKVPIALVGPDDVEFCSPPAYATLTVKPSSPARLLKVGAVVLISGAVLLLFGAIGAFYFWKGSDSHIYNVHYTMSINGKLQDGSMEIDAGNNLETFKMGSGAEEAIAVNDFQNGITGIRFAGGEKCYIKAQVKARIPEVGAVTKQSISSKLEGKIMPVKYEENSLIWVAVDQPVKDNSFLSSKVLELCGDLPIFWLKPTYPKEIQRERREVVRKIVPTTTKRPHSGPRSNPGAGRLNNETRPSVQEDSQAFNPDNPYHQQEGESMTFDPRLDHEGICCIECRRSYTHCQKICEPLGGYYPWPYNYQGCRSACRVIMPCSWWVARILGMV

SEQ ID NO: 882 - DNA, 6402 bp, Rattus norvegicus
  ref <308>: DATABASE ACCESSION NUMBER: EMBL / AF051561
  ref <309>: DATABASE ENTRY DATE: 1998-07-28
tgtgaggcagcggcgctgcgactctctctcccccggctccttagtgggagcgccggccagggacccgagccgcgctgtacgcagcgtccacccgcccgctccgcaggtccccgagcgtcgggcggcgatggagcccgggcccgcggcgccctcgtctggcgccccgcggcccgcccgggatggggacgcgccgctgactgccgccggggtggacctgcccggcacggccgtactctccggtcgagaggatgctaccgctgggagccaggccggcggcggggtgcgcggagagggaaccccggccgctggcgatgggctgggcaaacctctggggcccacccccagccagagccgcttccaggtggacccggtttccgagaacgccgggcgggccgcggctgctgcagctgcagcggcggctgcggcggctgccggggcagcgggcaaggagacccccgcggctgggaaagccggcactgagagcggcgtggccaagggcagcgaggaagccaagggccgcttccgcgtgaacttcgtggacccggctgcctcctcgtcggcggacgacagcctgtcggatgcggcgggagtcggtggcgacgggcccaacgtgagctcccagaacggcggggacacggtgctgagcgagggcagcagcctgcactcgggtggtggcagtggacaccaccagcagtactactatgacacccacaccaacacttactacctgcgcaccttcggccacaacaccatggacgcggtgcccaggatcgaccactaccggcacacggccgcgcagctgggcgagaagctgctccggcccagcctgggagagttccacgatgagctggaaaaggaaccttttgaggatggttttgcgaatggagaagaaagtactccaaccagagatgctgtggtcacatacactgccgaaagtaaaggagttgtaaagtttggctggatcaagggtgttttagtacgatgtatgttgaatatttggggtgtgatgctctttattcgattgtcatggattgtgggtcaggctggaataggtctctccgttcttgtaatagcaatggccactgttgtgacaaccatcacaggattgtctacttcagcaatagctaccaatggattcgtgagaggaggaggagcatactatttaatctctagaagtctagggccagaatttggcggtgcgattggcttgatcttcgcttttcccaatgcagtggcagttgctatgtatgttgttggattcgcagagactgtagtggagctgcttaaggaacattccatacttatgatagatgaaatcaatgacatccgaattattggagccattacagtggtggttcttctgggcatctcagtggccggaatggagtgggaagcaaaggctcagatcgtccttctggtgattcttcttctggccatcgctgacttcgtcataggaacatttatctcactggacagcaagaagcccaagggtttctttggctataaatctgaaatatttagtgagaactttggaccggattttcgagaagaagagactttcttttctgtattcgccatcttttttcctgctgcaactggtattctagctggggcgaacatctcgggtgaccttgcagatcctcagtcagccatacccaaaggaacgctcttagccattttgattacgacagtggtttacataggaatcgcagtgtctgtaggttcttgtgttgtccgggatgccactgggaacgttaatgacaccattacaacagagctaactaactgtacttctgcagcctgcaaattaaactttgacttttcctactgtgaaagcaacacctgttcttatgggctaatgaacaactttcaggtgatgagcatggtgtcaggatttgcacccctgatctctgcgggtatcttttcagccacactctcatcagcactggcatctcttgtgagtgctcccaaaatatttcaggctctatgtaaggacaatatctacccagctttccagatgtttgcgaaaggttatggaaaaaataatgaacctcttcgtggttacatcttaacattcttaattgcacttggattcatcttaattgctgaattgaatgtcattgctccaattatctctaatttctttctcgcatcatacgccttaatcaacttttctgtattccatgcgtcacttgcaaagtctccagggtggcgtcctgcgttcaagtactacaacatgtggatctcccttactggagcgattctctgctgcatagtgatgttcgtcattaactggtgggctgcactgctcacatatgtgatagttcttggactgtacatttatgtcacttacaaaaagccagatgtgaactggggatcctccacacaagcgctgacttacctcagcgcactgcagcattcaatccgtctttccggggtggaggaccatgtgaaaaacttcaggccacagtgtcttgtaatgacaggttctccaaactcacggcctgctttactgcatcttgttcatgacttcacgaaaaatgttggtttaatgatctgtggccatgtgcatatgggtccccgaagacaagctatgaaagagatgtccattgatcaagccaaatatcagcgatggctcattaaaaacaaaatgaaggctttctacgctccggttcacgcagatgacttgcgggaaggtgcacagtacctgatgcaggctgctggacttggtcgtatgaaaccaaacacacttgtcctcggatttaagaaagattggttacaagcagatatgagggatgtggatatgtatataaacttatttcatgatgcttttgacatacagtatggagttgtggtcattcgcctaaaggaaggactggatatatcacacctccaaggacaagaagaattattgtcatcacaagaaaagtcacctggtaccaaggatgtggtagtaaatgtggactacagtaagaagtcagatcaagatgctttcaaagcatctggtgaaaaacctattacacagaaagatgaggaagaggatggcaagacttcaactcagccactgttgaaaaaagaatccaagggccccgtggcacctttaaatgtagctgaccaaaagcttcttgaagctagcacacagtttcagaaaaaacaagggaagaatactatagatgtctggtggctttttgatgatggaggtttgaccttgttgataccctatcttctgacaaccaagaaaaagtggaaagattgtaagatccgagtattcattggtggaaagataaacagaatagaccatgaccggagagcgatggctactttactcagtaaattccgaatagacttctccgatatcatggtcctaggagacatcaacaccaaaccaaaaaaggaaaacatcgtcgcttttgatgacatgattgagccatacagacttcacgaggatgataaagagcaggatattgcagacaaaatgaaagaggatgagccctggcgcatcacagacaacgagctggagctctacaagaccaagacatatcggcagatcaggttaaatgaattattaaaggagcattcaagcacagctaatattattgtcatgagtcttccagttgcccggaagggtgctgtgtccagcgcgctgtacatggcttggttagaagctctgtctaaggacctgccaccaatcctgctggttcgtgggaatcatcagagcgtccttaccttctactcttaattgtcctgccccatggactccctctaagaatggtacttcagtgcctagtcagagtgactggatcgtcagcaacaccgcagcatcacagtggcgaactgggtctttgtttcactacttcattctttgaaagcacatggacacgttgctccactgatagatctgtggagacttcggttttagtctactccagatctcagtcttatgactgctgattcttccttgttggactgaagttcttgagagtaaagttttcctttgctacttgacagcaataagagtgagttatttttgattgctgaaaggagtacataagcctttagccttgaggtgccttctgaaattaaccaaatttcatccatagatctatcgtcttttgtacatttatagaatgttaaactctgccttcagacattatttttacttctaatctctgtcatcctaagtggacactgcttgtctcctcccattgaccagttagtgttgagagctgtgtgtttcgtattacttttgtaaaagcgtttgttggatactgaagagggtaggacaagctaataaaatatgtggagaaagtatccaaaaatggagcccaaggttaggtttatatgaatagatacttagagctagggaagagaggcccgaacaccgtttctatctctcaattagagttatctattatttcttttaaatcatagagatgactgacgatctacccagtacttcatttataacataaaaaaaaaaaatcacatttttttaaagcaaaaccttgaggtcatttgtattgtttttaaaagatctcttttaatttagaatttcctctcaaatgggagggacttttaagacatgctaactggtatttttcgaggaaatttagacaaagcattgccatttactagagcatttcaataaaaactatggggatttcactatcctatcgcatcctttatttaaaaagaaagatgacaatgttatcaatggttaaatggaccactgttttcttagtgaaatggttttaggcttaatttattcaagtatcaagaacatttagtcttaatacactcaggtttgaacagattattccgaacattgaaatttaatccattcttaatactttaaaacttgcgttaaagaaaactgccagtttgtgcatttgaccttgtcgtctgcaagtgcacttgacagtgagcgtgcacacctgcgctgtcctgaacgctttatacacagtcgttaatgtgaagtgtctaagttcaaggaaggatcttctaaacatttcaagggattcatgtccacatgtctgtctgtgtgtatgttttgcatacacaggtgcatatgtgtatatgtaatgaaatttatgttgccagtgtttcagattttaaagcgatcatgatttggtaggttacagattttgttgttgttgttgttttagttttttcttttcttttttaagtaagcattcaagtcagatcaagacattacagatttcatggaggacaaagacaattgaaagaacatcgtgtagctttgtacagttatccagttatgtaaagtagatgatctgtaagtttcagtggagaacatagcgcagactttcatcatcttaagggaaatgtcagaaaagcatttcagtagtgtagtacttgtgctccatgaaaacagactgcgttaataccagctggatatcttctcgtttccactcagaatattaaagaaaacaaggttaagtgattttttccaagttcttcttacattataatataatattgttccatttattgtaaattttgcagagtttagggcagtatagaagaatcatattagcaaaccatatcatgtgtggatcttctgaatggatactagggcatgggctgaatgctgctatcttgaaatgtacacagctagacttgccttttatttttaaaggttttccctcattcaggaaacttcattgtgatctgtactacagaaactaaatgtcatacatcatacgtgtgtgttcaaagtacataaaatggatctcaacgcacctaacagggagggtggcgacactgtgaagtgatgccagcagcagctctctactcttgaaaaccgccttccgtcgtcagctaacacgagctgccaggccagacgttctcaaggttgcagtagtactctaaaacgaaacttctcaatggttaattcttagacatctagctagtattagagctgttttcattttacgctgtttggattatttggatgccaaattatgttttagtcctaatcattgataataacttaaaaatacgcagtggcatttgagctcattcttgggataagttaaaaacttgagtgcgttcaaagagaacgtcgttgatgattaacggttcactaaatcagatattcatttgtctcatcttttccttcctgctttgttttccttcactcttctcatatggctctcctgacgtgtgtgtggtttgttttgttttgtttttttaagactatggaaataatttaatgagttgagctccggtgatgatctgctaagtttgaaaatgtaatattttgataatactgtactgtacctgtcccaaatgcttttgtaatgttttaaccccgagtattgcagttgctgctccgtacagaggttactgcaataaaggaagtggaatcattaaaacttt

SEQ ID NO: 883 - protein, 1203 aa, Rattus norvegicus
  ref <308>: DATABASE ACCESSION NUMBER: SWISS-Prot / AAC27557
  ref <309>: DATABASE ENTRY DATE: 2003-02-01
MEPGPAAPSSGAPRPARDGDAPLTAAGVDLPGTAVLSGREDATAGSQAGGGVRGEGTPAAGDGLGKPLGPTPSQSRFQVDPVSENAGRAAAAAAAAAAAAAAGAAGKETPAAGKAGTESGVAKGSEEAKGRFRVNFVDPAASSSADDSLSDAAGVGGDGPNVSSQNGGDTVLSEGSSLHSGGGSGHHQQYYYDTHTNTYYLRTFGHNTMDAVPRIDHYRHTAAQLGEKLLRPSLGEFHDELEKEPFEDGFANGEESTPTRDAVVTYTAESKGVVKFGWIKGVLVRCMLNIWGVMLFIRLSWIVGQAGIGLSVLVIAMATVVTTITGLSTSAIATNGFVRGGGAYYLISRSLGPEFGGAIGLIFAFPNAVAVAMYVVGFAETVVELLKEHSILMIDEINDIRIIGAITVVVLLGISVAGMEWEAKAQIVLLVILLLAIADFVIGTFISLDSKKPKGFFGYKSEIFSENFGPDFREEETFFSVFAIFFPAATGILAGANISGDLADPQSAIPKGTLLAILITTVVYIGIAVSVGSCVVRDATGNVNDTITTELTNCTSAACKLNFDFSYCESNTCSYGLMNNFQVMSMVSGFAPLISAGIFSATLSSALASLVSAPKIFQALCKDNIYPAFQMFAKGYGKNNEPLRGYILTFLIALGFILIAELNVIAPIISNFFLASYALINFSVFHASLAKSPGWRPAFKYYNMWISLTGAILCCIVMFVINWWAALLTYVIVLGLYIYVTYKKPDVNWGSSTQALTYLSALQHSIRLSGVEDHVKNFRPQCLVMTGSPNSRPALLHLVHDFTKNVGLMICGHVHMGPRRQAMKEMSIDQAKYQRWLIKNKMKAFYAPVHADDLREGAQYLMQAAGLGRMKPNTLVLGFKKDWLQADMRDVDMYINLFHDAFDIQYGVVVIRLKEGLDISHLQGQEELLSSQEKSPGTKDVVVNVDYSKKSDQDAFKASGEKPITQKDEEEDGKTSTQPLLKKESKGPVAPLNVADQKLLEASTQFQKKQGKNTIDVWWLFDDGGLTLLIPYLLTTKKKWKDCKIRVFIGGKINRIDHDRRAMATLLSKFRIDFSDIMVLGDINTKPKKENIVAFDDMIEPYRLHEDDKEQDIADKMKEDEPWRITDNELELYKTKTYRQIRLNELLKEHSSTANIIVMSLPVARKGAVSSALYMAWLEALSKDLPPILLVRGNHQSVLTFYS

SEQ ID NO: 884 - DNA, 316 bp, Homo sapiens
  ref <308>: DATABASE ACCESSION NUMBER: EMBL / BE933612
  ref <309>: DATABASE ENTRY DATE: 2001-08-31
gtgtatctttccttgtttttctcgaaactggtgctagcttcaagaagcttttggtcagctacatttaaaggcacaatagggccttggattcttttttcaacagtggttgagttgcagtcttgccatcctcttcctcaactttgtgtgtatttgatttttaataatggctgcatttaataaccagctgtcaaaatgaaaattttacaatcagcttttctaagttggtatgagccagcttagcataccactacattagtataccaaagagagcaagattcaacttttccttttggtgtttgagaatatagataagcta

SEQ ID NO: 885 - protein, 1099 aa, Homo sapiens
  ref <308>: DATABASE ACCESSION NUMBER: Refseq / NP_000329
  ref <309>: DATABASE ENTRY DATE: 2002-11-05
MSLNNSSNVFLDSVPSNTNRFQVSVINENHESSAAADDNTDPPHYEETSFGDEAQKRLRISFRPGNQECYDNFLHSGETAKTDASFHAYDSHTNTYYLQTFGHNTMDAVPKIEYYRNTGSISGPKVNRPSLLEIHEQLAKNVAVTPSSADRVANGDGIPGDEQAENKEDDQAGVVKFGWVKGVLVRCMLNIWGVMLFIRLSWIVGEAGIGLGVIIIGLSTIVTTITGMSTSAIATNGVVRGGGAYYLISRSLGPEFGGSIGLIFAFANAVAVAMYVVGFAETVVDLLKESDSMMVDPTNDIRIIGSITVVILLGISVAGMEWEAKAQVILLVILLIAIANFFIGTVIPSNNEKKSRGFFNYQASIFAENFGPRFTKGEGFFSVFAIFFPAATGILAGANISGDLEDPQDAIPRGTMLAIFITTVAYLGVAICVGACVVRDATGNMNDTIISGMNCNGSAACGLGYDFSRCRHEPCQYGLMNNFQVMSMVSGFGPLITAGIFSATLSSALASLVSAPKVFQALCKDNIYKALQFFAKGYGKNNEPLRGYILTFLIAMAFILIAELNTIAPIISNFFLASYALINFSCFHASYAKSPGWRPAYGIYNMWVSLFGAVLCCAVMFVINWWAAVITYVIEFFLYVYVTCKKPDVNWGSSTQALSYVSALDNALELTTVEDHVKNFRPQCIVLTGGPMTRPALLDITHAFTKNSGLCICCEVFVGPRKLCVKEMNSGMAKKQAWLIKNKIKAFYAAVAADCFRDGVRSLLQASGLGRMKPNTLVIGYKKNWRKAPLTEIENYVGIIHDAFDFEIGVVIVRISQGFDISQVLQVQEELERLEQERLALEATIKDNECEEESGGIRGLFKKAGKLNITKTTPKKDGSINTSQSMHVGEFNQKLVEASTQFKKKQEKGTIDVWWLFDDGGLTLLIPYILTLRKKWKDCKLRIYVGGKINRIEEEKIAMASLLSKFRIKFADIHIIGDINIRPNKESWKVFEEMIEPYRLHESCKDLTTAEKLKRETPWKITDAELEAVKEKSYRQVRLNELLQEHSRAANLIVLSLPVARKGSISDLLYMAWLEILTKNLPPVLLVRGNHKNVLTFYS

SEQ ID NO: 886 - DNA, 6402 bp, Rattus norvegicus; identical to SEQ ID NO: 882
  ref <308>: DATABASE ACCESSION NUMBER: EMBL / AF051561
  ref <309>: DATABASE ENTRY DATE: 1998-07-28

SEQ ID NO: 887 - protein, 1203 aa, Rattus norvegicus; identical to SEQ ID NO: 883
  ref <308>: DATABASE ACCESSION NUMBER: SWISS-Prot / AAC27557
  ref <309>: DATABASE ENTRY DATE: 2003-02-01

SEQ ID NO: 888 - DNA, 316 bp, Homo sapiens; identical to SEQ ID NO: 884
  ref <308>: DATABASE ACCESSION NUMBER: EMBL / BE933612
  ref <309>: DATABASE ENTRY DATE: 2001-08-31

SEQ ID NO: 889 - protein, 1099 aa, Homo sapiens; identical to SEQ ID NO: 885
  ref <308>: DATABASE ACCESSION NUMBER: Refseq / NP_000329
  ref <309>: DATABASE ENTRY DATE: 2002-11-05

SEQ ID NO: 890 - DNA, 1028 bp, Rattus norvegicus
  ref <308>: DATABASE ACCESSION NUMBER: EMBL / AF051895
  ref <309>: DATABASE ENTRY DATE: 2000-03-03
gcggccgcgtcgacgttgcacggagagtactgcctgtctctcggcgtgtgcatctgtcctgctctcaaccgcagcctgcgccctaccttctgcagctccagcctactcctgaccgacagcatcatggctctcagaggcaccgtgactgacttctctggattcgacggcagggctgatgccgaagttcttcggaaggccatgaaaggcttgggcaccgacgaggacagcatcctgaacctgttgacagcccggagcaacgctcagcgccagcagattgctgaggagtttaagactctgtttggcagggaccttgtgaatgacatgaagtctgaactgaccggaaagtttgagaagttaattgtggctttgatgaagccctcccggctctacgacgcctacgagctgaaacacgctcttaagggagctgggacagatgagaaagtgttgactgaaatcattgcctcaaggacacctgaagagctcagggccataaaacaagcttatgaagaagaatatggttccaacctggaagatgatgtggtgggggatacctcagggtactaccagaggatgttggtggtcctccttcaggccaatagagaccctgacactgcaattgatgatgctcaagttgaactggatgctcaggcattgttccaggctggagagctgaagtgggggacggatgaagaaaagttcatcaccatccttgggacacgcagtgtgtctcatttaagaagagtgtttgacaagtacatgacaatatcaggatttcagattgaggaaaccattgaccgagagacctcagggaacttggagaacttactcctggctgtcgtgaagtctattcggagcatacctgcctaccttgcagagaccctctactatgctatgaagggtgctgggacggacgatcacaccctcatcagagtcatagtgtcgaggagtgagattgatctgtttaacatcaggaaggagtttaggaagaacttcgccacgtccctgtactctatgatcaagggcgacac

SEQ ID NO: 891 - protein, 302 aa, Rattus norvegicus
  ref <308>: DATABASE ACCESSION NUMBER: SWISS-Prot / AAC06290
  ref <309>: DATABASE ENTRY DATE: 2003-02-01
MALRGTVTDFSGFDGRADAEVLRKAMKGLGTDEDSILNLLTARSNAQRQQIAEEFKTLFGRDLVNDMKSELTGKFEKLIVALMKPSRLYDAYELKHALKGAGTDEKVLTEIIASRTPEELRAIKQAYEEEYGSNLEDDVVGDTSGYYQRMLVVLLQANRDPDTAIDDAQVELDAQALFQAGELKWGTDEEKFITILGTRSVSHLRRVFDKYMTISGFQIEETIDRETSGNLENLLLAVVKSIRSIPAYLAETLYYAMKGAGTDDHTLIRVIVSRSEIDLFNIRKEFRKNFATSLYSMIKGDT

SEQ ID NO: 892 - DNA, 1630 bp, Homo sapiens
  ref <308>: DATABASE ACCESSION NUMBER: Refseq / NM_001154
  ref <309>: DATABASE ENTRY DATE: 2000-10-31
agggccggggtggggcgctggcgtttccgttgcttggatcagtctaggtgcagctgcggatccttcagcgtctgcatctcggcgtcgccccgcgtaccgtcgcccggctctccgccgctctcccgggggttcggggcacttgggtcccacagtctggtcctgcttcaccttcccctgacctgagtagtcgccatggcacaggttctcagaggcactgtgactgacttccctggatttgatgagcgggctgatgcagaaactcttcggaaggctatgaaaggcttgggcacagatgaggagagcatcctgactctgttgacatcccgaagtaatgctcagcgccaggaaatctctgcagcttttaagactctgtttggcagggatcttctggatgacctgaaatcagaactaactggaaaatttgaaaaattaattgtggctctgatgaaaccctctcggctttatgatgcttatgaactgaaacatgccttgaagggagctggaacaaatgaaaaagtactgacagaaattattgcttcaaggacacctgaagaactgagagccatcaaacaagtttatgaagaagaatatggctcaagcctggaagatgacgtggtgggggacacttcagggtactaccagcggatgttggtggttctccttcaggctaacagagaccctgatgctggaattgatgaagctcaagttgaacaagatgctcaggctttatttcaggctggagaacttaaatgggggacagatgaagaaaagtttatcaccatctttggaacacgaagtgtgtctcatttgagaaaggtgtttgacaagtacatgactatatcaggatttcaaattgaggaaaccattgaccgcgagacttctggcaatttagagcaactactccttgctgttgtgaaatctattcgaagtatacctgcctaccttgcagagaccctctattatgctatgaagggagctgggacagatgatcataccctcatcagagtcatggtttccaggagtgagattgatctgtttaacatcaggaaggagtttaggaagaattttgccacctctctttattccatgattaagggagatacatctggggactataagaaagctcttctgctgctctgtggagaagatgactaacgtgtcacggggaagagctccctgctgtgtgcctgcaccaccccactgccttccttcagcacctttagctgcatttgtatgccagtgcttaacacattgccttattcatactagcatgctcatgaccaacacatacacgtcatagaagaaaatagtggtgcttctttctgatctctagtggagatctctttgactgctgtagtactaaagtgtacttaatgttactaagtttaatgcctggccattttccatttatatatattttttaagaggctagagtgcttttagccttttttaaaaactccatttatattacatttgtaaccatgatactttaattagaagcttagccttgaaattgtgaactcttggaaatgttattagtgaagttcgcaactaaactaaacctgtaaaattatgatgattgtattcaaaagattaatgaaaaataaacatttctgtccccctgaattat

SEQ ID NO: 893 - protein, 319 aa, Homo sapiens
  ref <308>: DATABASE ACCESSION NUMBER: SWISS-Prot / P08758
  ref <309>: DATABASE ENTRY DATE: 2002-06-15
AQVLRGTVTDFPGFDERADAETLRKAMKGLGTDEESILTLLTSRSNAQRQEISAAFKTLFGRDLLDDLKSELTGKFEKLIVALMKPSRLYDAYELKHALKGAGTNEKVLTEIIASRTPEELRAIKQVYEEEYGSSLEDDVVGDTSGYYQRMLVVLLQANRDPDAGIDEAQVEQDAQALFQAGELKWGTDEEKFITIFGTRSVSHLRKVFDKYMTISGFQIEETIDRETSGNLEQLLLAVVKSIRSIPAYLAETLYYAMKGAGTDDHTLIRVMVSRSEIDLFNIRKEFRKNFATSLYSMIKGDTSGDYKKALLLLCGEDD

SEQ ID NO: 894 - DNA, 2472 bp, Rattus norvegicus
  ref <308>: DATABASE ACCESSION NUMBER: EMBL / AF052042
  ref <309>: DATABASE ENTRY DATE: 1998-11-24
gaactaaaaagatcgtgtgcgcggatgtgctgtgtctgtagtgactttttccgggcctcttttttgggagaaggtaccagtctgcctcggtgaggcagaaaaggtccgtgatgccattgggctttgcccttctagaaaacaagctctagctggacggtccagaggctccaatggctgcgggctctggggtcgccccgccacctctcggcgttgggctttgtgcggtgaaagtggaggaggactctcccgggagtcaggagccctccggttccggagattggcagaatcccgaaacttctcgaaaacagttcagacaattgcgctaccaggaagtagccggccctgaggaggcgctgagccgactttgggagctctgtcggcggtggctgaggccggagctgcgctccaaagagcagatcatggagctactggtgctggagcagtttcttaccatcctgcctcgggagctccaggcctacgtgcgggaccactgccctgagagcggggaggaggctgcggctttggcgcggactctgcaaagagcactggacggggcctccctccagagctttgcaactttcaaggatgtggctgaatctctgacctgggaagagtgggagcagctggctgcagctcggaagggtttctgccgagagagcacaaaggaccctgggagtacagttggccctggcttggaaaccaaagctgtgaccacagacgtgattctaaagcaagaaatgtcaaaggaggcagagtcccaggcatggctacaagaagtgtcccagggaaaggtcccagtatttaccaaatgtggtgatacctgggaggactgggaggaacggcttccaaaagctgccgaattgctgccgctccagagttctcctgaagagcaaggacgcactgccatcccgcatctccttggcgtgtccaaagatgaaagcgattctaaagataatgaatttgagaacagcggcagcttggtccttggtcagcacatccagacagcagagggtctggtcaccaatggtgaatgtggggaggatcacaaacaaggcttacatgcgaaatgccacacggtgaagcctcacagctctgttgacaatgctttggggcttcttgagagccagaggcatttccaagaaggcagaccttataagtgtgataactgcgagaagagattcagacagcgctcagacctcttcaaacaccagaggactcacacaggtgagaaaccctatcagtgccaagaatgtgggaaaagcttcagtcagagtgctgccctggtgaaacaccagcggacacacacaggtgagaagccatatgcatgcccagaatgcggggaatgcttcaggcagagctcacacctcagtcggcatcagagaacccatggcagcgagaagtactgtaaatgtgaggagtgtggggagatctttcatatctccagcttatttaaacatcagagactgcataaaggggagagaccacacaagtgtgaagtctgtgagaagagctttaaacagcgctcagacctctttaagcaccagagaatccatacaggagagaagccctacatgtgctttgtctgtgagagaagattcagtcagagtgcaaccctcattaaacaccagcgaactcacactggagaaaaaccttataaatgttttcaatgtggcgaaagatttagacagagtacacaccttgtccgacaccaaagaatccatcacaattcagtctctgggcttagggtggagaagcaacatggtaacctcctgagctggtgaccctctggatgcaaagaatggaaatgccccattcgcctagcgcactgacccatcgagggagaaattgacccctccacagctgcagtttatgcgccaggtacaactagcccagtggcagaaaacactgccacagcggcggacctggaacatcgtgaccccccccccccccgggcatcggggccctggtgttagctatttatggttacaccttctactcagtggcccaggaacatttccttgatgagctggaagatgaagccaaagatgcccgagcccgagctcttgagagagagagagagcatcaggaccctaactgtacggaccatcctgaaactgctggagcccccgtacatgttgaatgatgcctggtggtctcacagcatcactggcataggaactgtggactatgattgagcccaagaagccacagactatgcatttggctactgccaaggggagattgctcacgtcacatgcagtttgtacatttactcagcccctttttatttccttgtttgagaggtatgcacgaccttgcctttccccaaactctgtggtttacctcttcacctcccaggggcccaactgttaagggggagggtgtggcctaactgcagagttggaaccaaagtgggaaagatagggtcaagtaaagagtaattaaaaaaaaaaaaaaaaaaaaaaaaaaaaa

SEQ ID NO: 895 - protein, 536 aa, Rattus norvegicus
  ref <308>: DATABASE ACCESSION NUMBER: SWISS-Prot / Q9Z2K3
  ref <309>: DATABASE ENTRY DATE: 2001-10-16
MAAGSGVAPPPLGVGLCAVKVEEDSPGSQEPSGSGDWQNPETSRKQFRQLRYQEVAGPEEALSRLWELCRRWLRPELRSKEQIMELLVLEQFLTILPRELQAYVRDHCPESGEEAAALARTLQRALDGASLQSFATFKDVAESLTWEEWEQLAAARKGFCRESTKDPGSTVGPGLETKAVTTDVILKQEMSKEAESQAWLQEVSQGKVPVFTKCGDTWEDWEERLPKAAELLPLQSSPEEQGRTAIPHLLGVSKDESDSKDNEFENSGSLVLGQHIQTAEGLVTNGECGEDHKQGLHAKCHTVKPHSSVDNALGLLESQRHFQEGRPYKCDNCEKRFRQRSDLFKHQRTHTGEKPYQCQECGKSFSQSAALVKHQRTHTGEKPYACPECGECFRQSSHLSRHQRTHGSEKYCKCEECGEIFHISSLFKHQRLHKGERPHKCEVCEKSFKQRSDLFKHQRIHTGEKPYMCFVCERRFSQSATLIKHQRTHTGEKPYKCFQCGERFRQSTHLVRHQRIHHNSVSGLRVEKQHGNLLSW

SEQ ID NO: 896 - DNA, 793 bp, Homo sapiens
  ref <308>: DATABASE ACCESSION NUMBER: Refseq / NM_014019
  ref <309>: DATABASE ENTRY DATE: 2000-11-02
gggaaggaggagtggcaacatggcgtcttcgggagctggtgaccctctggattctaagcgtggagaggccccgttcgctcagcgtatcgacccgactcgggagaagctgacacccgagcaactgcattccatgcggcaggcggagcttgcccagtggcagaaggtcctaccacggcggcgaacccggaacatcgtgaccggcctaggcatcggggccctggtgttggctatttatggttacaccttctactcgatttcccaggagcgtttcctagatgagctagaagacgaggccaaagctgcccgagcccgagctctggcaagggcgtcagggtcctaatctggatgggtattgatcatgtccaacctgctggagccccttcacatggtggatgatgccccatgaccctgtagaaattgaatcctgctcacaacattgttggccttcttactaaccttggaccgtgattgagcccaagaaaccagggacttacgcatttggccaatgtcaaaagaacagaactttgcccactgcacacttgctgtgtacaatgactgagccctttcttgtagtttgtttccttgtttgagaggtgtgcatgcgaccgtggcttttcccaaagtttctgactttgtggtttacccccttcaccttccagggacgcagttgttacgaggttagacgtggcagctctgtgcagtgtttgagcctacagtgggatacatagggtcaaattgagaataataaactgagtcattctcctggaaaaaaaaaaaaaaaaaaaaaaaaaaa

SEQ ID NO: 897 - protein, 561 aa, Homo sapiens
  ref <308>: DATABASE ACCESSION NUMBER: Refseq / NP_115540
  ref <309>: DATABASE ENTRY DATE: 2002-05-14
MNCSLTAQRRGSDAELGPWVMAARSKDAAPSQRDGLLPVKVEEDSPGSWEPNYPAASPDPETSRLHFRQLRYQEVAGPEEALSRLRELCRRWLRPELLSKEQILELLVLEQFLTILPEELQAWVREHCPESGEEAVAVVRALQRALDGTSSQGMVTFEDTAVSLTWEEWERLDPARRDFCRESAQKDSGSTVPPSLESRVENKELIPMQQILEEAEPQGQLQEAFQGKRPLFSKCGSTHEDRVEKQSGDPLPLKLENSPEAEGLNSISDVNKNGSIEGEDSKNNELQNSARCSNLVLCQHIPKAERPTDSEEHGNKCKQSFHMVTWHVLKPHKSDSGDSFHHSSLFETQRQLHEERPYKCGNCGKSFKQRSDLFRHQRIHTGEKPYGCQECGKSFSQSAALTKHQRTHTGEKPYTCLKCGERFRQNSHLNRHQSTHSRDKHFKCEECGETCHISNLFRHQRLHKGERPYKCEECEKSFKQRSDLFKHHRIHTGEKPYGCSVCGKRFNQSATLIKHQRIHTGEKPYKCLECGERFRQSTHLIRHQRIHQNKVLSAGRGGSRL

SEQ ID NO: 898 - DNA, 1416 bp, Rattus norvegicus
  ref <308>: DATABASE ACCESSION NUMBER: EMBL / AF054618
  ref <309>: DATABASE ENTRY DATE: 1998-04-02
atgtggaaagcctctgcaggccatgctgtgtccatcacccaggatgatggggaagccgatgactgggagactgaccctgattttgtgaacgatgtgagtgaaaaggaacagagatggggcgccaaaaccgtgcagggatcggggcaccaggaacacatcaacatacacaagcttcgagagaatgtcttccaagaacaccagacactcaaggagaatgagctggaaacgggacccaaggcttcccatggctatggcgggaagtttggtgtggagcaagataggatggacaaatcagctgtgggccatgagtaccagtcaaagctctccaagcactgctcacaagtggactcagtccggggcttcggaggcaagttcggtgtccagatggacagggtggatcagtctgctgtaggctttgaataccaggggaagacggagaagcacgcctcccagaaagactactccagtggtttcggtggcaaatatggagtgcaagctgaccgtgtagacaagagtgctgtggggtttgactaccagggcaagacggagaagcacgagtcacagaaagattactccaaaggttttggtggcaaatacggaattgacaaggacaaggtggataaaagcgctgtgggctttgagtatcaaggcaaaacagagaagcatgagtcccagaaagactatgtaaaaggctttggaggaaagtttggtgtgcagaaggatcggatggacaagaacgcatccacctttgaagaagtggtccaggtgccgtctgcctatcagaagactgtccccattgaggctgtgaccagcaaaaccagtaatattcgtgctaactttgaaagcctggcaaaggagagagagcaggaggacagacggaaggcagaagccgagagagctcagcggatggcccaagaaaggcaggagcaggaggctcgaaggaagctggaagagcaagccagagccaagaagcagacaccccctgcatcccctagtcctcagccagctgaagacagaccaccatccagccccatctatgaggatacagctccgttgaaggccgagcccagctacggaagtagtgagcctgagcctgagtacagcactgaggctgcaggccttcctgaggccagcaaccagcaaggtctggcctacacatcagagcctgtttacgagaccacagaggttcctggccactaccaagcagaggatgacacctacgatgggtatgagagtgacctgggcatcacagccatcgccctgtatgactaccaggctgctggcgatgatgaaatctcctttgaccctgatgatgtcatcaccaacatagaaatgattgacgatggctggtggcgtggggtgtgcaaaggcagatatgggctcttcccggccaactatgtggagctgcggcagtag

SEQ ID NO: 899 - protein, 471 aa, Rattus norvegicus
  ref <308>: DATABASE ACCESSION NUMBER: SWISS-Prot / AAC08424
  ref <309>: DATABASE ENTRY DATE: 2003-02-01
MWKASAGHAVSITQDDGEADDWETDPDFVNDVSEKEQRWGAKTVQGSGHQEHINIHKLRENVFQEHQTLKENELETGPKASHGYGGKFGVEQDRMDKSAVGHEYQSKLSKHCSQVDSVRGFGGKFGVQMDRVDQSAVGFEYQGKTEKHASQKDYSSGFGGKYGVQADRVDKSAVGFDYQGKTEKHESQKDYSKGFGGKYGIDKDKVDKSAVGFEYQGKTEKHESQKDYVKGFGGKFGVQKDRMDKNASTFEEVVQVPSAYQKTVPIEAVTSKTSNIRANFESLAKEREQEDRRKAEAERAQRMAQERQEQEARRKLEEQARAKKQTPPASPSPQPAEDRPPSSPIYEDTAPLKAEPSYGSSEPEPEYSTEAAGLPEASNQQGLAYTSEPVYETTEVPGHYQAEDDTYDGYESDLGITAIALYDYQAAGDDEISFDPDDVITNIEMIDDGWWRGVCKGRYGLFPANYVELRQ

SEQ ID NO: 900 - DNA, 2067 bp, Homo sapiens
  ref <308>: DATABASE ACCESSION NUMBER: EMBL / AK023333
  ref <309>: DATABASE ENTRY DATE: 2002-08-06
attgatcggcagaaagctaacttccccccaaggctagaaaccagagttgttaaattcttgttttccttatacacatacggtcttaactgctggtgattaatcttgattacatcatgcagtctcttttctgaaagaccaaagcatatcgccaccttaaagttctcagtttattttttgcaagcttatttagttcttcctcctttgtgtcattgcatcatccgcggaacaagctctcagtccttacgcagtctcggtgcagtctaggtggaggtagctgtggtgtgggcaggcggaggatcagggtcttgtctcccatgttcagctgcatggctttcttcatatgaggctttctctttccatttttttcattttgttttgtttgtttgtttgttttgagacagagtctcgctctgttgcccaggctggagtgcagtggcacgatctcggctcactgcaacctgcgcctcctgggttcaaacgattctcctgcctcagcctcccaagtagctgggattacaggtgtgtgccactacccctggctagtttttctattttttagtaaagatggggttttgccacgttggccaggctggtctcaaactcctggcctcaagtgatccgcccacctcagcctccaaagtgctggttctttgtatgaagctttccagcttttacctgagcagttgattttcaaagtgggcatgcagcgtcatttctgactacacaaaggaactgccctgtaacagctgacagggcccagaacccccccatgcacctgttgtgaaacagggtccagcgtcacctgtatggagcagtgggtggcttgttgtacattttaaaatgtgcgcttgatgtgtttgtgagttgtaacccctacacacttttgcttagtttaacaaaaggaacagtgtagttcgtcctcaggcccccgtgctaattgctgccctgtctctccagactactccagtggttttggcggcaagtatggcgtgcaggccgaccgagtagacaagagcgcggtgggcttcgactaccagggcaagacggagaagcacgagtcacagagaggtggggcggaccccacggtctgtaatcacgcgtttgctccagaaacacccacgagggcattttctctctgcacacgtgattgttgtagattttttaactgaaaatgtttggtgttcttttcgtaccagtgtatgtgggcttttcctaattcgaatggctgcacagttccccatcgtatgaggattccatagtccatgtaaccattccttttttgaatgtggaatttaggttatttatttatttatttatttatttttggtagagatgaggtcttgccgtgttgcccggactggtcttgatctccgtggtctcaagcaatcctccccaaccttggtttccttaagtgctgggattacaggtgtgacctgtaaatttttttttttttttcttttagacggagtctcgctccgttgcccaggctggagtgtagtggcgtgatctctgctcactgcaacctccacctccctggttcaagcaattctcgtgcttcagcctcccggctagccgggattacaagcacacgccaccacgcccagctaatttttgtatttttagtagagacggagttctgccatgttgcccaggctggtcttgaattcctgacctcaggtgatcgccctgccttggcctcccaaagtgctgggattacaggtgtgagccactgcgcccagctgaaacttgactgcagggaacattcttgtacctgtgttttgttcacaagtgattattcaaaagaatcaactcctagacatggaattgctgggtcgaaggctattgaatgtaaaatttccatagatactgccaagttgtccttggaggctgtgctgagttcttccttccccactgcatagcctgtacaccatcactcagagcgtttcccagggctgcagaggccgtggcctgcctgtttccctgtgcctcttgtttggcctgcacatttaaatttttaaaaatatttgccaacatttgaaaagtgagagcttgactatttaaaaactc

SEQ ID NO: 901 - protein, 513 aa, Homo sapiens
  ref <308>: DATABASE ACCESSION NUMBER: SWISS-Prot / AAH08799
  ref <309>: DATABASE ENTRY DATE: 2003-02-01
MWKASAGHAVSIAQDDAGADDWETDPDFVNDVSEKEQRWGAKTVQGSGHQEHINIHKLRENVFQEHQTLKEKELETGPKASHGYGGKFGVEQDRMDKSAVGHEYQSKLSKHCSQVDSVRGFGGKFGVQMDRVDQSAVGFEYQGKTEKHASQKDYSSGFGGKYGVQADRVDKSAVGFDYQGKTEKHESQRDYSKGFGGKYGIDKDKVDKSAVGFEYQGKTEKHESQKDYVKGFGGKFGVQTDRQDKCALGWDHQEKLQLHESQKDYSKGFGGKYGVQKDRMDKNASTFEDVTQVSSAYQKTVPVEAVTSKTSNIRANFENLAKEKEQEDRRKAEAERAQRMAKERQEQEEARRKLEEQARAKTQTPPVSPAPQPTEERLPSSPVYEDAASFKAELSYRGPVSGTEPEPVYSMEAADYREASSQQGLAYATEAVYESAEAPGHYPAEDSTYDEYENDLGITAVALYDYQAAGDDEISFDPDDIITNIEMIDDGWWRGVCKGRYGLFPANYVELRQ

SEQ ID NO: 902 - DNA, 422 bp, Rattus norvegicus
  ref <308>: DATABASE ACCESSION NUMBER: EMBL / AF055292
  ref <309>: DATABASE ENTRY DATE: 1998-04-08
actctgaacctcaagtttatggctgaggtggggaccagccggggactgctaccagaacacttcctgttcctggcccagaagatcttcaatgacaacagccttagcatagaggcctttcagcaccgctgtgtgtcttggtcacagttcaacaaggagattctactgggccgaggcttcactttttggcagtggtttgatggtgtcctggacctcactaaacgctgtcttcggagctactggtcagatcggctgatcatcggctttatcagtaagcaatatgtcactagccttctcctcaacgagccagatggaaccttcctcctccgctttagcgactctgagattgggggcatcaccattgcccatgtcatccggggtcaggatggctcctcacagatagagaacatccagccgttttctgc

SEQ ID NO: 903 - protein, 141 aa, Rattus norvegicus
  ref <308>: DATABASE ACCESSION NUMBER: SWISS-Prot / AAC12759
  ref <309>: DATABASE ENTRY DATE: 2002-06-01
TLNLKFMAEVGTSRGLLPEHFLFLAQKIFNDNSLSIEAFQHRCVSWSQFNKEILLGRGFTFWQWFDGVLDLTKRCLRSYWSDRLIIGFISKQYVTSLLLNEPDGTFLLRFSDSEIGGITIAHVIRGQDGSSQIENIQPFSA

SEQ ID NO: 904 - DNA, 2225 bp, Rattus norvegicus
  ref <308>: DATABASE ACCESSION NUMBER: EMBL / AF058787
  ref <309>: DATABASE ENTRY DATE: 1998-04-23
tttcagggatttttgcgattcctctctgtagacttctacttgttctctaagggagttcttcatgtctttcttgaagtcatccagcatcatgatcaaatatgattttgaaactagatcttgcttttctggtgtgtttggatattccatgtttgttttggtgggagaattgggctccgatgatggcatgtagtcttggtttctgttgcttggtttcctgcgcttgcctctcgccatcagattatctctagtgttactttgttctgctatttctgacagtggctagactgtcctataagcctgtgtgtcaggagtgctgtagaccttttttcctctctttcagtcagttatgggacagagtgttctgcttttgggcgtgtagtttttcctctctacaggtcttcagctgttcctgtgggcctgtgtcttgagttcaccaggcagctttcttgcagcagaaaatttggtcatacctgtgatcctgaggctcaagttcgctcgtggggtgctgtccaggggctctctgcagcgggcacaaccaggaagacctgtgcggccccttccggagcttcagtgcaccagggttccagatggcctttggcgttttcctctggcgtccgagatgtatgtacagagagcagtctcttctggtttcccaggcttgtctgcctctctgaaggttcagctctccctcccacgggatttgggtgcagagaactgtttatccggtctgtttctttcaggttccggtggtgtctcaggcaggtgtcgttcctgcgccctcccccatgggaccagaggccttatacagtttcctcttgggccagggatgtgggcaggggtgagcagtgttggtggtctcttccgtctgcagcctcaggagtgccacctgaccaggcggttgggtctctctctgagaatttcatttttaaatcattcattaaaatgtcatgacttgatgtcctgctgtccgtctcacgccctcagctgtaacagtgccgagggagtcactgaagaagagactgaatgaccagagtatgggcagcacagacaactcaacaaaaatgtcttcagaggtggagactgcggaggccgtagatgagtcagagaagaactctatggcatcagagaaggaaaaccattccaaaatagcagacttttctgatcttctgaaggaagggacaaaggaagcagatgaccgggcagaaaatacccagtttgtcaaagacttcttgaaaggaaacattaagaaggagctatttaagctggccaccactgcactttcatactcagcccctgaggaggaaatggattcactgaccaaggacatggagtacttctttggtgaaaactgggaggaaaaagtgaagtgctctgaagctgcccagacgtatgtggatcagattcactatgtagggcaaaatgagccagagcatctggtggcccatacttactctacttacatggggggaaacctttcaggggaccaggtactgaagaaggagacccagccggtccccttcactagggaagggactcagttctacctgtttgagcatgtagacaatgctaagcaattcaagctattctactgcgctagattgaatgccttggacctgaatttgaagaccaaagagaggattgtggaggaagccaccaaagcctttgaatataatatgcagatattcagtgaactggaccaggcaggctccataccagtaagagaaaccctaaagaatgggctctcaatacttgatgggaagggaggtgtatgcaaatgtccctttaatgctgctcagccagacaaaggtaccctgggaggcagcaactgccctttccagatgtccatggccttgctgaggaagcctaacttgcagctcattctagttgccagtatggccttggtagctggacttttagcctggtactacatgtgaagggcctgtcaagttgtttgcatcctatctcaacatcctaccacttgttccttccccacctccacctctgcctagaactaccacctcaggtgacatttttaatgttgggtttgagaaaatgagcaaccaataaaagacagaccctagaaaaaagtcatgacttaagtggcacggggacacctaaagtcacactttgtgcttcagacatactttctttctctatttcaacactgaattcgggaagtaacctactactattaataataaatgctacacaatgcataataaaaa

SEQ ID NO: 905 - protein, 290 aa, Rattus norvegicus
  ref <308>: DATABASE ACCESSION NUMBER: SWISS-Prot / O70453
  ref <309>: DATABASE ENTRY DATE: 2000-05-30
MSSEVETAEAVDESEKNSMASEKENHSKIADFSDLLKEGTKEADDRAENTQFVKDFLKGNIKKELFKLATTALSYSAPEEEMDSLTKDMEYFFGENWEEKVKCSEAAQTYVDQIHYVGQNEPEHLVAHTYSTYMGGNLSGDQVLKKETQPVPFTREGTQFYLFEHVDNAKQFKLFYCARLNALDLNLKTKERIVEEATKAFEYNMQIFSELDQAGSIPVRETLKNGLSILDGKGGVCKCPFNAAQPDKGTLGGSNCPFQMSMALLRKPNLQLILVASMALVAGLLAWYYM

SEQ ID NO: 906 - DNA, 977 bp, Homo sapiens
  ref <308>: DATABASE ACCESSION NUMBER: EMBL / D21243
  ref <309>: DATABASE ENTRY DATE: 1999-01-21
atgtcagcggaagtggaaacctcagagggggtagacgagtcagaaaaaaagaactctggggccctagaaaaggagaaccaaatgagaatggctgacctctcggagctcctgaaggaagggaccaaggaagcacacgaccgggcagaaaacacccagtttgtcaaggacttcttgaaaggcaacattaagaaggagctgtttaagctggccaccacggcactttacttcacatactcagccctcgaggaggaaatggagcgcaacaaggaccatccagcctttgcccctttgtacttccccatggagctgcaccggaaggaggcgctgaccaaggacatggagtatttctttggtgaaaactgggaggagcaggtgcagtgccccaaggctgcccagaagtacgtggagcggatccactacatagggcagaacgagccggagctactggtggcccatgcatacacccgctacatgggggatctctcggggggccaggtgctgaagaaggtggcccagcgagcactgaaactccccagcacaggggaagggacccagttctacctgtttgagaatgtggacaatgcccagcagttcaagcagctctaccgggccaggatgaacgccctggacctgaacatgaagaccaaagagaggatcgtggaggaggccaacaaggcttttgagtataacatgcagatattcaatgaactggaccaggccggctccacactggccagagagaccttggaggatgggttccctgtacacgatgggaaaggagacatgcgtaaatgccctttctacgctgctgaacaagacaaaggtgccctggagggcagcagctgtcccttccgaacagctatggctgtgctgaggaagcccagcctccagttcatcctggccgctggtgtggccctagctgctggactcttggcctggtactacatgtgaagcacccatcatgccacaccggtacc

SEQ ID NO: 907 - protein, 316 aa, Homo sapiens
  ref <308>: DATABASE ACCESSION NUMBER: SWISS-Prot / P30519
  ref <309>: DATABASE ENTRY DATE: 2002-06-15
MSAEVETSEGVDESEKKNSGALEKENQMRMADLSELLKEGTKEAHDRAENTQFVKDFLKGNIKKELFKLATTALYFTYSALEEEMERNKDHPAFAPLYFPMELHRKEALTKDMEYFFGENWEEQVQCPKAAQKYVERIHYIGQNEPELLVAHAYTRYMGDLSGGQVLKKVAQRALKLPSTGEGTQFYLFENVDNAQQFKQLYRARMNALDLNMKTKERIVEEANKAFEYNMQIFNELDQAGSTLARETLEDGFPVHDGKGDMRKCPFYAAEQDKGALEGSSCPFRTAMAVLRKPSLQFILAAGVALAAGLLAWYYM

SEQ ID NO: 908 - DNA, 5905 bp, Rattus norvegicus
  ref <308>: DATABASE ACCESSION NUMBER: EMBL / AF059030
  ref <309>: DATABASE ENTRY DATE: 2001-07-17
tctggagccatacggtgccctgatcctctgtaccaggaagacagggtgaagatggaggagaggtactacccggtgatcttcccggacgagcggaatttccgccccttcacttccgactctctggctgccatagagaagcggattgctatccaaaaggagaggaagaagtccaaagacaaggcggcagctgagccccagcctcggcctcagcttgacctaaaggcctccaggaagttacctaagctttatggtgacattccccctgagcttgtagcgaagcctctggaagacctggacccattctacaaagaccataagacattcatggtgttgaacaagaagagaacaatttatcgcttcagcgccaagcgggccttgttcattctggggccttttaatcccctcagaagcttaatgattcgtatctctgtccattcagtctttagcatgttcatcatctgcacggtgatcatcaactgtatgttcatggcgaattctatggagagaagtttcgacaacgacattcccgaatacgtcttcattgggatttatattttagaagctgtgattaaaatattggcaagaggcttcattgtggatgagttttccttcctccgagatccgtggaactggctggacttcattgtcattggaacagcgatcgcaacttgttttccgggcagccaagtcaatctttcagctcttcgtaccttccgagtgttcagagctctgaaggcgatttcagttatctcaggtctgaaggtcatcgtaggtgccctgctgcgctcggtgaagaagctggtagacgtgatggtcctcactctcttctgcctcagcatctttgccctggtcggtcagcagctgttcatgggaattctgaaccagaagtgtattaagcacaactgtggccccaaccctgcatccaacaaggattgctttgaaaaggaaaaagatagcgaagacttcataatgtgtggtacctggctcggcagcagaccctgtcccaatggttctacgtgcgataaaaccacattgaacccagacaataattatacaaagtttgacaactttggctggtcctttctcgccatgttccgggttatgactcaagactcctgggagaggctttaccgacagatcctgcggacctctgggatctactttgtcttcttcttcgtggtggtcatcttcctgggctccttctacctgcttaacctaaccctggctgttgtcaccatggcttatgaagaacagaacagaaatgtagctgctgagacagaggccaaggagaaaatgtttcaggaagcccagcagctgttaagggaggagaaggaggctctggttgccatgggaattgacagaagttcccttaattcccttcaagcttcatccttttccccgaagaagaggaagtttttcggtagtaagacaagaaagtccttctttatgagagggtccaagacggcccaagcctcagcgtctgattcagaggacgatgcctctaaaaatccacagctccttgagcagaccaaacgactgtcccagaacttgccagtggatctctttgatgagcacgtggaccccctccacaggcagagagcgctgagcgctgtcagtatcttaaccatcaccatgcaggaacaagaaaaattccaggagccttgtttcccatgtgggaaaaatttggcctctaagtacctggtgtgggactgtagccctcagtggctgtgcataaagaaggtcctgcggaccatcatgacggatccctttactgagctggccatcaccatctgcatcatcatcaataccgttttcttagccgtggagcaccacaacatggatgacaacttaaagaccatactgaaaataggaaactgggttttcacgggaattttcatagcggaaatgtgtctcaagatcatcgcgctcgacccttaccactacttccggcacggctggaatgtttttgacagcatcgtggccctcctgagtctcgctgatgtgctctacaacacactgtctgataacaataggtctttcttggcttccctcagagtgctgagggtcttcaagttagccaaatcctggcccacgttaaacactctcattaagatcatcggccactccgtgggcgcgcttggaaacctgactgtggtcctgactatcgtggtcttcatcttttctgtggtgggcatgcggctcttcggcaccaagtttaacaagaccgcctacgccacccaggagcggcccaggcggcgctggcacatggataatttctaccactccttcctggtggtgttccgcatcctctgtggggaatggatcgagaacatgtggggctgcatgcaggatatggacggctccccgttgtgcatcattgtctttgtcctgataatggtgatcgggaagcttgtggtgcttaacctcttcattgccttgctgctcaattccttcagcaatgaggagaaggatgggagcctggaaggagagaccaggaaaaccaaagtgcagctagccctggatcggttccgccgggccttctccttcatgctgcacgctcttcagagtttttgttgcaagaaatgcaggaggaaaaactcgccaaagccaaaagagacaacagaaagctttgctggtgagaataaagactcaatcctcccggatgcgaggccctggaaggagtatgatacagacatggctttgtacactggacaggccggggctccgctggccccactcgcagaggtagaggacgatgtggaatattgtggtgaaggcggtgccctacccacctcacaacatagtgctggagttcaggccggtgacctccctccagagaccaagcagctcactagcccggatgaccaaggggttgaaatggaagtattttctgaagaagatctgcatttaagcatacagagtcctcgaaagaagtctgacgcagtgagcatgctctcggaatgcagcacaattgacctgaatgatatctttagaaatttacagaaaacagtttcccccaaaaagcagccagatagatgctttcccaagggccttagttgtcactttctatgccacaaaacagacaagagaaagtccccctgggtcctgtggtggaacattcggaaaacctgctaccaaatcgtgaagcacagctggtttgagagtttcataatctttgttattctgctgagcagtggagcgctgatatttgaagatgtcaatctccccagccggccccaagttgagaaattactaaggtgtaccgataatattttcacatttattttcctcctggaaatgatcctgaagtgggtggcctttggattccggaggtatttcaccagtgcctggtgctggcttgatttcctcattgtggtggtgtctgtgctcagtctcatgaatctaccaagcttgaagtccttccggactctgcgggccctgagacctctgcgggcgctgtcccagtttgaaggaatgaaggttgtcgtctacgccctgatcagcgccatacctgccattctcaatgtcttgctggtctgcctcattttctggctcgtattttgtatcttgggagtaaatttattttctgggaagtttggaaggtgcattaacgggacagacataaatatgtatttggattttaccgaagttccgaaccgaagccaatgtaacattagtaattactcgtggaaggtcccgcaggtcaactttgacaacgtggggaatgcctatctcgccctgctgcaagtggcaacctataagggctggctggaaatcatgaatgctgctgtcgattccagagagaaagacgagcagccggactttgaggcgaacctctacgcgtatctctactttgtggtttttatcatcttcggctccttctttaccctgaacctctttatcggtgttattattgacaacttcaatcagcagcagaaaaagttaggtggccaagacatttttatgacagaagaacagaagaaatattacaatgcaatgaaaaagttaggaaccaagaaacctcaaaagcccatcccaaggcccctgaacaaatgtcaagcctttgtgttcgacctggtcacaagccaggtctttgacgtcatcattctgggtcttattgtcttaaatatgattatcatgatggctgaatctgccgaccagcccaaagatgtgaagaaaacctttgatatcctcaacatagccttcgtggtcatctttaccatagagtgtctcatcaaagtctttgctttgaggcaacactacttcaccaatggctggaacttatttgattgtgtggtcgtggttctttctatcattagtaccctggtttcccgcttggaggacagtgacatttctttcccgcccacgctcttcagagtcgtccgcttggctcggattggtcgaatcctcaggctggtccgggctgcccggggaatcaggaccctcctctttgctttgatgatgtctctcccctctctcttcaacatcggtctgctgctcttcctggtgatgttcatttacgccatctttgggatgagctggttttccaaagtgaagaagggctccgggatcgacgacatcttcaacttcgagacctttacgggcagcatgctgtgcctcttccagataaccacttcggctggctgggataccctcctcaaccccatgctggaggcaaaagaacactgcaactcctcctcccaagacagctgtcagcagccgcagatagccgtcgtctacttcgtcagttacatcatcatctccttcctcatcgtggtcaacatgtacatcgctgtgatcctcgagaacttcaacacagccacggaggagagcgaggaccctctgggagaggacgactttgaaatcttctatgaggtctgggagaagtttgaccccgaggcgtcgcagttcatccagtattcggccctctctgactttgcggacgccctgccggagccgttgcgtgtggccaagccgaataagtttcagtttctagtgatggacttgcccatggtgatgggcgaccgcctccattgcatggatgttctctttgctttcactaccagggtcctcggggactccagcggcttggataccatgaaaaccatgatggaggagaagtttatggaggccaacccttttaagaagctctacgagcccatagtcaccaccaccaagaggaaggaggaggagcaaggcgccgccgtcatccagagggcctaccggaaacacatggagaagatggtcaaactgaggctgaaggacaggtcaagttcatcgcaccaggtgttttgcaatggagacttgtccagcttggatgtggccaaggtcaaggttcacaatgactgaaccctcatctccacccctacctcactgcctcacagcttagcctccagcctctggcgagcaggcggcagactcactgaacacaggccgttcgatctgtgtttttggctgaacgaggtgacaggttggcgtccatttttaaatgactcttggaaagatttcatgtagagagatgttagaagggactgcaaaggacaccgaccataacggaaggcctggaggacagtccaacttacataaagatgagaaacaagaaggaaagatcccaggaaaacttcagattgtgttctcagtacattccccaatgtgtctgttcggtgttttgagtatgtgacctgccacatgtagctcttttttgcatgtacgtcaaaaccctgcagtaagttaatagcttgctacgggtgttcctaccagcatcacagaattgggtgtatgactcaaacctaaaagcatgactctgacttgtcagtcagcaccccgactttcagacgctccaatctctgtcccaggtgtctaacgaataaataggtaaaagaaaaaaaaaaaaaaaaaaaaaaaa

SEQ ID NO: 909 - protein, 1765 aa, Rattus norvegicus
  ref <308>: DATABASE ACCESSION NUMBER: SWISS-Prot / AAC40199
  ref <309>: DATABASE ENTRY DATE: 2003-02-01
MEERYYPVIFPDERNFRPFTSDSLAAIEKRIAIQKERKKSKDKAAAEPQPRPQLDLKASRKLPKLYGDIPPELVAKPLEDLDPFYKDHKTFMVLNKKRTIYRFSAKRALFILGPFNPLRSLMIRISVHSVFSMFIICTVIINCMFMANSMERSFDNDIPEYVFIGIYILEAVIKILARGFIVDEFSFLRDPWNWLDFIVIGTAIATCFPGSQVNLSALRTFRVFRALKAISVISGLKVIVGALLRSVKKLVDVMVLTLFCLSIFALVGQQLFMGILNQKCIKHNCGPNPASNKDCFEKEKDSEDFIMCGTWLGSRPCPNGSTCDKTTLNPDNNYTKFDNFGWSFLAMFRVMTQDSWERLYRQILRTSGIYFVFFFVVVIFLGSFYLLNLTLAVVTMAYEEQNRNVAAETEAKEKMFQEAQQLLREEKEALVAMGIDRSSLNSLQASSFSPKKRKFFGSKTRKSFFMRGSKTAQASASDSEDDASKNPQLLEQTKRLSQNLPVDLFDEHVDPLHRQRALSAVSILTITMQEQEKFQEPCFPCGKNLASKYLVWDCSPQWLCIKKVLRTIMTDPFTELAITICIIINTVFLAVEHHNMDDNLKTILKIGNWVFTGIFIAEMCLKIIALDPYHYFRHGWNVFDSIVALLSLADVLYNTLSDNNRSFLASLRVLRVFKLAKSWPTLNTLIKIIGHSVGALGNLTVVLTIVVFIFSVVGMRLFGTKFNKTAYATQERPRRRWHMDNFYHSFLVVFRILCGEWIENMWGCMQDMDGSPLCIIVFVLIMVIGKLVVLNLFIALLLNSFSNEEKDGSLEGETRKTKVQLALDRFRRAFSFMLHALQSFCCKKCRRKNSPKPKETTESFAGENKDSILPDARPWKEYDTDMALYTGQAGAPLAPLAEVEDDVEYCGEGGALPTSQHSAGVQAGDLPPETKQLTSPDDQGVEMEVFSEEDLHLSIQSPRKKSDAVSMLSECSTIDLNDIFRNLQKTVSPKKQPDRCFPKGLSCHFLCHKTDKRKSPWVLWWNIRKTCYQIVKHSWFESFIIFVILLSSGALIFEDVNLPSRPQVEKLLRCTDNIFTFIFLLEMILKWVAFGFRRYFTSAWCWLDFLIVVVSVLSLMNLPSLKSFRTLRALRPLRALSQFEGMKVVVYALISAIPAILNVLLVCLIFWLVFCILGVNLFSGKFGRCINGTDINMYLDFTEVPNRSQCNISNYSWKVPQVNFDNVGNAYLALLQVATYKGWLEIMNAAVDSREKDEQPDFEANLYAYLYFVVFIIFGSFFTLNLFIGVIIDNFNQQQKKLGGQDIFMTEEQKKYYNAMKKLGTKKPQKPIPRPLNKCQAFVFDLVTSQVFDVIILGLIVLNMIIMMAESADQPKDVKKTFDILNIAFVVIFTIECLIKVFALRQHYFTNGWNLFDCVVVVLSIISTLVSRLEDSDISFPPTLFRVVRLARIGRILRLVRAARGIRTLLFALMMSLPSLFNIGLLLFLVMFIYAIFGMSWFSKVKKGSGIDDIFNFETFTGSMLCLFQITTSAGWDTLLNPMLEAKEHCNSSSQDSCQQPQIAVVYFVSYIIISFLIVVNMYIAVILENFNTATEESEDPLGEDDFEIFYEVWEKFDPEASQFIQYSALSDFADALPEPLRVAKPNKFQFLVMDLPMVMGDRLHCMDVLFAFTTRVLGDSSGLDTMKTMMEEKFMEANPFKKLYEPIVTTTKRKEEEQGAAVIQRAYRKHMEKMVKLRLKDRSSSSHQVFCNGDLSSLDVAKVKVHND

SEQ ID NO: 910 - DNA, 5728 bp, Homo sapiens
  misc_feature (1)..(5728): n=a, c, g or t
  ref <308>: DATABASE ACCESSION NUMBER: EMBL / AF150882
  ref <309>: DATABASE ENTRY DATE: 2000-01-16
tcctgctatacccacagtggtggtcatctcttctgatcttcacagccaatcagctcccaaggcccctgacctcagctcagcttttgtagatccttatgacaccatcctttaagactggaatcctagggcaggctgttttattcccgcctcctgaggcctttctgaggatctgtggcttgtctctgtcctgagggtgaagatggatgacagatgctacccagtaatctttccagatgagcggaatttccgccccttcacttccgactctctggctgcaattgagaagcggattgccatccaaaaggagaaaaagaagtctaaagaccagacaggagaagtaccccagcctcggcctcagcttgacctaaaggcctccaggaagttgcccaagctctatggcgacattcctcgtgagctcataggaaagcctctggaagacttggacccattctaccgaaatcataagacatttatggtgttaaacagaaagaggacaatctaccgcttcagtgccaagcatgccttgttcatttttgggcctttcaattcaatcagaagtttagccattagagtctcagtccattcattgttcagcatgttcattatcggcaccgttatcatcaactgcgtgttcatggctacagggcctgctaaaaacagcaacagtaacaatactgacattgcagagtgtgtcttcactgggatttatatttttgaagctttgattaaaatattggcaagaggtttcattctggatgagttttctttccttcgagatccatggaactggctggactccattgtcattggaatagcgattgtgtcatatattccaggaatcaccatcaaactattgcccctgcgtaccttccgtgtgttcagagctttgaaagcaatttcagtagtttcacgtctgaaggtcatcgtgggggccttgctacgctctgtgaagaagctggtcaacgtgattatcctcaccttcttttgcctcagcatctttgccctggtaggtcagcagctcttcatgggaagtctgaacctgaaatgcatctcgagggactgtaaaaatatcagtaacccggaagcttatgaccattgctttgaaaagaaagaaaattcacctgaattcaaaatgtgtggcatctggatgggtaacagtgcctgttccatacaatatgaatgtaagcacaccaaaattaatcctgactataattatacgaattttgacaactttggctggtcttttcttgccatgttccggctgatgacccaagattcctgggagaagctttatcaacagaccctgcgtactactgggctctactcagtcttcttcttcattgtggtcattttcctgggctccttctacctgattaacttaaccctggctgttgttaccatggcatatgaggagcagaacaagaatgtagctgcagagatagaggccaaggaaaagatgtttcaggaagcccagcagctgttaaaggaggaaaaggaggctctggttgccatgggaattgacagaagttcacttacttcccttgaaacatcatattttaccccaaaaaagagaaagctctttggtaataagaaaaggaagtccttctttttgagagagtctgggaaagaccagcctcctgggtcagattctgatgaagattgccaaaaaaagccacagctcctagagcaaaccaaacgactgtcccagaatctatcactggaccactttgatgagcatggagatcctctccaaaggcagagagcactgagtgccgtcagcatcctcaccatcaccatgaaggaacaagaaaaatcacaagagccttgtctcccttgcggagaaaacctggcatccaagtacctcgtgtggaactgttgcccccagtggctgtgcgttaagaaggtcctgagaactgtgatgactgacccgtttactgagctggccatcaccatctgcatcatcatcaacactgtcttcttggccatggagcatcacaagatggaggccagttttgagaagatgttgaatatagggaatttggttttcactagcatttttatagcagaaatgtgcctaaaaatcattgcgctcgatccctaccactactttcgccgaggctggaacatttttgacagcattgttgctcttctgagttttgcagatgtaatgaactgtgtacttcaaaagagaagctggccattcttgcgttccttcagggtgctcagggtcttcaagttagccaaatcctggccaactttgaacacactaattaagataatcggcaactctgtcggagcccttggaaacctgactgtggtcctggtcattgtgatctttattttctcagtagttggcatgcagctttttggccgtagcttcaattcccaaaagagtccaaaactctgtaacccgacaggcccgacagtctcatgtttacggcactggcacatgggggatttctggcactccttcctagtggtattccgcatcctctgcggggaatggatcgaaaatatgtgggaatgtatgcaagaagcgaatgcatcatcatcattgtgtgttattgtcttcatattgatcacggtgataggaaaacttgtggtgctcaacctcttcattgccttactgctcaattcctttagcaatgaggaaagaaatggaaacttagaaggagaggccaggaaaactaaagtccagttagcactggatcgattccgccgggctttttgttttgtgagacacactcttgagcatttctgtcacaagtggtgcaggaagcaaaacttaccacagcaaaaagaggtggcaggaggctgtgctgcacaaagcaaagacatcattcccctggtcatggagatgaaaaggggctcagagacccaggaggagcttggtatactaacctctgtaccaaagaccctgggcgtcaggcatgattggacttggttggcaccacttgcggaggaggaagatgacgttgaattttctggtgaagataatgcacagcgcatcacacaacctgagcctgaacaacaggcctatgagctccatcaggagaacaagaagcccacgagccagagagttcaaagtgtggaaattgacatgttctctgaagatgagcctcatctgaccatacaggatccccgaaagaagtctgatgttaccagtatactatcagaatgtagcaccattgatcttcaggatggctttggatggttacctgagatggttcccaaaaagcaaccagagagatgtttgcccaaaggctttggttgctgctttccatgctgtagcgtggacaagagaaagcctccctgggtcatttggtggaacctgcggaaaacctgctaccaaatagtgaaacacagctggtttgagagctttattatctttgtgattctgctgagcagtggggcactgatatttgaagatgttcaccttgagaaccaacccaaaatccaagaattactaaattgtactgacattatttttacacatatttttatcctggagatggtactaaaatgggtagccttcggatttggaaagtatttcaccagtgcctggtgctgccttgatttcatcattgtgattgtctctgtgaccaccctcattaacttaatggaattgaagtccttccggactctacgagcactgaggcctcttcgtgcgctgtcccagtttgaaggaatgaaggtggtggtcaatgctctcataggtgccatacctgccattctgaatgttttgcttgtctgcctcattttctggctcgtattttgtattctgggagtatacttcttttctggaaaatttgggaaatgcattaatggaacagactcagttataaattataccatcattacaaataaaagtcaatgtgaaagtggcaatttctcttggatcaaccagaaagtcaactttgacaatgtgggaaatgcttacctcgctctgctgcaagtggcaacatttaagggctggatggatattatatatgcagctgttgattccacagagaaagaacaacagccagagtttgagagcaattcactcggttacatttacttcgtagtctttatcatctttggctcattcttcactctgaatctcttcattggcgttatcattgacaacttcaaccaacagcagaaaaagttaggtggccaagacatttttatgacagaagaacagaagaaatactataatgcaatgaaaaaattaggatccaaaaaacctcaaaaacccattccacggcctctgaacaaatgtcaaggtctcgtgttcgacatagtcacaagccagatctttgacatcatcatcataagtctcattatcctaaacatgattagcatgatggctgaatcatacaaccaacccaaagccatgaaatccatccttgaccatctcaactgggtctttgtggtcatctttacgttagaatgtctcatcaaaatctttgctttgaggcaatactacttcaccaatggctggaatttatttgactgtgtggtcgtgcttctttccattgttagtaagtaaaatcagcagtcagagggactttaagaaccagaagtaagtttgtaaatcttatcattttttgaagtttgttcaaactatccacaaagcagaaaactgggccaagtgtactttctgaaagaatagacaggggtactaatgccattctctactgggaagttgctaggagatagagagtaatttctgttcccttaactcactacacaactgaaatagagttcaataatcatgcagctaatgtattcaatggaaatagacaaaattaaaatgactcagaagtttttgtggtggtaacctgatttattcagataattgagtcaaagttctacctttcctgcgcaactataagctctatgagcattttttagttttaaggatttactgcccatgttttttcctttgttcaaaatccacatgggtgccagatcacaattattgtgcccctgtggcactgctgtgccccctttcaacccctatacaaggccccatggcccactctagattgggctttcaagagtatatcattcagacaatcaaagctttttttctattctatatcccatgttaacttaaaccacagtgtgaactgtgcttgtctcagattctttgaccccgcttaccaaccagcctcattctctaatcagtatatttttcctaatcacacgcagggttaactaaaaggcttataaaagaatacaaaagaaaggaggttattaccatactccttcgttataaaacacacatacacacatcaactttaaaattaaattcttcatggctaagccataagtgcttactctgggtttttgaagtctggttttaattaaactgttaacttgacattttataattatgtaaaactgtccaggagcccttctcatagttcaaaacacaatgaagacaaagaaaactgattttccaaatggaagcttttttgcgatctcagaaagaatgcatcaaacagatatattggatcaagatattttggttcctaatgctactgcagcattgcagatgtttcagagaacaacaacaaatatgctacagttcatagtgtgttctggtttctaagctatgatgttaatgtagataaagcttatnaatagattcttccatgagtttacagttaagtagacctttaatttttattattcaattccaatcacaagtcttggtgaaattgacagcaggaaaaaa

SEQ ID NO: 911 - protein, 2016 aa, Homo sapiens
  ref <308>: DATABASE ACCESSION NUMBER: Refseq / NP_000326
  ref <309>: DATABASE ENTRY DATE: 2001-01-11
MANFLLPRGTSSFRRFTRESLAAIEKRMAEKQARGSTTLQESREGLPEEEAPRPQLDLQASKKLPDLYGNPPQELIGEPLEDLDPFYSTQKTFIVLNKGKTIFRFSATNALYVLSPFHPVRRAAVKILVHSLFNMLIMCTILTNCVFMAQHDPPPWTKYVEYTFTAIYTFESLVKILARAFCLHAFTFLRDPWNWLDFSVIIMAYTTEFVDLGNVSALRTFRVLRALKTISVISGLKTIVGALIQSVKKLADVMVLTVFCLSVFALIGLQLFMGNLRHKCVRNFTALNGTNGSVEADGLVWESLDLYLSDPENYLLKNGTSDVLLCGNSSDAGTCPEGYRCLKAGENPDHGYTSFDSFAWAFLALFRLMTQDCWERLYQQTLRSAGKIYMIFFMLVIFLGSFYLVNLILAVVAMAYEEQNQATIAETEEKEKRFQEAMEMLKKEHEALTIRGVDTVSRSSLEMSPLAPVNSHERRSKRRKRMSSGTEECGEDRLPKSDSEDGPRAMNHLSLTRGLSRTSMKPRSSRGSIFTFRRRDLGSEADFADDENSTARESESHHTSLLVPWPLRRTSAQGQPSPGTSAPGHALHGKKNSTVDCNGVVSLLGAGDPEATSPGSHLLRPVMLEHPPDTTTPSEEPGGPQMLTSQAPCVDGFEEPGARQRALSAVSVLTSALEELEESRHKCPPCWNRLAQRYLIWECCPLWMSIKQGVKLVVMDPFTDLTITMCIVLNTLFMALEHYNMTSEFEEMLQVGNLVFTGIFTAEMTFKIIALDPYYYFQQGWNIFDSIIVILSLMELGLSRMSNLSVLRSFRLLRVFKLAKSWPTLNTLIKIIGNSVGALGNLTLVLAIIVFIFAVVGMQLFGKNYSELRDSDSGLLPRWHMMDFFHAFLIIFRILCGEWIETMWDCMEVSGQSLCLLVFLLVMVIGNLVVLNLFLALLLSSFSADNLTAPDEDREMNNLQLALARIQRGLRFVKRTTWDFCCGLLRHRPQKPAALAAQGQLPSCIATPYSPPPPETEKVPPTRKETQFEEGEQPGQGTPGDPEPVCVPIAVAESDTDDQEEDEENSLGTEEESSKQQESQPVSGWPRGPPDSRTWSQVSATASSEAEASASQADWRQQWKAEPQAPGCGETPEDSCSEGSTADMTNTAELLEQIPDLGQDVKDPEDCFTEGCVRRCPCCAVDTTQAPGKVWWRLRKTCYHIVEHSWFETFIIFMILLSSGALAFEDIYLEERKTIKVLLEYADKMFTYVFVLEMLLKWVAYGFKKYFTNAWCWLDFLIVDVSLVSLVANTLGFAEMGPIKSLRTLRALRPLRALSRFEGMRVVVNALVGAIPSIMNVLLVCLIFWLIFSIMGVNLFAGKFGRCINQTEGDLPLNYTIVNNKSQCESLNLTGELYWTKVKVNFDNVGAGYLALLQVATFKGWMDIMYAAVDSRGYEEQPQWEYNLYMYIYFVIFIIFGSFFTLNLFIGVIIDNFNQQKKKLGGQDIFMTEEQKKYYNAMKKLGSKKPQKPIPRPLNKYQGFIFDIVTKQAFDVTIMFLICLNMVTMMVETDDQSPEKINILAKINLLFVAIFTGECIVKLAALRHYYFTNSWNIFDFVVVILSIVGTVLSDIIQKYFFSPTLFRVIRLARIGRILRLIRGAKGIRTLLFALMMSLPALFNIGLLLFLVMFIYSIFGMANFAYVKWEAGIDDMFNFQTFANSMLCLFQITTSAGWDGLLSPILNTGPPYCDPTLPNSNGSRGDCGSPAVGILFFTTYIIISFLIVVNMYIAIILENFSVATEESTEPLSEDDFDMFYEIWEKFDPEATQFIEYSVLSDFADALSEPLRIAKPNQISLINMDLPMVSGDRIHCMDILFAFTKRVLGESGEMDALKIQMEEKFMAANPSKISYEPITTTLRRKHEEVSAMVIQRAFRRHLLQRSLKHASFLFRQQAGSGLSEEDAPEREGLIAYVMSENFSRPLGPPSSSSISSTSFPPSYDSVTRATSDNLQVRGSDYSHSEDLADFPPSPDRDRESIV

SEQ ID NO: 912 - DNA, 632 bp, Rattus norvegicus
  ref <308>: DATABASE ACCESSION NUMBER: EMBL / AF061242
  ref <309>: DATABASE ENTRY DATE: 2000-03-03
gcagcaactgagaaacttgcgagactttctgttggtctacaatcggatgacagaactgtgcttccagcgctgtgtgcccagcctgcaccaccgagctctggacgctgaggaggaggcctgcctgcacagctgtgctgggaagctcatccattctaaccaccgcctcatggccgcttacgtgcacctcatgcccgccctggtccagcgccgcatggcggactacgaggctgcctctgccgtgccaggtgttcctgcagaacagcccagagactcgccatcaggcagctagctagctgtccctgaccgcaggagagaaggtggttttgctgtgggcacattggtcttcaatacgatcctcctgtctcagcctcccaggtactggaattacagacatgggctacaactggttgctagataattctttaggaatataaaaattgctgaccagaagcttccctacagagtgacctgtgtacatgattaatttcactccttgacaagtacaaacgtgagtagagcagcttgtgaacttaattccccaaaccaggaaggtggagacccaggatattgtgtgactgctgaagagctctaatcagcatctgtatgtatcccttcaataaacatgtgctgtg

SEQ ID NO: 913 - protein, 100 aa, Rattus norvegicus
  ref <308>: DATABASE ACCESSION NUMBER: SWISS-Prot / Q9R1B1
  ref <309>: DATABASE ENTRY DATE: 2001-10-16
MEHQQQQLRNLRDFLLVYNRMTELCFQRCVPSLHHRALDAEEEACLHSCAGKLIHSNHRLMAAYVHLMPALVQRRMADYEAASAVPGVPAEQPRDSPSGS

SEQ ID NO: 914 - DNA, 421 bp, Homo sapiens
  ref <308>: DATABASE ACCESSION NUMBER: EMBL / AI005112
  ref <309>: DATABASE ENTRY DATE: 2000-03-03
tgtttaaagtctttattgctaatttcacaaaggcaggaagtactaagagagtaaattggggaaatggtcaacattcctgaattcttagaggcttgtctttgttctgttgtcactgacctcctaggaagcagtggctaaagcctaagggggtagagttttcttcctgcttttgttgtttggttttaccttcttcccctaggttcacagcaattctttttgacagcttctctccaggggccagggacggctagctgcctgatggcgagtctctggtctgttctgcaggaatacctggcgcggccgaggcagcctcgtagtccgcgatgcggcgctggaccagggcgggcatgaggtgcacgtaagcggccatgaggcggtggttagaatggatgagtttcccagcacagctgtgcaggcaggc

SEQ ID NO: 915 - protein, 103 aa, Homo sapiens
  ref <308>: DATABASE ACCESSION NUMBER: SWISS-Prot / Q9Y5J6
  ref <309>: DATABASE ENTRY DATE: 2001-10-16
MERQQQQQQQLRNLRDFLLVYNRMTELCFQRCVPSLHHRALDAEEEACLHSCAGKLIHSNHRLMAAYVQLMPALVQRRIADYEAASAVPGVAAEQPGVSPSGS

SEQ ID NO: 916 - DNA, 4069 bp, Rattus norvegicus
  ref <308>: DATABASE ACCESSION NUMBER: EMBL / AF061266
  ref <309>: DATABASE ENTRY DATE: 1998-10-27
ggcttccatcctaatacgactcactatagggctcgagcggccgcccgggcaggtctgcccccgtcctgggccgcgatgatggcggccctgtacccgagcacggacctctctggcgtctcctcctcctccctgccttcctccccatcctcctcatcgcccaacgaagtgatggcgctgaaggatgtgcgagaggtgaaggaggagaacaccttgaatgagaagcttttcttgctggcgtgcgacaagggtgactattatatggttaaaaagattttggaggaaaacagttcaggtgacttgaacataaattgcgtagatgtgcttgggagaaatgctgttaccataactattgaaaacgaaagcttggatatactgcagctgcttttggactacggttgtcagaaacttatggaacgaattcagaatccggaatactcaacaacaatggatgttgcaccagttattttagctgctcatcgtaacaactatgagatcctcacaatgcttctgaagcaggacgtggctttgcccaagccccatgctgttggctgtgaatgcacgctgtgttctgcgaaaaacaaaaaggacagcctcagacattccaggtttcgtcttgatatctatagatgtctggccagtccagctctaataatgttaacagaggaggatccaattctgagagcgtttgaacttagtgctgacttaaaggaactcagccttgtggaggtggaattctggaatgactatgaagagctagcccgtcagtgcaaaatgtttgctaaagatttgcttgcgcaagctcggaattctcgtgaactggaagttatcctaaaccatacatctagtgatgagcctcttgacaaacgaggactactagaagaaagaatgaatttaagtcgtctgaaacttgctatcaaatataaccagaaggagtttgtctcccagtcaaattgccagcagttcctgaacaccgtttggttcggacagatgtcaggttaccgccgtaagcccacctgtaagaagataatgactgttttgacagttggcattttctggccagttctgtcactgtgttacttgatagctcccaaatctcaattcggcagaatcattcacacaccgttcatgaagtttattattcatggagcttcatatttcacattcttgctgttactcaatctctactcacttgtctacaatgaggacaagaaaaatacaatggggccagcccttgagagaatagactaccttctcatactgtggattattgggatgatttggtcagacattaagaggctgtggtatgaagggttggaagacttcttagaagaatctcgtaaccagctcagctttgttatgaattccctttacttggcaacttttgccctcaaagtggtggctcacaacaagtttcatgattttgccgaccggaaggactgggatgcgttccaccccacactggtagcagaagggcttttcgcctttgcaaacgttctgagttaccttcggctcttctttatgtacacaaccagctctattttgggcccactgcagatttcaatgggacagatgttacaagattttgggaaatttctaggaatgttccttcttgttctgttttccttcacgattggactgacacagctctatgacaaagggtacacttccaaagagcagaaggactgcgtaggcatcttctgtgaacagcaaagcaacgacaccttccactcgttcattggcacctgctttgctctgttctggtacatcttctccttagcgcatgtggccatctttgtcaccaggtttagctatggggaagaactgcagtccttcgttggggctgtgattgtcggaacttacaatgtcgtggttgtgatcgtgcttacaaagctactggtagcgatgcttcataagagcttccagctgatagcaaatcatgaggataaagaatggaagtttgctcgagcgaagctatggctcagctactttgatgacaaatgcacactgcccccacctttcaacatcattccttctccgaagactatctgctatatgatcagcagcctcagcaagtgggtgtgctcgcacacctccaaaggcaaggtcagacggcagaacagcttgaaggagtggagaaacttaaaacaaaagagagatgagaactaccagaaggtgatgtgctgcctagtgcatcgatacctgacctccatgcgacagaagatgcagagcacagaccaagccaccgtggagaatctcaatgaactgcgccaagatctgtcaaaattccgaaatgaaataagggatttgcttggctttcggacttctaaatatgctatgttttatcccaaaaattagccattttctaaatcttgtagaaataattttctttaataaatctgaaagactgtatttgcatacctttcaattaaatcaataagatatatatgggcataaacaattacacagaagccattctttaaatatttatagcataaacatatgttgtgtaaatatgtatatagagctagttttttaaaacctgtctgtgactttttgtagaagcaaaaccattttgttagcatgctactttgttttcttagttggtcagtgcttacattcgacgtgtgtaagaggggcagctctcagtgtacgcatggcccactccatttatacgcgaagatcagcaaacgcggctaccttaagacacacttgaagagctcatgctgttgaaatctcttgttttaggagttcacacagagttcagtatatattgtttaggagtttagcttcatctaaaataccctactttttcttttgttagaatcttaagcagcagagaaaagtttataataaatatttgaatttaacccagtcatggtgatgaatgcctttaatcccagcactcgggaggcagaggcaggcagatctctgagttcaaggtcagcctggtctacagagtgggttccaggatagccccggctacacagagaaaccctgtcttggaaaaataaaaaacaacaaaaaaaaatttaaattatttatttatgtctatctaaattcacgttggtatttgttgtgtagtatatttacttttacatggttataatttatatttttaattttgttttgacataacattattttatatatatttccctatattaaggtagtttatatgtttaaatatttatagacgtctgtgaattttgaaaaatagtagccatcttttacccatagaatacttgtttctatttataccctcgcagaggtacctcttaagcatttggctaagtttagcttttccttccaatttttcaagttggagtaaaactcatcgttacaaagtagaagctgcttatcttcatgtgcggtcacagtgggcttggccggagagcactgggccttgcttgcagaaggctgctttccgttcactccaaggctcttgagctcctcttccaaagtttctcccacagagcctaccacagcttctacaaaactggcctcgtgcttgcggcttgagatgtaaagcattgtttattcaatttgaaaataaaaagaatttgactgcttttcagtgttcatgtaaaggtggagctgaaggtttccccagctatggcacagacattcctgcagcacgtttggtgagaaattaccttcggaactgaacgtcagctggcattgaggccacagagtgcagacagccctggtctgtgagcgccgcccaccccggggcagctgaagatcccagtgtaggtttcatcttgctttttgcatttgtttttaatgtcccaggtttaagtgttccctcttttgggcaaattcttataaaaatgtttattgtaaaattatatattttgtctacaatgggattatgcgcttccaagttgatattttacatcaggatttttagtcattctaaaaaaaatacctaattattaaaaaatttatagagtacctatgtgtgcatgaattactgacgaggtatattttgaatgacagcatattgtaagaaaagagtgaataaaatttggcattagattataaaaaaaaaaaaaaaaaaaaaaaaaaa

SEQ ID NO: 917 - protein, 759 aa, Rattus norvegicus
  ref <308>: DATABASE ACCESSION NUMBER: SWISS-Prot / Q9QX01
  ref <309>: DATABASE ENTRY DATE: 2001-10-16
MMAALYPSTDLSGVSSSSLPSSPSSSSPNEVMALKDVREVKEENTLNEKLFLLACDKGDYYMVKKILEENSSGDLNINCVDVLGRNAVTITIENESLDILQLLLDYGCQKLMERIQNPEYSTTMDVAPVILAAHRNNYEILTMLLKQDVALPKPHAVGCECTLCSAKNKKDSLRHSRFRLDIYRCLASPALIMLTEEDPILRAFELSADLKELSLVEVEFWNDYEELARQCKMFAKDLLAQARNSRELEVILNHTSSDEPLDKRGLLEERMNLSRLKLAIKYNQKEFVSQSNCQQFLNTVWFGQMSGYRRKPTCKKIMTVLTVGIFWPVLSLCYLIAPKSQFGRIIHTPFMKFIIHGASYFTFLLLLNLYSLVYNEDKKNTMGPALERIDYLLILWIIGMIWSDIKRLWYEGLEDFLEESRNQLSFVMNSLYLATFALKVVAHNKFHDFADRKDWDAFHPTLVAEGLFAFANVLSYLRLFFMYTTSSILGPLQISMGQMLQDFGKFLGMFLLVLFSFTIGLTQLYDKGYTSKEQKDCVGIFCEQQSNDTFHSFIGTCFALFWYIFSLAHVAIFVTRFSYGEELQSFVGAVIVGTYNVVVVIVLTKLLVAMLHKSFQLIANHEDKEWKFARAKLWLSYFDDKCTLPPPFNIIPSPKTICYMISSLSKWVCSHTSKGKVRRQNSLKEWRNLKQKRDENYQKVMCCLVHRYLTSMRQKMQSTDQATVENLNELRQDLSKFRNEIRDLLGFRTSKYAMFYPKN

SEQ ID NO: 918 - DNA, 5554 bp, Homo sapiens
  misc_feature (1)..(5554): n=a, c, g or t
  ref <308>: DATABASE ACCESSION NUMBER: EMBL / Z73903
  ref <309>: DATABASE ENTRY DATE: 1996-07-01
gaattccgatctctcgtcctcttcctgggctaggccgccccaggcgcggcccctgcgactcctggcacggccccgtgctcggctgccgccctggcgcgcgccacactgtcgtccccggacgggcgcggaccggctcggccggggcgccggcggctggggaggggtcgctggccccggggccgcgcatgcgccgccaccaacttggggctgtcagtggagggcgagtgctggttctcaggggaggcgacgccttcgggccaacgggcctcgagccgaggcagcagtgggaacgactcatcctttttccagccctggggcgtggctggggtcggggtcggggtcggggccggtgggggccccgcccccgtctcctggcctgcccccttcatgggccgcgatgatggcggccctgtacccgagcacggacctctcgggcgcctcctcctcctccctgccttcctctccatcctcttcctcgccgaacgaggtgatggcgctgaaggatgtgcgggaggtgaaggaggagaatacgctgaatgagaagcttttcttgctggcgtgcgacaagggtgactattatatggttaaaaagattttggaggaaaacagttcaggtgacttgaacataaattgcgtagatgtgcttgggagaaatgctgttaccataactattgaaaacgaaaacttggatatactgcagcttcttttggactacggttgtcagaaactaatggaacgaattcagaatcctgagtattcaacaactatggatgttgcacctgtcattttagctgctcatcgtaacaactatgaaattcttacaatgctcttaaaacaggatgtatctctacccaagccccatgcagttggctgtgaatgcacattgtgttctgcaaaaaacaaaaaggatagcctccggcattccaggtttcgtcttgatatatatcgatgtttggccagtccagctctaataatgttaacagaggaggatccaattctgagagcatttgaacttagtgctgatttaaaagaactaagtcttgtggaggtggaattcaggaatgattatgaggaactagcccggcaatgtaaaatgtttgctaaggatttacttgcacaagcccggaattctcgtgaattggaagttattctaaaccatacgtctagtgacgagcctcttgacaaacggggattattagaagaaagaatgaatttaagtcgtctaaaacttgctatcaaatataaccagaaagagtttgtctcccagtctaactgccagcagttcctgaacactgtttggtttggacagatgtcgggttaccgacgcaagcccacctgtaagaagataatgactgttttgacagtaggcatcttttggccagttttgtcactttgttatttgatagctcccaaatctcagtttggcagaatcattcacacaccttttatgaaatttatcattcatggagcatcatatttcacatttctgctgttgcttaatctatactctcttgtttacaatgaggataagaaaaacacaatggggccagcccttgaaagaatagactatcttcttattctgtggattattgggatgatttggtcagacattaaaagactctggtatgaagggttggaagactttttagaagaatctcgtaatcaactcagttttgtcatgaattctctttatttggcaacctttgccctcaaagtggttgctcacaacaagtttcatgattttgctgatcggaaggattgggatgcattccatcctacactggtggcagaagggctttttgcatttgcaaatgttctaagttatcttcgtctcttttttatgtatacaaccagctctatcttgggtccattacagatttcaatgggacagatgttacaagattttggaaaatttcttgggatgtttcttcttgttttgttttctttcacaattggactgacacaactgtatgataaaggatatacttcaaaggagcagaaggactgtgtaggcatcttctgtgaacagcaaagcaatgataccttccattcgttcattggcacctgctttgctttgttctggtatattttctccttagcgcatgtggcaatctttgtcacaagatttagctatggagaagaactgcagtcctttgtgggagctgtcattgttggtacatacaatgtcgtggttgtgattgtgcttaccaaactgctggtggcaatgcttcataaaagctttcagttgatagcaaatcatgaagacaaagaatggaagtttgctcgagcaaaattatggcttagctactttgatgacaaatgtacgttacctccacctttcaacatcattccctcaccaaagactatctgctatatgattagtagcctcagtaagtggatttgctctcatacatcaaaaggcaaggtcaaacggcaaaacagtttaaaggaatggaggaatttgaaacagaagagagatgaaaactatcaaaaagtgatgtgctgcctagtgcatcgttacttgacttccatgagacagaagatgcaaagtacagatcaggcaactgtggaaaatctaaacgaactgcgccaagatctgtcaaaattccgaaatgaaataagggatttacttggctttcggacttctaaatatgctatgttttatccaagaaattaaccattttctaaatcatggagcgaataattttcaataacagatccaaaagactatattgcataacttgcaatgaaattaatgagatatatattgaaataaagaattatgtaaangccattctttaaaatatttatagcataaatatatgttatgtaaagtgtgtatatagaattagttttttaanccttctgttagtggctttttgcagaagcnaaacagattaagtagatagattttgttagcatgctgcttggttttcttacttagtgctttaaaatgtttttttttatgtttaagaggggcagttataaatggacacattgcccagaatnttttgtaanatgaagaccagcaaatgtaggctgatctccttcacaggatacacttgaaatatagaagttatgttttaaatatctctgttttaggagttcacatatagttcagcatttattgtttaggagtataattttattttatctaaaataatagtctattttttcttttgtattttgttataatcttaagcaacaaagaaaaaaccctaatatttgaatctatttatgtctttcaatttaaattcacttcagtttttgttattgtaatatatttacttttacatggttataatcactttatatttttaatgtttttttcacttaatattttatatatacatttccatgtattgatgtagttagtccacatttaaatttttatagaattatatagtttttgaaaaatacagtcagtagatgttttattttttagctattcagttatgtttataagtttgcatagctacttctcgacatttggtttgttttaatttttttgtatcataatagtcctatttttttttcaagttggagtgaatgtttttagttttaagatagataggagacacttttttatcacatgtagtcacaacctgttttgtttttgtaaaacataggaagtctctttaatgcaatgatttgttttatatttggactaaggttcttgagcttatctcccaaggtactttccataatttaacacagcttctataaaagtgacttcatgcttacttgtggatcattcttgctgcttaagatgaaaagcattggttttttaaaattagagaataaaatatgtatttaaatttttggtgtgttcacataaagngatgtagctaaaatgttttcataggctattatatatnctcgcagcatttccagttaagaggatattaggtatataattctcttcttaaccgaatgtcagatggtcttacgccacagggtgcaggtaacccttggcctgtaagcaccaccgatccagggatcattgtctaaataggttactattgtttgtttcatctggaattccgagggtgcacaaattaccagcagcctgagggaggtcttattggaaggcttcctgcaggaggtggcatctgatccgggcctagacatgggagttggaattttccagacagggaagggcactgtgggtggaaaacaaagcacgaacaaacgtatggtgtgggaccaagcctcacatggtgcataaatgatcagaggtgaggctgaagcctaggtgtgtgtcaggggaagagctagaaaggaaggtggggcagggaagctcagtgagtgtctgctacatgtgaggcttcattctgagcaccaactctgcgcgctaatgccacgaagtggagtcatgattcttccattttccaggtgaagaaaccaaagcacggggagaattagcttgtccaagggctcatggccagtcggtggtgccactgggatttaaccagggattccagctgtggaagctgcatgctgccagctgagcactccgtctgtccaccctggcaaatgacatgctgagggctgggggcagtcatctttccagcagttgtcgaccagaaataatgataatgcatcagccaggtgggcaagaactcagactttgtggtcagacctcgctgtggcagggagcttagaaaagtcacttttcctccacagctgtgtaacatggggaaagggggatgctcagctcacctctcatggcccttgtgtggggatttcaagggtaaatgctggaaaagcactgaatatacagcacttagtagaggctttgcaagcggctgtcctcacccaaacggatccttccccaggaaagctctgcaaatggagccacttggctttttgcctgatgccatattccgttgtttaaaacggcgatcccaaacttaagagtatgaaaggggtgttttgcagacaatgcataattaaccacttctaaacacagggtgtgccaggctccctcaaagctgttaattattcttcattagtgatcttaagttaatgtaaaataatcctggagctctgccagaggctcgggcaggggaaggagcagagccgcttatttcaactagcaaacggaaagaaatcttcacggggcgcctctgcgttctgccttggttgtggggagatgcctctatagactctttagctctgcccaaaggccattgtgggaggcggcaagccctctcccaagttcccagagcccagccgacctcagggtactttggttaatgaaatagttcaggtgggaagaaaatatggaggagagtagtatacccatcgcccagcttccaaaataagctgttaatggtgtggtggactgcccctgtgggccaccccacaaatcttatccctttcctgcttccccagagctaagcctaaacagtccctcttgtttggtgtgtagatttcccatgcacatttttttaaattgctgtaggtacatagtaagtgtatatatttatggggtacgtgagatgttttgacacaggcacgcaatgtgaaatacacacttcatggagaattc

SEQ ID NO: 919 - protein, 793 aa, Homo sapiens
  ref <308>: DATABASE ACCESSION NUMBER: SWISS-Prot / P48995
  ref <309>: DATABASE ENTRY DATE: 2001-10-16
MMAALYPSTDLSGASSSSLPSSPSSSSPNEVMALKDVREVKEENTLNEKLFLLACDKGDYYMVKKILEENSSGDLNINCVDVLGRNAVTITIENENLDILQLLLDYGCQSADALLVAIDSEVVGAVDILLNHRPKRSSRPTIVKLMERIQNPEYSTTMDVAPVILAAHRNNYEILTMLLKQDVSLPKPHAVGCECTLCSAKNKKDSLRHSRFRLDIYRCLASPALIMLTEEDPILRAFELSADLKELSLVEVEFRNDYEELARQCKMFAKDLLAQARNSRELEVILNHTSSDEPLDKRGLLEERMNLSRLKLAIKYNQKEFVSQSNCQQFLNTVWFGQMSGYRRKPTCKKIMTVLTVGIFWPVLSLCYLIAPKSQFGRIIHTPFMKFIIHGASYFTFLLLLNLYSLVYNEDKKNTMGPALERIDYLLILWIIGMIWSDIKRLWYEGLEDFLEESRNQLSFVMNSLYLATFALKVVAHNKFHDFADRKDWDAFHPTLVAEGLFAFANVLSYLRLFFMYTTSSILGPLQISMGQMLQDFGKFLGMFLLVLFSFTIGLTQLYDKGYTSKEQKDCVGIFCEQQSNDTFHSFIGTCFALFWYIFSLAHVAIFVTRFSYGEELQSFVGAVIVGTYNVVVVIVLTKLLVAMLHKSFQLIANHEDKEWKFARAKLWLSYFDDKCTLPPPFNIIPSPKTICYMISSLSKWICSHTSKGKVKRQNSLKEWRNLKQKRDENYQKVMCCLVHRYLTSMRQKMQSTDQATVENLNELRQDLSKFRNEIRDLLGFRTSKYAMFYPRN

SEQ ID NO: 920 - DNA, 3559 bp, Rattus norvegicus
  misc_feature (1)..(3559): n=a, c, g or t
  ref <308>: DATABASE ACCESSION NUMBER: EMBL / AF061443
  ref <309>: DATABASE ENTRY DATE: 1998-11-19
ccatctaagcntaaanactgcaaagcactcacatcgctcagcaatgccgggcccgctagggctgctctgcttcctcgccctggggctgctcggctcggccgggcccagcggcgcggcgccgcctctctgcgcggcgccctgcagctgcgacggcgaccgtcgggtggactgctccggaaaggggttgacggccgtaccggagggtctcagcgccttcacccaagcactggatatcagtatgaacaatatcacccagttaccagaagatgcatttaagagtttcccatttctagaggagctacaactggctggtaacgacctttctcttatccatccaaaagccttgtctgggctgaaagaactcaaagtcctaacactccagaataatcagttgagaacagtgcccagtgaagccattcacggactgagtgctttgcagtctttacgcttagatgccaaccatattacctcagtcccggaggacagttttgaagggcttgtccagttacgccatctgtggctggatgacaacagcttgacggaagtgcccgtgcgtcccctcagcaacctgccaaccctgcaggcgctgaccttggctctcaacaacatctcaagcatccctgacttcgctttcaccaacctttcaagcttggtggttctgcatctgcataacaataaaattaaaagcctcagtcaacactgttttgatggactagataacctggaaaccttggacttgaattacaattacttggatgagtttcctcaggctattaaagcccttcccagccttaaagagctgggatttcacagtaattctatttctgttattcctgatggagcatttggtggtaatccactgctaagaactattcatttgtatgataatcctctgtcttttgtggggaactcagcatttcacaacctgtctgatctgcattgcttagtcattcgtggtgcaagcctggtgcagtggttccccaatctgaccggaactgtccatttggagagtctaaccttgacagggacaaaaataagcagcatacctgatgatctgtgccaaaaccaaaagatgctgaggactctggacttatcttataacaatataagagaccttccaagttttaatggttgtcgtgcattggaagaaatttcattgcagcgtaatcaaatctccctaataaaggaaaatacttttcaaggcctaacatctctaaggattctagatctgagtagaaacctgatccgtgaaattcacagtggagcttttgcgaagcttgggacaattactaacctggatgtaagtttcaatgaattaacttcatttcctacggaaggcctaaatgggctcaatcaactaaagcttgtgggtaacttcaagctgaaagacgccttggcagccagagactttgctaatctcaggtctctatcagtaccatatgcttatcagtgttgtgcattttgggggtgtgactcttatgcaaatttaaacacagaagataacagcccccaagaacacagtgtgacaaaagagaaaggtgctacagatgcagcaaatgtcaccagcactgctgagaacgaagaacatagccaaataattatccactgtacaccttcaacaggtgctttcaagccctgtgaatatttactgggaagctggatgattcgccttacagtgtggttcattttcctggtcgccttgcttttcaacctgcttgtcattttaacagtgtttgcgtcttgttcatcactgcctgcctccaaactcttcataggcttgatttctgtgtctaacttactcatgggcatctatactggcatccttacttttcttgatgctgtgtcctggggccgatttgccgaatttggcatttggtgggaaactggcagcggctgcaaggtagccgggtctctggcagtcttctcctcagagagcgctgtattcctattaacactggcagctgtggaaagaagcgtatttgcaaaggatttgatgaaacacgggaagagcagtcacctcagacagttccaggtggccgccctcttagctttgctgggtgccgcagtggcaggctgcttcccccttttccacggagggcaatattctgcatcgcccttgtgtttgccgtttcctacaggagaaaccccatcgttaggattcactgtgaccttagtgctattaaactcactggcatttttactaatggccattatctacactaaactatactgcaacttagagaaggaggacctgtcggaaaactcccagtctagcgtgattaagcacgttgcctggctcatcttcacaaactgcatcttcttctgccctgttgcatttttctcatttgcaccattgatcacggcaatctccatcagccccgagataatgaagtctgttacactgatattcttcccgttgcctgcttgcctgaatccggtcctgtatgttttcttcaacccaaagtttaaagaagactggaagctactgaagcggcgtgttaccaggaaacacggatctgtttcagtttccatcagcagccaaggcggttgtggggaacaggatttctactatgactgtggcatgtattcccacttgcagggtaacctgactgtctgtgactgctgtgagtcatttcttttgacaaaaccagtatcatgcaaacacttaataaaatcgcacagttgtcctgtattgacagcggcctcttgccagaggccagaggcctactggtctgattgtggtacacagtcagcccattctgactatgcagatgaagaagattcctttgtctcagacagctctgaccaggtgcaggcctgtggacgagcctgcttctaccagagtcgtggattccctctggtgcgctatgcttacaatctacagagagtcagagactgaactccagtgtctgcctgcgactgtttttccccatcaaccaaatcacagtgctggcatgggagctatctgtctttagacctttcatctggaaagcacttgtagaatcacttcctggtgtcatgcagaagaggaggaaggtggcagtttatttctcagatcagacatctgtgaagaatgggtgcctaaactataaattgttgaaaaaaaattgtgatgccccagtaatgtgtgctctattctaaataaatgcaacttgaaaatggtttgatgtatggcatagcaatataaaattagggttttattttttttctttctgatccatcaggtgcaaagttcaaactatttctgaattaagcacaaaataaaggacagctgttaatatattttaaatgaaaatgngaaattgtaaaactaagaaaatgccttgctaatttcacctaatgattcatcattaatctcaggntgactgacttcagggccacaaaagagactgtctcccagctagagttatgnagagttcaaacaggcatccccttcatgtgttttctgtgtccataaattaaaggttctgttcaaatganttgtaaatctaaaacctgaagatgttttaaggactattgacagctgttagattttgggtaccgagctcgaattcgtaat

SEQ ID NO: 921 - protein, 951 aa, Rattus norvegicus
  ref <308>: DATABASE ACCESSION NUMBER: SWISS-Prot / Q9Z2H4
  ref <309>: DATABASE ENTRY DATE: 2002-06-15
MPGPLGLLCFLALGLLGSAGPSGAAPPLCAAPCSCDGDRRVDCSGKGLTAVPEGLSAFTQALDISMNNITQLPEDAFKSFPFLEELQLAGNDLSLIHPKALSGLKELKVLTLQNNQLRTVPSEAIHGLSALQSLRLDANHITSVPEDSFEGLVQLRHLWLDDNSLTEVPVRPLSNLPTLQALTLALNNISSIPDFAFTNLSSLVVLHLHNNKIKSLSQHCFDGLDNLETLDLNYNYLDEFPQAIKALPSLKELGFHSNSISVIPDGAFGGNPLLRTIHLYDNPLSFVGNSAFHNLSDLHCLVIRGASLVQWFPNLTGTVHLESLTLTGTKISSIPDDLCQNQKMLRTLDLSYNNIRDLPSFNGCRALEEISLQRNQISLIKENTFQGLTSLRILDLSRNLIREIHSGAFAKLGTITNLDVSFNELTSFPTEGLNGLNQLKLVGNFKLKDALAARDFANLRSLSVPYAYQCCAFWGCDSYANLNTEDNSPQEHSVTKEKGATDAANVTSTAENEEHSQIIIHCTPSTGAFKPCEYLLGSWMIRLTVWFIFLVALLFNLLVILTVFASCSSLPASKLFIGLISVSNLLMGIYTGILTFLDAVSWGRFAEFGIWWETGSGCKVAGSLAVFSSESAVFLLTLAAVERSVFAKDLMKHGKSSHLRQFQVAALLALLGAAVAGCFPLFHGGQYSASPLCLPFPTGETPSLGFTVTLVLLNSLAFLLMAIIYTKLYCNLEKEDLSENSQSSVIKHVAWLIFTNCIFFCPVAFFSFAPLITAISISPEIMKSVTLIFFPLPACLNPVLYVFFNPKFKEDWKLLKRRVTRKHGSVSVSISSQGGCGEQDFYYDCGMYSHLQGNLTVCDCCESFLLTKPVSCKHLIKSHSCPVLTAASCQRPEAYWSDCGTQSAHSDYADEEDSFVSDSSDQVQACGRACFYQSRGFPLVRYAYNLQRVRD

SEQ ID NO: 922 - DNA, 4505 bp, Homo sapiens
acaattggcgggcaacgacctttcttttatccacccaaaggccttgtctgggttgaaagaactcaaagttctaacgctccagaataatcagttgaaaacagtacccagtgaagccattcgagggctgagtgctttgcagtctttgcgtttagatgccaaccatattacctcagtccccgaggacagttttgaaggacttgttcagttacggcatctgtggctggatgacaacagcttgacggaggtgcctgtgcaccccctcagcaatctgcccaccctacaggcgctgaccctggctctcaacaagatctcaagcatccctgactttgcatttaccaacctttcaagcctggtagttctgcatcttcataacaataaaattagaagcctgagtcaacactgttttgatggactagataacctggagaccttagacttgaattataataacttgggggaatttcctcaggctattaaagcccttcctagccttaaagagctaggatttcatagtaattctatttctgttatccctgatggagcatttgatggtaatccactcttaagaactatacatttgtatgataatcctctgtcttttgtggggaactcagcatttcacaatttatctgatcttcattccctagtcattcgtggtgcaagcatggtgcagcagttccccaatcttacaggaactgtccacctggaaagtctgactttgacaggtacaaagataagcagcatacctaataatttgtgtcaagaacaaaagatgcttaggactttggacttgtcttacaataatataagagaccttccaagttttaatggttgccatgctctggaagaaatttctttacagcgtaatcaaatctaccaaataaaggaaggcacctttcaaggcctgatatctctaaggattctagatctgagtagaaacctgatacatgaaattcacagtagagcttttgccacacttgggccaataactaacctagatgtaagtttcaatgaattaacttcctttcctacggaaggcctgaatgggctaaatcaactgaaacttgtgggcaacttcaagctgaaagaagccttagcagcaaaagactttgttaacctcaggtctttatcagtaccatatgcttatcagtgctgtgcattttggggttgtgactcttatgcaaatttaaacacagaagataacagcctccaggaccacagtgtggcacaggagaaaggtactgctgatgcagcaaatgtcacaagcactcttgaaaatgaagaacatagtcaaataattatccattgtacaccttcaacaggtgcttttaagccctgtgaatatttactgggaagctggatgattcgtcttactgtgtggttcattttcttggttgcattatttttcaacctgcttgttattttaacaacatttgcatcttgtacatcactgccttcgtccaaattgtttataggcttgatttctgtgtctaacttattcatgggaatctatactggcatcctaacttttcttgatgctgtgtcctggggcagattcgctgaatttggcatttggtgggaaactggcagtggctgcaaagtagctgggtttcttgcagttttctcctcagaaagtgccatatttttattaatgctagcaactgtcgaaagaagcttatctgcaaaagatataatgaaaaatgggaagagcaatcatctcaaacagttccgggttgctgcccttttggctttcctaggtgctacagtagcaggctgttttccccttttccatagaggggaatattctgcatcacccctttgtttgccatttcctacaggtgaaacgccatcattaggattcactgtaacgttagtgctattaaactcactagcatttttattaatggccgttatctacactaaactatactgcaacttggaaaaagaggacctctcagaaaactcacaatctagcatgattaagcatgtcgcttggctaatcttcaccaattgcatctttttctgccctgtggcgtttttttcatttgcaccattgatcactgcaatctctatcagccccgaaataatgaagtctgttactctgatattttttccattgcctgcttgcctgaatccagtcctgtatgttttcttcaacccaaagtttaaagaagactggaagttactgaagcgacgtgttaccaagaaaagtggatcagtttcagtttccatcagtagccaaggtggttgtctggaacaggatttctactacgactgtggcatgtactcacatttgcagggcaacctgactgtttgcgactgctgcgaatcgtttcttttaacaaagccagtatcatgcaaacacttgataaaatcacacagctgtcctgcattggcagtggcttcttgccaaagacctgagggctactggtccgactgtggcacacagtcggcccactctgattatgcagatgaagaagattcctttgtctcagacagttctgaccaggtgcaggcctgtggacgagcctgcttctaccagagtagaggattccctttggtgcgctatgcttacaatctaccaagagttaaagactgaactactgtgtgtgtaaccgtttcccccgtcaaccaaaatcagtgtttatagagtgaaccctattctcatctttcatctgggaagcacttctgtaatcactgcctggtgtcacttagaagaaggagaggtggcagtttatttctcaaaccagtcattttcaaagaacaggtgcctaaattataaattggtgaaaaatgcaatgtccaagcaatgtatgatctgtttgaaacaaatatatgacttgaaaaggatcttaggtgtagtagagcaatataatgttagttttttctgatccataagaagcaaatttatacctatttgtgtattaagcacaagataaagaacagctgttaatattttttaaaaatctattttaaaatgtgattttctataactgaagaaaatatcttgctaattttacctaatgtttcatccttaatctcaggacaacttactgcagggccaaaaaagggactgtcccagctagaactgtgagagtatacataggcattactttattatgttttcacttgccatccttgacataagagaactataaattttgtttaagcaatttataaatctaaaacctgaagatgtttttaaaacaatattaacagctgttaggttaaaaaaatagctggacatttgttttcagtcattatacattgctttggtccaatcagtaattttttcttaagtgttttgtgattacactactagaaaaaaagtaaaaggctaattgctgtgtgggtttagtcgatttggctaaactactaactaatgtgggggtttaatagtatctgagggatttggtggcttcatgtaatgttctcattaatgaatacttcctaatatcgttggctctactaatattttccaatttgctgggatgtcacctagcaatagcttggattatatagaaagtaaactgtggtcaatacttgcatttaattagacgaaacggggagtaattatgacacgaagtacttatgtttatttcttagtgagctggattatcttgaacctgtgctattaaatggaaatttccatacatcttccccatactattttttataaaagagcctattcaatagctcagaggttgaactctggttaaacaagataatatgttattaataaaaatagaagaagaaagaataaagcttagtcctgtgtctttaaaaattaaaaattttacttgattcccatctatgggctttagacctattactgggtggagtcttaaagttataattgttcaatatgttttttgaacagtgtgctaaatcaatagcaaacccactgccatattagttattctgaatatactaaaaaaatccagctagattgcagtttaataattaaactgtacatactgtgcatataatgaatttttatcttatgtaaattatttttagaacacaagttgggaaatgtggcttctgttcatttcgtttaattaaagctacctcctaaactatagtggctgccagtagcagactgttaaattgtggtttatatactttttgcattgtaaatagtctttgttgtacattgtcagtgtaataaaaacagaatctttgtatatcaaaatcatgtagtttgtataaaatgtgggaaggatttatttacagtgtgttgtaattttgtaaggccaactatttacaagttttaaaaattgctatcatgtatatttacacatctgataaatattaaatcataacttggtaagaaactcctaattaaaaggttttttccaaaattcaggttattgaaaacttttcattttattcatttaaaaactagaataacagatatataaaagtgttaatctttgtgctatatggtatgaaatacaatattgtactcagtgttttgaattattaaagtttctagaaagcaa

SEQ ID NO: 923 - protein, 644 aa, Homo sapiens [sequence omitted]

SEQ ID NO: 924 - DNA, 2708 bp, Rattus norvegicus
  ref <308>: DATABASE ACCESSION NUMBER: EMBL / AF061726
  ref <309>: DATABASE ENTRY DATE: 2001-12-09
tcaggcctgggctgagggtgcagcaggagaggccgcagggaaggccgggttccactgctcgtcatcatgccctacctgctgccgggattcttctgtgacagagtgatcagagaaagggacaggagaaatggagagggcaccgtctcacagcctctcaagtttgaggggcaggattttgtcgttctcaaacaacggtgtctggctcagaagtgcctctttgaagatcgagtcttcccagcaggtacacaggcccttggctcacatgagctgagccagaaagccaagatgaaggccatcacttggaagaggccaaaggaaatttgtgagaatccccgatttatcattggtggagccaacaggactgacatctgccaaggagatctaggggactgctggtttcttgcagccattgcctgtctgaccctgaatgagcgactgcttttccgagttatacctcatgatcaaagtttcactgaaaactacgcagggatcttccacttccagttctggcgctatggagactgggtagatgtggttattgacgactgtctgccgacatacaacaaccagctggtcttcaccaaatccaaccaccgcaatgagttctggagtgctctactggagaaagcatatgccaagctccatggttcctatgaagctctgaaaggtgggaacaccacagaagccatggaggacttcacaggaggggtgacagagttttttgagatcaaggatgctccgagtgacatgtacaagatcatgaggaaagctatcgagagaggctccctcatgggctgctccattgatgatggcaccaacatgacttatggaacctctccttctggtctgaacatgggggaattgattgcgcggatggtgagaaatatggataactcgctgctcagagactcagacctggaccccagggcctcagatgacagaccgtcacggacaattgttccggtgcagtatgaaacaagaatggcctgtggactggtgaaagggcacgcctattcagtcactgggctggaggaggccctgttcaaaggcgagaaggtgaagctggtgcggctgcggaacccctggggccaggtggagtggaacggctcttggagtgatggttggaaggactggagctttgtggacaaagacgagaaggcccgtctgcagcaccaggtcaccgaggatggagagttctggatgtcatatgatgactttgtctaccatttcacaaagctggagatctgcaacctcacagctgatgccctggagtccgataagcttcagacctggacagtgtctgtaaatgagggccgctgggtgaggggctgttctgctggaggctgccggaacttcccagacactttctggaccaacccgcagtaccgtctcaagctcctggaggaggatgatgaccctgatgactctgaggtgatttgcagcttcctcgtggctctgatgcagaaaaatcggcgcaaggaccggaagctgggggccaacctcttcaccattggcttcgctatctacgaggttcccaaagagatgcacgggaataagcaacacctgcagaaggacttcttcttgtacaatgcctccaaggccaggagcaaaacctacatcaacatgcgggaggtgtcccagcgcttccgcctgccgcccagcgagtatgtcattgtcccctccacttacgagccccatcaggagggggaattcatcctccgggtcttctctgaaaagaggaatctctctgaggaagctgagaatacaatctctgtggaccggccagtgccacggcctggccacacagaccaggagagtgaggagcagcagcaattccggaacatcttcaggcagattgcaggcgacgacatggagatctgtgcggatgaactcaagaatgtccttaatacggtggtgaacaaacacaaggacctgaagacacaagggttcactctggagtcctgcagaagcatgatagctctcatggatacagatggctctgggagactgaatcttcaagagttccatcacctctggaaaaagatcaaggcctggcagaaaatcttcaaacactatgacactgaccattctggtaccatcaatagctatgagatgcgaaatgcagtcaatgatgcaggcttccatctcaacagccaactctatgacatcatcaccatgcgctacgcagacaaacacatgaacatcgactttgacagcttcatctgctgcttcgtcaggctggaagggatgttcagagcttttcacgcatttgacaaggatggagatggcatcatcaaactgaacgtacttgagtggctgcagcttaccatgtatgcctgaaccagatgacctcatgtaagatcaaccaggattccatctcaacacgacacagccagggctgtttaccacaaggaacccagtaggcacacctccaccaaactgggctcctggtcacgttccttctccactttgacccaagtcttggtgcacagccacctcaagtgtctggcttgctgggagctctgcagacgctgtctacatagcttgtaactgggttgtccacagccctgtcaccatctgcactcagttctgccagttttagggtgggtctactctggggtccatagggtgtggatacctgacaaaaatgtggctacattctgaaagaatctatctaaataaaggcacgcacatggctggttccacca

SEQ ID NO: 925 - protein, 821 aa, Rattus norvegicus
  ref <308>: DATABASE ACCESSION NUMBER: SWISS-Prot / P16259
  ref <309>: DATABASE ENTRY DATE: 2002-06-15
MPTVISPTVAPRTGAEPRSPGPVPHPAQGKTTEAGGGHPGGIYSAIISRNFPIIGVKEKTFEQLHKKCLEKKVLYLDPEFPPDETSLFYSQKFPIQFVWKRPPEICENPRFIIGGANRTDICQGDLGDCWLLAAIACLTLNERLLFRVIPHDQSFTENYAGIFHFQFWRYGDWVDVVIDDCLPTYNNQLVFTKSNHRNEFWSALLEKAYAKLHGSYEALKGGNTTEAMEDFTGGVTEFFEIKDAPSDMYKIMRKAIERGSLMGCSIDDGTNMTYGTSPSGLNMGELIARMVRNMDNSLLRDSDLDPRASDDRPSRTIVPVQYETRMACGLVKGHAYSVTGLEEALFKGEKVKLVRLRNPWGQVEWNGSWSDGWKDWSFVDKDEKARLQHQVTEDGEFWMSYDDFVYHFTKLEICNLTADALESDKLQTWTVSVNEGRWVRGCSAGGCRNFPDTFWTNPQYRLKLLEEDDDPDDSEVICSFLVALMQKNRRKDRKLGANLFTIGFAIYEVPKEMHGNKQHLQKDFFLYNASKARSKTYINMREVSQRFRLPPSEYVIVPSTYEPHQEGEFILRVFSEKRNLSEEAENTISVDRPVKKKKNKPIIFVSDRANSNKELGVDQEAEEGKDKTGPDKQGESPQPRPGHTDQESEEQQQFRNIFRQIAGDDMEICADELKNVLNTVVNKHKDLKTQGFTLESCRSMIALMDTDGSGRLNLQEFHHLWKKIKAWQKIFKHYDTDHSGTINSYEMRNAVNDAGFHLNSQLYDIITMRYADKHMNIDFDSFICCFVRLEGMFRAFHAFDKDGDGIIKLNVLEWLQLTMYA

SEQ ID NO: 926 - DNA, 1661 bp, Homo sapiens
  ref <308>: DATABASE ACCESSION NUMBER: EMBL / BC003169
  ref <309>: DATABASE ENTRY DATE: 2001-07-13
ccctcctccacgcttacagccacacacacagtcacacagacgcgttctgagggtggctgcccgcttgggatggaggaatcacttccctcagaacccagccaagtcctctaggcctccttgggggtccttccagcctgaggggcttcggagctgaggagcagctgttctgatgcacgggaacaagcagcacctgcagaaggacttcttcctgtacaacgcctccaaggccaggagcaaaacctacatcaacatgcgggaggtgtcccagcgcttccgcctgcctcccagcgagtacgtcatcgtgccctccacctacgagccccaccaggagggggaattcatcctccgggtcttctctgaaaagaggaacctctctgaggaagttgaaaataccatctccgtggatcggccagtgaaaaagaaaaaaaccaagcccatcatcttcgtttcggacagagcaaacagcaacaaggagctgggtgtggaccaggagtcagaggagggcaaaggcaaaacaagccctgataagcaaaagcagtccccacagccacagcctggcagctctgatcaggaaagtgaggaacagcaacaattccggaacattttcaagcagatagcaggagatgacatggagatctgtgcagatgagctcaagaaggtccttaacacagtcgtgaacaaacacaaggacctgaagacacacgggttcacactggagtcctgccgtagcatgattgcgctcatggatacagatggctctggaaagctcaacctgcaggagttccaccacctctggaacaagattaaggcctggcagaaaattttcaaacactatgacacagaccagtccggcaccatcaacagctacgagatgcgaaatgcagtcaacgacgcaggattccacctcaacaaccagctctatgacatcattaccatgcggtacgcagacaaacacatgaacatcgactttgacagtttcatctgctgcttcgttaggctggagggcatgttcagagcttttcatgcatttgacaaggatggagatggtatcatcaagctcaacgttctggagtggctgcagctcaccatgtatgcctgaaccaggctggcctcatccaaagccatgcaggatcactcaggatttcagtttcaccctctatttccaaagccatttacctcaaaggacccagcagctacacccctacaggcttccaggcacctcatcagtcatgttcctcctccattttaccccctacccatccttgatcggtcatgcctagcctgaccctttagtaaagcaatgaggtaggaagaacaaacccttgtccctttgccatgtggaggaaagtgcctgcctctggtccgagccgcctcggttctgaagcgagtgctcctgcttaccttgctctaggctgtctgcagaagcacctgccggtggcactcagcacctccttgtgctagagccctccatcaccttcacgctgtcccaccatgggccaggaaccaaaccagcactgggttctactgctgtggggtaaactaactcagtggaatagggctggttactttgggctgtccaactcataagtttggctgcattttgaaaaaagctgatctaaataaaggcatgtgtatggctggtcaaaaaaaaaaaaaaaaaa

SEQ ID NO: 927 - protein, 821 aa, Homo sapiens
  ref <308>: DATABASE ACCESSION NUMBER: SWISS-Prot / P20807
  ref <309>: DATABASE ENTRY DATE: 2002-06-15
MPTVISASVAPRTAAEPRSPGPVPHPAQSKATEAGGGNPSGIYSAIISRNFPIIGVKEKTFEQLHKKCLEKKVLYVDPEFPPDETSLFYSQKFPIQFVWKRPPEICENPRFIIDGANRTDICQGELGDCWFLAAIACLTLNQHLLFRVIPHDQSFIENYAGIFHFQFWRYGEWVDVVIDDCLPTYNNQLVFTKSNHRNEFWSALLEKAYAKLHGSYEALKGGNTTEAMEDFTGGVAEFFEIRDAPSDMYKIMKKAIERGSLMGCSIDDGTNMTYGTSPSGLNMGELIARMVRNMDNSLLQDSDLDPRGSDERPTRTIIPVQYETRMACGLVRGHAYSVTGLDEVPFKGEKVKLVRLRNPWGQVEWNGSWSDRWKDWSFVDKDEKARLQHQVTEDGEFWMSYEDFIYHFTKLEICNLTADALQSDKLQTWTVSVNEGRWVRGCSAGGCRNFPDTFWTNPQYRLKLLEEDDDPDDSEVICSFLVALMQKNRRKDRKLGASLFTIGFAIYEVPKEMHGNKQHLQKDFFLYNASKARSKTYINMREVSQRFRLPPSEYVIVPSTYEPHQEGEFILRVFSEKRNLSEEVENTISVDRPVKKKKTKPIIFVSDRANSNKELGVDQESEEGKGKTSPDKQKQSPQPQPGSSDQESEEQQQFRNIFKQIAGDDMEICADELKKVLNTVVNKHKDLKTHGFTLESCRSMIALMDTDGSGKLNLQEFHHLWNKIKAWQKIFKHYDTDQSGTINSYEMRNAVNDAGFHLNNQLYDIITMRYADKHMNIDFDSFICCFVRLEGMFRAFHAFDKDGDGIIKLNVLEWLQLTMYA

SEQ ID NO: 928 - DNA, 7272 bp, Rattus norvegicus
  misc_feature (1)..(7272): n=a, c, g or t
  ref <308>: DATABASE ACCESSION NUMBER: EMBL / AF061947
  ref <309>: DATABASE ENTRY DATE: 1998-07-17
ggccgcctcggaggtccgtgcagggctccggtgagcgcgaggaggtgggaacacgcgacgcccgctctccattacgggcgcggtgggccgaagcctggctcgagacccgaaggcgctgacaaggaccttctggccacgcctgctcctccgcgcgccccgccgctgcgcccggaggcgcccagggtgggtcactgggaccgcagctcgaagccatccctttctgtgcgtcctttcattcaccttcacagcagcccagagagggactgtcaactggcacatcccccaccagtgatgggaagtgatcctccatggtggcgctgaatctctgaatatgattcgaattgcagccttaaatgccagctccacaattgaagatgaccatgaaggaagctttaaaagtcacaaaatccagacaaaggaggctcaggaagcagaagcctttgccctataccacaaggccctggatctgcagaaacatgacaggtttgaggagtctgccaaggcctaccatgaactcctggaggctcgcctgctgcgagaggcagtttcatccggagatgagaaggaagggctgaagcaccctggactgatactgaaatattctacgtataagaacctggcccagctggcagcccagcgggaggacctggagacagccatggagttttatttggaggccgtgatgctggattccacagacgtcaacctttggtacaagattggacatgtggccctgaggctcatccggcttcccctggctcgccatgcttttgaggaagggctccggtgtaatcctgaccactggccctgcttggacaacctcatcactgttttgtacaccctcagcgattacacaacatgtctttacttcatctgcaaagcactggagaaagactgccgctacagcaaaggcctggttctcaaggagaagatttttgaagagcaaccttgtctccgaaaggactcactccgaatgttcctcaaatgtgacatgtcagttcacgaggtgtcagtgaatgcagcagagacacaggccattgtagacgaggctctggggctgcggaagaagaggcaggcgttgatcgtgcgggaaaaggagccagacctgaaactagtgcagcccatccctttcttcacgtggaagtgccttggagagagcttgcttgccatgtacaatcacctcaccacgtgtgagcctcccaggcccagcctgggcaagaggattgacctgtctgactaccaggatcccagccagctgcttgccccctccatcgtggttactcctgtcagtgtggtccagccaagtcctgtttgcaccaatccaactgttgctgtggccgagcctgtgctctcctacacctctgtgaccacaaccagcttcccactgcacagtcctggcctgctggacacgggcactcctatgggtgatgtttccggaggagataaatctaaaaaaggggtgaagcgtaagaagactttagaggaaagtggggagacagcaaagcggaggtctgcccgtgtccgcaacaccaagtgcaaaaaagaagagaaggtggatttccaggggcttctggtaaagttcctgccgtccaggttaagaaaactggaccctgaggaggaagatgatccatttaacaactatgaagttcagtcagaagccaaactggagagcttctcgaacgtgggacctcatcgactgtccttcgattcagccacattcatggaatctgagaagcaggatgtgcatgcgttcctgatggagaacctgaccaatgggggcgtcctggagctcatgatgcgctacctgaagagcatgggccacaagttcctgctgaagtggcccccaggcctggcggaggtcgtacttagcgtctaccacagctggaggaggcacagtaccagcctgcccaacccattgctgagggactgcagcaacaagcacatcaaggacatgatgctgatgtctctttcctgcatggagctccaactggaccagtggcttctgaccaaaggcagaagctccacggtgtctccccggaactgccctgctggtgtggtgacaggcaggtttgggccagacttcccaggaacccactgcctgggtgacctcctgcagctgtcatttgcgtcatctcagcgggatctgtttgaggacggctggctggagtttgtggtccgtgtttactggctgaaggcacgtttcttggcactacagggcgatatggagcaagctttggagaactatgatatctgcacagagatactccagagctccacggctctccaagcccaggcaggggctgagcaaagggacattgtcatccggctgcccaacctgcacaatgactccattgtttctctggaggaaattgataagaacctgaagtctctggaaaggtgccagtccctggaggagattcagcggctgtttgaggcgggcgactacaaggccgtggtgcagctgctccggcccactctgtgcaccagtggctttgaccgagccaaacacctggagtttatgacttccattcccgagaggccggcccagctgcttctgctgcaggactctctgctccggctggaggagcacaggcagtgctttgaatgctctgacgtggccctcaatgaagctgtccagcagatgctgaactcgagtgactctgcggccaaggaggagtgggcggccacagtgacgcagctgctgctaggcatggagcaggcactgtcatcagacagcaggggcagcatcctgaaggagtcctcctctcccacgggccttgtccggctcaccaacaacctcattcaggtcatcgactgcagcatggctgtgcaggaggagcccaaggagccctatgtctcctccgtgctgccctggatcatcctccacaggatcatctggcaggaggaagacactttccggtctctgtgccaccagcagcagctccagaacccaacggaagaagggatctcggagatgcccatgctcccatcttccctcatgctgctcaacacagcacatgagtacctgggcaggaggtcctggtgctgcaattcagatggagcgctgctgcgattctatgtgcacgttctccaaaaggagcttgctgcgtctgcctctgaggacactcacccctacaaggaggagctggagaccgccttggagcagtgtttctactgcctctacagcttccccagcaagaagagcaaggccaggtacctggaggagcactcagcccagcaggtggacctcacctgggaggacgccctgttcatgtttgagtacttcaagcccaagaccctccctgagtttgacagctacaagaccagcaccgtctctgcggacttggcaaacctgttgaaaagaatcgccaccattgtgccgcgcacagagaagcccgccctgagcatggacaaagtctctgcctacattgagggaacctcagcggaggtgccctgccttcctgacggggcagaccccgcccctccagtgctgaatgagctctactacctcctggctgactatcacttcaaaaacaaagagcagtccaaagccatcaagttctacatgcatgacatttgcatctgccctaacaggtttgattcctgggcaggcatggctctggcccgggccagccgaattcaggacaagctgaactcaaatgagctgaagagtgatggacccatctggagacatgccacacctgttctgaactgcttccggagggcccttgagattgacagctctaacttgtccttgtggattgagtatggcaccatgtcctatgccttgcactcattcgcgtcccgtcagctgaagcagtggcgagccgagctgcctcctgaggttgtgcagcagatggaggatcggcgagacagcatgctggagacagccaggcactgtttcacgtctgcagcccactgcgagggtgatggcgatgaggaggagtggctcattcactacatgctgggcaaagtggcagagaagcagcagcagccgccgaccgtgtacctgctgcactaccgtcaggcgggccactacttacacgaggaggccgcccgctaccctaagaagattcactaccacaacccgcccgagctggccatggaagccctggaggtgtacttccggctccatgcgtccatcctgaagctcctgggcaaacctgactctggggttagcgcagaggtcctggtcagctttatgaaggaagcagcagaaggaccttttgccaggggcgaggagaagaatacacctaaagcttcagaaaaggagaaggcctgcctggtggatgaggactcccactcttcagctgggacactgccgggccccggagcctcccttccctcctcctctggcccaggtctgacatccccaccttacacagccactccgattgaccacgattacgtcaaatgtaaaaaaccccgtcagcaggcgacgccggacgaccgaagccaggacagcacagctgtggcactgtcagactccagctcaacacaggacttctttaatgagcccacaagtttgctggacggttctcgaaagctccttccagagaagaggatctctgggctcagtgctcaagcaggaccaagtggtaaagaccttccagggcccacagaggaaagaggaaaaacggaggagtctttggagagcacagaggccttccgggttgtagaaccaagcgtccagaagcctgtggcagattcctcggcctctgcttacatccccagcaagcccgcagtgtccacgccccctccgtgggatgggaagaagaggagtgaccccctaggggagccagtggctttccctcaggggctgccagcaggtgctgaggaacagcgccagttcctcacagagcagtgcatcgcctccttctgcctgtgcttgagtcgcttcccacagcactacaagagtctctaccggctggcctttctctacacctacagcaagactcaccggaacctccagtgggcccgtgatgtgttgctaggcagcagtatcccatggcaacaactgcagcacatgccggcacaggggctcttctgcgagaggaacaagaccaatttcttcaacggcatctggcggatccccgtggatgagattgaccggcccggcagcttcgcctggcacatgaaccgctccatcgtgctgctactcaaggttctagcccagctccgggaccacagcaccctgttgaaggtgtcctccatgctgcagcggacaccagaccagggcaagaaatatctgcgagatgctgaccgccaggtgctggcacagcgcgccttcatcctcactgtgaaggtgctggaggacacactgagtgagcttgcagaggggttagagcacccaggatccaaggcctgtggcctctctggagccaggatgaccaccgatgtctcacacaaagccagtcccgaggatggccaggaaagcctcccacaccccaagaagctacctctagctgatggctcaggaccagggcctgagccagggggcaaagtgggccctctccaccaattgccagtggccacagacacaagggacaacacagagcagggtggggagccgaaagacaaagagcgtcccccggtggggcccacagaacccatggacaccggcgagactgctgctcgccacccagacttggaaccgacgccacgtctgttgccaggccgccccccaagggaccggggtcccgagagccgctctgctgagctttccctggaggagctgagcatcagcacccggcagcagcctgccccacttgtaccatccccagtaacccccaccacagctgctcccactaccatgggggccagggcagcggggcaccccgaggaggcaccgccaaggcctaatcgaaagaggaaactcctgcaggacacagagtctggcaagacgctccttttggacgcctaccgtgtgtggcagcagggccagaaggccatggcctatgacctgagccgcatcgagaagatcatgtcggagacttacatgctcatcaagcaggtggacgaggagactgcactggagcaggctgtgaagttctgtcaggtccacctcggggctgctgcccagagacaggcctcaggagatgcacccactacccccaagcaccccaaggacagccgagagaatttcttccctgcaacagtggccccctcagcacctgacaccacagcacctgacgctctccagcggcccagtgactcccacctcaagcctgggttggctgctgccatcacctgccctccctcagcatcagcctctaccccagaccctggaattccccagccacacaggccagaggctgtgcccagcagggcccctctgagtcctgatggagaagaggtgtcaggagtgacagagggtcccagctttctatcccaagaaccacggcacagtcaccagatgaaaatggctgccactggtcccctggccgagcagcactgctggccagtggaggctgcttgccagacaggtgccgagcccaccttcagccaagccaccagcaccaaggtccccagcagtggaagtacccagacacctgagagccatcaaggcaaaactgagtccagcagagccaagtcccgcctcctgcccaacatgccaaagctggtgatcccctcggccaccaccaagttcccccctgagatcaccgtcacaccacctacccccaccctgctctcccccaaaggcagcatctcagaggagaccaagcagaagctgaagtctgccatcctgtctgcccaatctgccgccaatgtgaggaaggagagcctgtgccagccagccctggaggttctggagacatccagccaggagtcctcattggagagtgagacagacgaggacgatgactttatggacgtatgacgggttcacccagaggcagggcctggggtccctttggtccagaccctgggcaaggccagaagcctattgaggtatggttccctgtggtctcctaagcctgcccagccccctctttgcagcaccctgccctggctcaggctgtccagagcgtgctggtccagaggacggtacggcctgtcttaggcacatgcactgctgcggtctgcacagccgggatgctgccgccgccgccgcttctttttttaatgagatactgactttctctacaagcccgtgtgtactgaccaggcccacagtccagtgccgaggagacatcaggagcctagctctccccacaccctttttngtcattgttgcttctttttctaataaagatggaaaatggtaaaaaa

SEQ ID NO: 929 - protein, 2182 aa, Rattus norvegicus
  ref <308>: DATABASE ACCESSION NUMBER: SWISS-Prot / O88480
  ref <309>: DATABASE ENTRY DATE: 2001-10-16
MIRIAALNASSTIEDDHEGSFKSHKIQTKEAQEAEAFALYHKALDLQKHDRFEESAKAYHELLEARLLREAVSSGDEKEGLKHPGLILKYSTYKNLAQLAAQREDLETAMEFYLEAVMLDSTDVNLWYKIGHVALRLIRLPLARHAFEEGLRCNPDHWPCLDNLITVLYTLSDYTTCLYFICKALEKDCRYSKGLVLKEKIFEEQPCLRKDSLRMFLKCDMSVHEVSVNAAETQAIVDEALGLRKKRQALIVREKEPDLKLVQPIPFFTWKCLGESLLAMYNHLTTCEPPRPSLGKRIDLSDYQDPSQLLAPSIVVTPVSVVQPSPVCTNPTVAVAEPVLSYTSVTTTSFPLHSPGLLDTGTPMGDVSGGDKSKKGVKRKKTLEESGETAKRRSARVRNTKCKKEEKVDFQGLLVKFLPSRLRKLDPEEEDDPFNNYEVQSEAKLESFSNVGPHRLSFDSATFMESEKQDVHAFLMENLTNGGVLELMMRYLKSMGHKFLLKWPPGLAEVVLSVYHSWRRHSTSLPNPLLRDCSNKHIKDMMLMSLSCMELQLDQWLLTKGRSSTVSPRNCPAGVVTGRFGPDFPGTHCLGDLLQLSFASSQRDLFEDGWLEFVVRVYWLKARFLALQGDMEQALENYDICTEILQSSTALQAQAGAEQRDIVIRLPNLHNDSIVSLEEIDKNLKSLERCQSLEEIQRLFEAGDYKAVVQLLRPTLCTSGFDRAKHLEFMTSIPERPAQLLLLQDSLLRLEEHRQCFECSDVALNEAVQQMLNSSDSAAKEEWAATVTQLLLGMEQALSSDSRGSILKESSSPTGLVRLTNNLIQVIDCSMAVQEEPKEPYVSSVLPWIILHRIIWQEEDTFRSLCHQQQLQNPTEEGISEMPMLPSSLMLLNTAHEYLGRRSWCCNSDGALLRFYVHVLQKELAASASEDTHPYKEELETALEQCFYCLYSFPSKKSKARYLEEHSAQQVDLTWEDALFMFEYFKPKTLPEFDSYKTSTVSADLANLLKRIATIVPRTEKPALSMDKVSAYIEGTSAEVPCLPDGADPAPPVLNELYYLLADYHFKNKEQSKAIKFYMHDICICPNRFDSWAGMALARASRIQDKLNSNELKSDGPIWRHATPVLNCFRRALEIDSSNLSLWIEYGTMSYALHSFASRQLKQWRAELPPEVVQQMEDRRDSMLETARHCFTSAAHCEGDGDEEEWLIHYMLGKVAEKQQQPPTVYLLHYRQAGHYLHEEAARYPKKIHYHNPPELAMEALEVYFRLHASILKLLGKPDSGVSAEVLVSFMKEAAEGPFARGEEKNTPKASEKEKACLVDEDSHSSAGTLPGPGASLPSSSGPGLTSPPYTATPIDHDYVKCKKPRQQATPDDRSQDSTAVALSDSSSTQDFFNEPTSLLDGSRKLLPEKRISGLSAQAGPSGKDLPGPTEERGKTEESLESTEAFRVVEPSVQKPVADSSASAYIPSKPAVSTPPPWDGKKRSDPLGEPVAFPQGLPAGAEEQRQFLTEQCIASFCLCLSRFPQHYKSLYRLAFLYTYSKTHRNLQWARDVLLGSSIPWQQLQHMPAQGLFCERNKTNFFNGIWRIPVDEIDRPGSFAWHMNRSIVLLLKVLAQLRDHSTLLKVSSMLQRTPDQGKKYLRDADRQVLAQRAFILTVKVLEDTLSELAEGLEHPGSKACGLSGARMTTDVSHKASPEDGQESLPHPKKLPLADGSGPGPEPGGKVGPLHQLPVATDTRDNTEQGGEPKDKERPPVGPTEPMDTGETAARHPDLEPTPRLLPGRPPRDRGPESRSAELSLEELSISTRQQPAPLVPSPVTPTTAAPTTMGARAAGHPEEAPPRPNRKRKLLQDTESGKTLLLDAYRVWQQGQKAMAYDLSRIEKIMSETYMLIKQVDEETALEQAVKFCQVHLGAAAQRQASGDAPTTPKHPKDSRENFFPATVAPSAPDTTAPDALQRPSDSHLKPGLAAAITCPPSASASTPDPGIPQPHRPEAVPSRAPLSPDGEEVSGVTEGPSFLSQEPRHSHQMKMAATGPLAEQHCWPVEAACQTGAEPTFSQATSTKVPSSGSTQTPESHQGKTESSRAKSRLLPNMPKLVIPSATTKFPPEITVTPPTPTLLSPKGSISEETKQKLKSAILSAQSAANVRKESLCQPALEVLETSSQESSLESETDEDDDFMDV

SEQ ID NO: 930 - DNA, 6143 bp, Homo sapiens
  ref <308>: DATABASE ACCESSION NUMBER: EMBL / AB002328
  ref <309>: DATABASE ENTRY DATE: 2001-10-10
cagttaacgtgatccagccaagcactgtcagcaccaacccagctgtggctgtcgccgagcctgtggtctcctacacctctgtggctacaaccagcttcccactgcacagtcctggtctgttggagacaggcgctcctgtgggtgatatttctgggggagataaatccaagaaaggggtaaaacggaagaagatttcagaagagagtggagaaacagcaaagcggcggtctgcccgtgtccgaaacaccaagtgcaaaaaagaagagaaagtagacttccaggagcttctgatgaagttcttgccgtccaggttaagaaagctggaccctgaggaggaagatgattcctttaataactatgaagtccagtcagaagccaaactggaaagcttcccaagcattgggcctcaaaggctgtcatttgactcagccacattcatggaatctgaaaagcaggacgtgcatgagttcctgctggagaacctaaccaacgggggcatcctggagctgatgatgcgctacctgaaagccatgggccacaagttcttggtaaggtggcctccaggcttggcggaggtcgtgctcagcgtctaccacagctggaggaggcacagcaccagcctgcccaacccgctgctgagggactgcagcaacaagcacatcaaggacatgatgctgatgtctctctcctgcatggaactccagctggaccagtggctgctgaccaaaggcagaagctctgcagtgtctcctcggaactgccctgctggtatggtgaatggcagatttggacctgacttcccagggacccactgcctgggtgacctcctacagctgtcatttgcctcgtcccagcgcgacctgttcgaggatggttggctggagtttgtggtccgtgtttactggctgaaggctcgcttcctggcgctgcagggagacatggagcaggccctggagaactatgacatctgcacagaaatgctccagagttccaccgccatccaggtggaggcaggggctgaacgaagagacattgtcatccggctgcccaacctccataatgactctgtggtttccctggaggagattgataagaacctgaagtcgctggagcggtgccagtccctggaggagattcagcggctgtatgaagcaggcgactacaaggctgttgtgcatctgctccgccccactttgtgcaccagtgggtttgaccgggccaaacacctggagtttatgacttccattcctgagaggccagcccagctgcttcttctgcaggactccttgctccggctgaaggactatcggcagtgttttgagtgttccgatgtggctctgaacgaggctgtccagcagatggtgaactcaggtgaggctgccgccaaggaggagtgggtggccacagtgacccaactgctgatgggcatcgagcaggccctctctgcggacagcagtggtagcatcctgaaggtatcatcctccaccactggccttgtgcggctcaccaacaacctcatccaggtcattgactgcagcatggctgtgcaggaggaggccaaggagccccacgtctcttcagtgctaccctggatcattctacaccggatcatctggcaggaggaagacaccttccattctctgtgccaccagcagcagctccaaaacccagcggaggaagggatgtcagagacgcccatgctcccatcctccctcatgctgctgaacacagcccacgagtatttgggcagaaggtcctggtgctgcaattcagatggggctctgctgcgattctatgtgcgagtactccagaaggaactggctgcatccacctctgaagacacgcacccttacaaggaggagctggagacagccttggagcagtgcttctactgcctgtacagcttccccagcaagaagagtaaggccaggtacctggaggaacactcggcccagcaggtggatcttatatgggaggatgcactgttcatgtttgagtattttaagcccaagacccttcctgaatttgacagctataagaccagcaccgtgtctgctgacttggccaacctactgaagagaattgccaccattgtgcctcgcacagagaggccagcccttagcctggacaaagtctctgcctacattgagggaacttcaactgaggtaccctgcctcccagagggggctgacccctcccctccagtggtgaacgagctttactacctcctggctgattatcatttcaaaaacaaggagcagtccaaggccatcaagttctacatgcatgacatctgcatctgccccaataggtttgattcctgggcaggcatggctctggcccgggccagccgcattcaggacaagctgaactccaatgagctgaagagtgatgggcccatttggaagcatgccacgcccgtcttgaactgcttccgtcgggccctggagattgacagctccaacttgtccctatggattgagtatggcaccatgtcctatgccttgcactcattcgcctcacgtcaattgaagcagtggagaggcgagctgccccctgagctcgtgcagcagatggagggccggcgcgacagcatgctagagacagccaagcactgtttcacatcagcagcccgctgcgagggtgatggtgacgaggaggagtggctcatccactacatgctgggcaaggtggctgagaagcagcagcagccacccaccgtttacttgctgcactacaggcaggctggccactacctgcacgaggaggctgcccgctaccccaagaagatccactaccacaacccacctgagctggccatggaggccctggaggtgtactttcggctccatgcttccatcctgaagctcctggggaagcccgattctggggttggtgcagaggtcctggtcaactttatgaaggaggctgcagaaggaccctttgccaggggcgaggagaagaacacacccaaagcttcagaaaaggagaaggcctgcctggtggacgaggactcccactcttcagctgggacactgccgggccccggagcctccctcccctcctcctctggcccaggtctgacatccccaccttacacagccactccgattgaccacgattacgtcaaatgtaaaaaaccccaccagcaggcaacgccggacgaccgaagccaggacagcacagccgtagcactctcagactctagctcaacgcaggacttctttaatgagcccaccagcttactggaaggctccaggaaatcctacacagagaagaggctgcccattctcagttcccaagcaggagcgacgggtaaagatcttcagggggccacagaagaaagaggaaaaaacgaggagtcattggagagtacagaaggcttccgggctgcagagcaaggtgtccagaagcctgctgcagaaaccccagcctctgcttgcatccctggcaagccctcagcatccacacccaccctgtgggatgggaagaagagaggggacctcccaggggagccagtggccttcccccaggggctgccggctggtgctgaggagcagcggcagtttctcacagagcagtgcatcgcctccttccgcctgtgcctgagccgcttcccccagcactataagagtctctaccgtctggccttcctctacacctacagcaagacccaccggaacctccagtgggcccgcgacgtgttgctaggcagcagtatcccgtggcaacaactgcagcacatgccggcacaggggctcttctgcgagaggaacaagaccaatttcttcaacggcatctggcggatccccgtggacgagattgaccggccgggcagctttgcctggcacatgaaccgctccatcgtgctgctgctcaaggtgctggcccagctgcgggaccacagcaccctgctgaaggtgtcctccatgcttcagcggaccccagaccagggcaagaagtatctgcgagatgctgaccgccaggtcctggcgcagcgggccttcatcctcactgtgaaggtgctcgaagacacgctgagcgagctcgcagaggggtcagaacgcccagggcccaaggtctgtggcctccccggagccaggatgaccaccgatgtctcacacaaggccagtcctgaggatggccaggagggcctcccccagccgaagaagccccctctggctgatggctcagggccagggcccgagccaggaggcaaagtgggcctcctcaaccaccggcctgtggccatggatgcaggagacagtgcagaccaaagcggggagcggaaggataaagagagcccacgggcagggcccactgagcccatggacacgagtgaggccactgtttgccactcagacttggagcggacaccacccctgctgccaggtcgccccgcaagggaccggggccccgagagccggcccactgagctgtccctggaggagctgagcatcagtgcccggcagcagcccaccccgctcaccccagcccagccagcccccgcccccgcccccgccaccaccacagggaccagggcagggggccacccggaggagccgctctcccggctcagccgcaagaggaagctcctggaggacacagagtcaggcaagacacttctgttggatgcctaccgtgtgtggcagcagggccagaagggtgtggcctatgacctgggccgtgtggagaggatcatgtcggagacctacatgctcatcaagcaggtggatgaggaggctgcgctggagcaggctgtgaagttctgccaggtccatcttggggctgccgcccagagacaggcctcgggggacacccccaccactccaaagcaccccaaagacagccgagagaacttctttcctgtgacagtggtgcccacagcccctgaccctgtgccagctgactctgtccagcggcccagtgatgctcacaccaagcctcgccctgcactagctgccgccacaactattatcacctgccctccgtcagcatcagcttccaccctggaccagtccaaggaccctgggcctccccggccacacaggcctgaagctacccccagcatggcctctctgggcccagagggagaagagctggcgagagtggcagagggcaccagcttcccgcctcaggagccacggcacagtccgcaggtgaagatggcccccacaagttccccggcagagccacactgctggccggcagaggctgccctgggcacaggcgctgagcccacctgcagccaggaggggaaactgaggcctgagccgagaagggatggggaggctcaggaggctgcgagtgagactcagcccctgagctctcccccaacagctgccagctccaaggcccccagcagtgggagtgcccagccaccagagggtcacccaggcaagcctgagcccagccgggctaagtcccgccccctgcccaacatgccaaagctggtcatcccctccgccgccaccaagttcccccctgagatcaccgtcacgccacccaccccaaccctgctctcccccaaaggcagcatctcggaggagaccaagcagaagctgaagtcagccatcctttctgcccagtctgctgccaacgtgaggaaggagagcctatgccagccagccctggaggtcctggagacatccagccaggagtcctcgctggagagcgagacagacgaggacgacgactacatggacatttgaggggccactgcagccccaccgccacgccccaggggaccagccaggcctggaatgccccctgggcaggaccctgggcaggaccagaggcccacatggatgccactccccacacagcccccaggcctgcccagcccacctcctcatggcatcctccctgtacccaggtcaggctgtccacaccacatgggagcccagaggaggaggggcccgccttagccatgtgaaggtggattggtcgccatctgcacgccaggcggcatccttttctatgaagtgttgactttgtaaatctgcccacacccagctggccatatccacccctcgacgccgggatgagccggctctgcctgtgtcacagtggaggggtcctttagggccaggctcacccctcaccctttttttggttgcttttctaataaagatggaacagtt

SEQ ID NO: 931 - protein, 2220 aa, Homo sapiens
  ref <308>: DATABASE ACCESSION NUMBER: SWISS-Prot / Q9Y6J0
  ref <309>: DATABASE ENTRY DATE: 2002-06-15
MIRIAALNASSTIEDDHEGSFKSHKTQTKEAQEAEAFALYHKALDLQKHDRFEESAKAYHELLEASLLREAVSSGDEKEGLKHPGLILKYSTYKNLAQLAAQREDLETAMEFYLEAVMLDSTDVNLWYKIGHVALRLIRIPLARHAFEEGLRCNPDHWPCLDNLITVLYTLSDYTTCLYFICKALEKDCRYSKGLVLKEKIFEEQPCLRKDSLRMFLKCDMSIHDVSVSAAETQAIVDEALGLRKKRQALIVREKEPDLKLVQPIPFFTWKCLGESLLAMYNHLTTCEPPRPSLGKRIDLSDYQDPSQPLESSMVVTPVNVIQPSTVSTNPAVAVAEPVVSYTSVATTSFPLHSPGLLETGAPVGDISGGDKSKKGVKRKKISEESGETAKRRSARVRNTKCKKEEKVDFQELLMKFLPSRLRKLDPEEEDDSFNNYEVQSEAKLESFPSIGPQRLSFDSATFMESEKQDVHEFLLENLTNGGILELMMRYLKAMGHKFLVRWPPGLAEVVLSVYHSWRRHSTSLPNPLLRDCSNKHIKDMMLMSLSCMELQLDQWLLTKGRSSAVSPRNCPAGMVNGRFGPDFPGTHCLGDLLQLSFASSQRDLFEDGWLEFVVRVYWLKARFLALQGDMEQALENYDICTEMLQSSTAIQVEAGAERRDIVIRLPNLHNDSVVSLEEIDKNLKSLERCQSLEEIQRLYEAGDYKAVVHLLRPTLCTSGFDRAKHLEFMTSIPERPAQLLLLQDSLLRLKDYRQCFECSDVALNEAVQQMVNSGEAAAKEEWVATVTQLLMGIEQALSADSSGSILKVSSSTTGLVRLTNNLIQVIDCSMAVQEEAKEPHVSSVLPWIILHRIIWQEEDTFHSLCHQQQLQNPAEEGMSETPMLPSSLMLLNTAHEYLGRRSWCCNSDGALLRFYVRVLQKELAASTSEDTHPYKEELETALEQCFYCLYSFPSKKSKARYLEEHSAQQVDLIWEDALFMFEYFKPKTLPEFDSYKTSTVSADLANLLKRIATIVPRTERPALSLDKVSAYIEGTSTEVPCLPEGADPSPPVVNELYYLLADYHFKNKEQSKAIKFYMHDICICPNRFDSWAGMALARASRIQDKLNSNELKSDGPIWKHATPVLNCFRRALEIDSSNLSLWIEYGTMSYALHSFASRQLKQWRGELPPELVQQMEGRRDSMLETAKHCFTSAARCEGDGDEEEWLIHYMLGKVAEKQQQPPTVYLLHYRQAGHYLHEEAARYPKKIHYHNPPELAMEALEVYFRLHASILKLLGKPDSGVGAEVLVNFMKEAAEGPFARGEEKNTPKASEKEKACLVDEDSHSSAGTLPGPGASLPSSSGPGLTSPPYTATPIDHDYVKCKKPHQQATPDDRSQDSTAVALSDSSSTQDFFNEPTSLLEGSRKSYTEKRLPILSSQAGATGKDLQGATEERGKNEESLESTEGFRAAEQGVQKPAAETPASACIPGKPSASTPTLWDGKKRGDLPGEPVAFPQGLPAGAEEQRQFLTEQCIASFRLCLSRFPQHYKSLYRLAFLYTYSKTHRNLQWARDVLLGSSIPWQQLQHMPAQGLFCERNKTNFFNGIWRIPVDEIDRPGSFAWHMNRSIVLLLKVLAQLRDHSTLLKVSSMLQRTPDQGKKYLRDADRQVLAQRAFILTVKVLEDTLSELAEGSERPGPKVCGLPGARMTTDVSHKASPEDGQEGLPQPKKPPLADGSGPGPEPGGKVGLLNHRPVAMDAGDSADQSGERKDKESPRAGPTEPMDTSEATVCHSDLERTPPLLPGRPARDRGPESRPTELSLEELSISARQQPTPLTPAQPAPAPAPATTTGTRAGGHPEEPLSRLSRKRKLLEDTESGKTLLLDAYRVWQQGQKGVAYDLGRVERIMSETYMLIKQVDEEAALEQAVKFCQVHLGAAAQRQASGDTPTTPKHPKDSRENFFPVTVVPTAPDPVPADSVQRPSDAHTKPRPALAAATTIITCPPSASASTLDQSKDPGPPRPHRPEATPSMASLGPEGEELARVAEGTSFPPQEPRHSPQVKMAPTSSPAEPHCWPAEAALGTGAEPTCSQEGKLRPEPRRDGEAQEAASETQPLSSPPTAASSKAPSSGSAQPPEGHPGKPEPSRAKSRPLPNMPKLVIPSAATKFPPEITVTPPTPTLLSPKGSISEETKQKLKSAILSAQSAANVRKESLCQPALEVLETSSQESSLESETDEDDDYMDI

SEQ ID NO: 932 - DNA, 7272 bp, Rattus norvegicus; identical to SEQ ID NO: 928
  misc_feature (1)..(7272): n=a, c, g or t
  ref <308>: DATABASE ACCESSION NUMBER: EMBL / AF061947
  ref <309>: DATABASE ENTRY DATE: 1998-07-17

SEQ ID NO: 933 - protein, 2182 aa, Rattus norvegicus; identical to SEQ ID NO: 929
  ref <308>: DATABASE ACCESSION NUMBER: SWISS-Prot / O88480
  ref <309>: DATABASE ENTRY DATE: 2001-10-16

SEQ ID NO: 934 - DNA, 6143 bp, Homo sapiens; identical to SEQ ID NO: 930
  ref <308>: DATABASE ACCESSION NUMBER: EMBL / AB002328
  ref <309>: DATABASE ENTRY DATE: 2001-10-10

SEQ ID NO: 935 - protein, 2220 aa, Homo sapiens; identical to SEQ ID NO: 931
  ref <308>: DATABASE ACCESSION NUMBER: SWISS-Prot / Q9Y6J0
  ref <309>: DATABASE ENTRY DATE: 2002-06-15

SEQ ID NO: 936 - DNA, 1607 bp, Rattus norvegicus
  misc_feature (1)..(1607): n=a, c, g or t
  ref <308>: DATABASE ACCESSION NUMBER: EMBL / AF062594
  ref <309>: DATABASE ENTRY DATE: 1998-10-27
catgctgaaatatcgcggtttaccatatggggatggtggcgacaatctcctggagcccgtcagatcgcggaaattaccgatgcctgcgcagctccttccgctcagctccgcgtccgagcctcctggaacgatatttggagttcttaaaagatggcagacattgacaacaaagaacagtctgaacttgatcaagatttggaagatgttgaagaagtagaagaagaagaaacgggtgaagaaacaaaaatcaaagcacgtcagctaactgttcagatgatgcaaaatcctcagattcttgcagctcttcaggaaagacttgatggtctggtagacacaccaacaggatacattgaaagcttgcctaaggtagtcaaaagacgggtgaatgctctcaagaatcttcaagttaaatgtgcacagatagaagccaaattctatgaggaagttcatgaccttgagagaaagtatgctgttctctatcagcctctgtttgataagcgatttgagatcattaatgcaatttatgaacctacagaagaagaatgtgaatggaaaccagatgaggaagatgaagtttcggaggagctgaaagaaaaggccaagattgaagatgagaaaaaggatgaagaaaaagaagaccctaaaggaattcctgagttttggttgacagtttttaagaatgatttgctcagtgatatggttcaggaacatgacgaacctattctgaagcacttgaaagatattaaagtgaagttttcggacgctggccagcctatgagttttatcttagaatttcactttgaacccaacgaatatttcacaaatgaagtgttaacaaagacttacaggatgaggtcagaaccagatgattctgatcccttttcttttgatggaccagaaattatgggttgtacagggtgccagatagattggaaaaaaggaaagaatgttactttgaaaaccattaagaagaagcagaaacacaagggccgtgggacagttcgtactgtgactaaaacagtttccaagacttctttctttaacttttttgctcctcctgaagttcctgagaatggagatctggatgacgatgntgaggcaatactggctgcagactttgaaattggtcactttttacgtgagcgtataatcccaagatcagtgttatacttcactggagaagctattgaggacgatgacgatgactatgatgaagaaggtgaagaagctgatgaggaaggggaagaagaaggagatgaggaaaacgatccagactatgacccaaagaaggatcaaaacccagccgagtgcaagcagcagtgagcagtgactggccttgaggacggcctccctgtaatagcctaaacatgactcacttacttacagccttatggttttgtattttcttgatagaatcagtaagtttctaagggaaaggaaattgatattttgcagaccaatttgttctaaccagcatcccaactctagctctgtagccacgttaccgagtccagccctttactgcatgctcaggtcgctgcagtctggttctcctgagagatttcatcatgtagctattggtacattatgaaaccactgtgaacaat

SEQ ID NO: 937 - protein, 391 aa, Rattus norvegicus
  misc_feature (1)..(391): Xaa=Unknown amino acid
MADIDNKEQSELDQDLEDVEEVEEEETGEETKIKARQLTVQMMQNPQILAALQERLDGLVDTPTGYIESLPKVVKRRVNALKNLQVKCAQIEAKFYEEVHDLERKYAVLYQPLFDKRFEIINAIYEPTEEECEWKPDEEDEVSEELKEKAKIEDEKKDEEKEDPKGIPEFWLTVFKNDLLSDMVQEHDEPILKHLKDIKVKFSDAGQPMSFILEFHFEPNEYFTNEVLTKTYRMRSEPDDSDPFSFDGPEIMGCTGCQIDWKKGKNVTLKTIKKKQKHKGRGTVRTVTKTVSKTSFFNFFAPPEVPENGDLDDDXEAILAADFEIGHFLRERIIPRSVLYFTGEAIEDDDDDYDEEGEEADEEGEEEGDEENDPDYDPKKDQNPAECKQQX

SEQ ID NO: 938 - DNA, 269 bp, Homo sapiens
  ref <308>: DATABASE ACCESSION NUMBER: EMBL / AI678881
  ref <309>: DATABASE ENTRY DATE: 1999-12-21
tctgttgggttttgatccttctttgggtcatagtctggatcattttcctcatctcctccttcttccccttcctcatctgcttcttcaccttcttcatcataatcatcaccccatctcttaaaaataataaaccaaaaattctcaggtggaaaaactatgaccttcactattgtgctgcacactacgcactggcaccgggaggaaagagtggccagcctaccccaactgcacacctgggacgcccatcagctgctctctccaacacgtgc

SEQ ID NO: 939 - DNA, 1607 bp, Rattus norvegicus; identical to SEQ ID NO: 936
  misc_feature (1)..(1607): n=a, c, g or t
  ref <308>: DATABASE ACCESSION NUMBER: EMBL / AF062594
  ref <309>: DATABASE ENTRY DATE: 1998-10-27

SEQ ID NO: 940 - protein, 391 aa, Rattus norvegicus; identical to SEQ ID NO: 937
  misc_feature (1)..(391): Xaa=Unknown amino acid

SEQ ID NO: 941 - DNA, 269 bp, Homo sapiens; identical to SEQ ID NO: 938
  ref <308>: DATABASE ACCESSION NUMBER: EMBL / AI678881
  ref <309>: DATABASE ENTRY DATE: 1999-12-21

SEQ ID NO: 942 - DNA, 1607 bp, Rattus norvegicus; identical to SEQ ID NO: 936
  misc_feature (1)..(1607): n=a, c, g or t
  ref <308>: DATABASE ACCESSION NUMBER: EMBL / AF062594
  ref <309>: DATABASE ENTRY DATE: 1998-10-27

SEQ ID NO: 943 - protein, 391 aa, Rattus norvegicus; identical to SEQ ID NO: 937
  misc_feature (1)..(391): Xaa=Unknown amino acid

SEQ ID NO: 944 - DNA, 269 bp, Homo sapiens; identical to SEQ ID NO: 938
  ref <308>: DATABASE ACCESSION NUMBER: EMBL / AI678881
  ref <309>: DATABASE ENTRY DATE: 1999-12-21

SEQ ID NO: 945 - DNA, 1607 bp, Rattus norvegicus; identical to SEQ ID NO: 936
  misc_feature (1)..(1607): n=a, c, g or t
  ref <308>: DATABASE ACCESSION NUMBER: EMBL / AF062594
  ref <309>: DATABASE ENTRY DATE: 1998-10-27

SEQ ID NO: 946 - protein, 391 aa, Rattus norvegicus; identical to SEQ ID NO: 937
  misc_feature (1)..(391): Xaa=Unknown amino acid

SEQ ID NO: 947 - DNA, 269 bp, Homo sapiens; identical to SEQ ID NO: 938
  ref <308>: DATABASE ACCESSION NUMBER: EMBL / AI678881
  ref <309>: DATABASE ENTRY DATE: 1999-12-21

SEQ ID NO: 948 - DNA, 1607 bp, Rattus norvegicus; identical to SEQ ID NO: 936
  misc_feature (1)..(1607): n=a, c, g or t
  ref <308>: DATABASE ACCESSION NUMBER: EMBL / AF062594
  ref <309>: DATABASE ENTRY DATE: 1998-10-27

SEQ ID NO: 949 - protein, 391 aa, Rattus norvegicus; identical to SEQ ID NO: 937
  misc_feature (1)..(391): Xaa=Unknown amino acid

SEQ ID NO: 950 - DNA, 269 bp, Homo sapiens; identical to SEQ ID NO: 938
  ref <308>: DATABASE ACCESSION NUMBER: EMBL / AI678881
  ref <309>: DATABASE ENTRY DATE: 1999-12-21

SEQ ID NO: 951 - DNA, 1607 bp, Rattus norvegicus; identical to SEQ ID NO: 936
  misc_feature (1)..(1607): n=a, c, g or t
  ref <308>: DATABASE ACCESSION NUMBER: EMBL / AF062594
  ref <309>: DATABASE ENTRY DATE: 1998-10-27

SEQ ID NO: 952 - protein, 391 aa, Rattus norvegicus; identical to SEQ ID NO: 937
  misc_feature (1)..(391): Xaa=Unknown amino acid

SEQ ID NO: 953 - DNA, 269 bp, Homo sapiens; identical to SEQ ID NO: 938
  ref <308>: DATABASE ACCESSION NUMBER: EMBL / AI678881
  ref <309>: DATABASE ENTRY DATE: 1999-12-21

SEQ ID NO: 954 - DNA, 2295 bp, Rattus norvegicus
  ref <308>: DATABASE ACCESSION NUMBER: EMBL / AF062740
  ref <309>: DATABASE ENTRY DATE: 1998-07-10
aatccgggctgagagaaggacgcgcacggagtggtgcggccgccacccggggcagacagcagcgggtgctctactgtgcccggaatcccggtcagaacatccagtctaccactgttctctgatgccatgccagcaccaactcaactgttttttcctctcgtccgtaactgtgaactgagcagaatctatggcactgcatgttactgccaccacaaacatctctgctgttcaccaccgtacattcctcagaatcgtctgagatacacaccccatccagcatatgctaccttttgtaggccaagggagaactggtggcagtatactcaaggaaggagatatgcttctacgcctcagaaattttacctcacacctccacaagtcaacagcatccttaaagctaatgaatacagcttcaaagtaccagaatttgatggcaaaaatgtcagttccattcttggatttgacagcaatcgtctgcctgcaaatgcacccatagaagaccggagaagtgcaacaacctgcttgcagaccagagggatgcttttgggcgtttttgatggtcatgcaggctgtgcttgctcccaggcagtcagtgaaagactcttctattatattgctgtttccttgttaccccatgagactttgctagagattgaaaatgcagtggagagtggtcgggcactgctacctatccttcagtggcacaagcaccccaatgattacttcagtaaggaggcatccaaattgtatttcaacggcttgaggacttactggcaagagcttatagacctcaatactggagaatcagctgatattgatgttaaggaggctttaattaatgctttcaagagacttgataatgacatttcattggaggctcaagtcggtgatcctaattcttttctcaattacctggtgcttcgggtagcattttctggggctactgcttgtgtggcccatgtagatggtgttgacctccatgtggctaacactggcgatagtagagccatgctaggtgtgcaagaagaagatggctcctggtcagcagtcacgctctctaatgaccacaatgctcagaatgaaagagaactacaacgtctaaaactggaacacccaaaaaatgaggccaagagcgtggtaaagcaggatcggctgcttggcttgctgatgccctttagggcttttggggatgtaaagttcaaatggagcattgaccttcaaaagagagtgatagagtctggcccagaccagttgaatgacaatgaatacaccaagtttatccctcctaactatcatacacctccttatctcactgctgagccagaggtaacttatcaccgattaaggccacaggataaattcctagtgttagcaactgatggattgtgggagactatgcatagacaggatgtggttaggattgtgggtgagtacttaactggtatgcatcaccaacagccaatagcggttggggggtacaaggtgactctgggacagatgcatggccttttaacagaaaggagagcaaagatgtcatcagtctttgaggatcagaatgcagcaacccatctcattcgccatgctgtaggcaataatgaatttggagctgttgatcatgaacgactctctaaaatgcttagccttcctgaagagcttgctcggatgtatagagatgacattacaatcattgtagttcagttcaattctcatgttgtaggagcatatcaaaaccaggaacagtaagtgatactatcctggcagttcttcattttgaagggcagatcaatgttcaaaagaaactaatacagtaaatatcccagtgggtcattctaaacacatcatgtttagtactctagctagcccagtcttcatatctactgcatcagatgatagcatcatgagtgtctgttctgtcctgttggacctcagggtacctgcacttgaggcagcttgtttccttacccaggtgtcttttaacaatgactcaccaactaagaatatggataggtagatacgatcttgaataggtcaaaagcaaggaacttctgggagtattagtaaaggtagaaaacatcaccatgcccacctgcagactccttccatcataagactcctaatgtacatgagaatagttatttactgcatttttcagatgaacagttcaggtattcacatacatttatgttagcctaaagtgcaggtccagtattttcagccatttatgaccatgaacaaagaaatctggatttgtaagtttttgtgattgtgtgctaaagtatgcttcctgaacggaaa

SEQ ID NO: 955 - protein, 538 aa, Rattus norvegicus
  ref <308>: DATABASE ACCESSION NUMBER: SWISS-Prot / O88483
  ref <309>: DATABASE ENTRY DATE: 2001-10-16
MPAPTQLFFPLVRNCELSRIYGTACYCHHKHLCCSPPYIPQNRLRYTPHPAYATFCRPRENWWQYTQGRRYASTPQKFYLTPPQVNSILKANEYSFKVPEFDGKNVSSILGFDSNRLPANAPIEDRRSATTCLQTRGMLLGVFDGHAGCACSQAVSERLFYYIAVSLLPHETLLEIENAVESGRALLPILQWHKHPNDYFSKEASKLYFNGLRTYWQELIDLNTGESADIDVKEALINAFKRLDNDISLEAQVGDPNSFLNYLVLRVAFSGATACVAHVDGVDLHVANTGDSRAMLGVQEEDGSWSAVTLSNDHNAQNERELQRLKLEHPKNEAKSVVKQDRLLGLLMPFRAFGDVKFKWSIDLQKRVIESGPDQLNDNEYTKFIPPNYHTPPYLTAEPEVTYHRLRPQDKFLVLATDGLWETMHRQDVVRIVGEYLTGMHHQQPIAVGGYKVTLGQMHGLLTERRAKMSSVFEDQNAATHLIRHAVGNNEFGAVDHERLSKMLSLPEELARMYRDDITIIVVQFNSHVVGAYQNQEQ

SEQ ID NO: 956 - DNA, 373 bp, Homo sapiens
  ref <308>: DATABASE ACCESSION NUMBER: EMBL / AI024308
  ref <309>: DATABASE ENTRY DATE: 2000-03-03
ttctggcactttgaaactgtattcattagctttaaggatgctattgacttgtggaggtgtgaggtaaaatttctgtggtgtggaagcatatctccttccttgggtgtactgccaccagttctcctttggcctgcaaaaggtagcatatgctggatgaggtgtgtatctcagtcgactctgaggaatgtacgatgaggaacaacagagatgtttgtggtggcagtaacatgcagtgccatagatcctgctcagttcacagttacggatgagaggaaaaaacagttgagttggtgctggcatggcatcagagaacagtggcaggctggaacttctgactgggattccgggcacggcaggagaccaaacgattctt

SEQ ID NO: 957 - protein, 574 aa, Homo sapiens
  ref <308>: DATABASE ACCESSION NUMBER: Refseq / NP_060914
  ref <309>: DATABASE ENTRY DATE: 2002-05-14
MLSAPCCDDRRMCVCPGPRRIGIPVRSSSLPLFSDAMPAPTQLFFPLIRNCELSRIYGTACYCHHKHLCCSSSYIPQSRLRYTPHPAYATFCRPKENWWQYTQGRRYASTPQKFYLTPPQVNSILKANEYSFKVPEFDGKMSVLSLDLTAIKLPANAPIEDRRSAATCLQTRGMLLGVFDGHAGCAWSQAVSERLFYYIAGSLVPHETLLEIENAVESGRALLPILQWHKHPNDYFSKEASKLYFNSLRTYWQELIDLNTGESTDIDVKEALINAFKRLDNDISLEAQVGDPNSFLNYLVLRVAFSGATACVAHVDGVDLHVANTGDSRAMLGVQEEDGSWSAVTLSNDHNAQNERELERLKLEHPKSEAKSVVKQDRLLGLLMPFRAFGDVKFKWSIDLQKRVIESGPDQLNDNEYTKFIPPNYHTPPYLTAEPEVTYHRLRPQDKFLVLATDGLWETMHRQDVVRIVGEYLTGMHHQQPIAVGGYKVTLGQMHGLLTERRTKMSSVFEDQNAATHLIRHAVGNNEFGTVDHERLSKMLSLPEELARMYRDDITIIVVQFNSHVVGAYQNQEK

SEQ ID NO: 958 - DNA, 2295 bp, Rattus norvegicus; identical to SEQ ID NO: 954
  ref <308>: DATABASE ACCESSION NUMBER: EMBL / AF062740
  ref <309>: DATABASE ENTRY DATE: 1998-07-10

SEQ ID NO: 959 - protein, 538 aa, Rattus norvegicus; identical to SEQ ID NO: 955
  ref <308>: DATABASE ACCESSION NUMBER: SWISS-Prot / O88483
  ref <309>: DATABASE ENTRY DATE: 2001-10-16

SEQ ID NO: 960 - DNA, 373 bp, Homo sapiens; identical to SEQ ID NO: 956
  ref <308>: DATABASE ACCESSION NUMBER: EMBL / AI024308
  ref <309>: DATABASE ENTRY DATE: 2000-03-03

SEQ ID NO: 961 - protein, 574 aa, Homo sapiens; identical to SEQ ID NO: 957
  ref <308>: DATABASE ACCESSION NUMBER: Refseq / NP_060914
  ref <309>: DATABASE ENTRY DATE: 2002-05-14

SEQ ID NO: 962 - DNA, 1750 bp, Rattus norvegicus
  ref <308>: DATABASE ACCESSION NUMBER: EMBL / AF062741
  ref <309>: DATABASE ENTRY DATE: 1998-07-10
tggtgaggagaggacgaggatactagaatgtcaagtactgcgtcctaccggatcttcaattttgcaaggaatcgtattgctgtattacgagggggtagacgcttgtactccagggcagccacgagtaggaatcaagtgaaatggaggctcttttctcccgcatcattggccgtgaacgacagttctccacatggtggctttgctctgcggaaagcttacagacacacatcaaccgaggaagaggatttccacttgcagctcagccccgaacaggtcagtgacctgctccgagctggcgagtcatcccacaaggttctggatttcaacagcggagttccaaattcagtgttaaggtttgagagcaaccagttggcggccaattccccagtggaagaccgacaaggtgtggcttcctgcgtgcagacgagggggacggtgtttggtatttttgatgggcatggtggccatgcgtgtgcacaggcggtgagcgagaggcttttctattacatggcggtgtccctcatgtcccataagaccttggagcagatggaggaagccatggagaacatgaagcctttgctgcccatcctgcagtggctcaagcaccccggagacagtatttataaagatatcacatcggttcatctggaccacctccgagtctattggcaggaactccttgacctacatatggaaacgggactaagcactgaagaggcattgatgtactccttccagagactggactccgacatctcgctagaaattcaggctcctctggaagatgaggtaacgaagaacttatccctccaggttgctttttctggggcgacagcctgcatggcccacgtcgacggagttcacctgcacatagcaaatgctggcgactgccgagctatcctgggtgtccagggagacaatggagcgtggtcatgtttacctcttacctgtgaccacaatgcctggaatgaggcagagctgtcccggcttaagagagaacaccccgagtctgaggacaggacactcatcatagatgacaggctgctgggtgtcctcctaccctgcagggccttcggggacgtccagctaaaatggagtaaagagttgcagcggaacgtcctagagaggggatttgataccgaggccctcaacatctaccagtttaccccgccccactaccacactccaccctacctgactgctaagcctgaggtcacataccacaggcttaggccccaagataagttcctcgtgctggcctcagatggcctctgggacatgctggacaatgaggatgtggtaaggctggtggtggggcacctgtccaaggtcggtcaccagaagccagccctggatcaaagaccagccaacctgggccacatgcagagtctgctgctgcagaggaaagccagcggactccatgcagctgaccagaatgcagccacacatctgatcagacatgccatcgggagcaacgagtatggggaaatggagccagagcgtctggctgccatgttgacgctgccagaggatgtggccaggatgtaccgggatgacatcactgtcatggtggtgttttttaactcagaatcaattgatacctattttaaggagggttaagagtctcaccctgttgccaaggctaactcgaatgccctttatttagaacatttccactcattccttagtgagcaatccaaaccttagtaaagaacaggcagacataggttgctgagtaattccggaattc

SEQ ID NO: 963 - protein, 530 aa, Rattus norvegicus
  ref <308>: DATABASE ACCESSION NUMBER: SWISS-Prot / O88484
  ref <309>: DATABASE ENTRY DATE: 2001-10-16
MSSTASYRIFNFARNRIAVLRGGRRLYSRAATSRNQVKWRLFSPASLAVNDSSPHGGFALRKAYRHTSTEEEDFHLQLSPEQVSDLLRAGESSHKVLDFNSGVPNSVLRFESNQLAANSPVEDRQGVASCVQTRGTVFGIFDGHGGHACAQAVSERLFYYMAVSLMSHKTLEQMEEAMENMKPLLPILQWLKHPGDSIYKDITSVHLDHLRVYWQELLDLHMETGLSTEEALMYSFQRLDSDISLEIQAPLEDEVTKNLSLQVAFSGATACMAHVDGVHLHIANAGDCRAILGVQGDNGAWSCLPLTCDHNAWNEAELSRLKREHPESEDRTLIIDDRLLGVLLPCRAFGDVQLKWSKELQRNVLERGFDTEALNIYQFTPPHYHTPPYLTAKPEVTYHRLRPQDKFLVLASDGLWDMLDNEDVVRLVVGHLSKVGHQKPALDQRPANLGHMQSLLLQRKASGLHAADQNAATHLIRHAIGSNEYGEMEPERLAAMLTLPEDVARMYRDDITVMVVFFNSESIDTYFKEG

SEQ ID NO: 964 - DNA, 3830 bp, Homo sapiens
  ref <308>: DATABASE ACCESSION NUMBER: EMBL / AB037769
  ref <309>: DATABASE ENTRY DATE: 2000-03-14
gactagggaccgcctgggtgaggtgaggacctggtggccgcagttgtggcactgtgcgcaggcgctgaactgaccggacggagcgggcggctgtggcctcgccagctggtttaaaaatatccttttttgctgaaggaacacatttgctggtatagtttcagaatgtcaagtactgtgtcctactggatcttaaattctacaaggaacagcattgccacattgcaagggggtagacgcttatactccaggtatgtctcaaataggaataaattaaaatggaggctcttttcccgggtgccacccaccctaaacagttccccatgtggtggctttactctgtgcaaagcctacagacacacatcaacagaggaagatgattttcacttgcaactcagccctgagcagataaatgaagtgcttcgagctggcgagacaacccacaagattcttgaccttgaaagcagagtcccaaattcagtgttgcggtttgagagcaaccagctggctgccaattccccagtggaggaccggcgaggtgtagcctcctgcctgcaaaccaatggactgatgtttggcatcttcgatggacatggtggtcatgcatgtgcccaagcagtgagcgagaggctcttctactatgtggcagtgtccctgatgtcccaccagaccctggagcacatggagggagctatggaaagcatgaaacccttgctgcccatcctgcattggctcaagcacccaggggacagtatctacaaggatgtcacatctgtgcatcttgaccacctccgtgtctattggcaggaactgcttgatttgcacatggaaatgggactaagcattgaagaagcattaatgtactccttccagagactggattctgacatctcgctggaaatccaggcccccctggaagatgaggtgacaaggaacctgtcactccaggttgctttctctggggcaacagcttgcatggcccatgttgatggaattcacttgcacgtggcaaatgctggtgactgccgagccatccttggtgtccaagaggacaatggcatgtggtcttgtctgccccttacacgtgaccacaatgcctggaaccaggccgagctgtcccggctaaagagggagcaccctgagtcagaggacaggacgatcatcatggaggacaggctactgggcgtcctcatcccctgcagggcctttggggatgttcagctgaagtggagtaaagagttgcagcgcagcattctggagaggggcttcaataccgaggccctcaacatttaccagttcacacccccacactactacactccaccctacctgactgctgagcctgaggtcacataccacaggctgaggccccaggataagttccttgtgctggcctcagatggcctgtgggacatgctgagcaatgaggacgtggtaaggctggtggtggggcacctggctgaggcagattggcacaagacagacctggcccagagacccgccaacttggggctcatgcagagcctgctgctgcagaggaaagccagcgggctccacgaggctgaccaaaatgcagccacgcggctgatcagacatgccatcgggaacaatgagtatggggagatggaggcagagcggctggcggcgatgctgacattgccagaggacttggcgaggatgtacagggatgatatcactgtcactgtggtgtattttaactcagaatcaatcggtgcatattacaaggggggttaagaatctcccatcctattgtcaaggttaacataaatgctcttctaaaatgtttcacttactcctaaactagctatccaaaccttactattaaaagcgcaggcagatttaatttgctaaatagactaacaggaggaaaaaaacaaacagcctagctttaaaaaacagtgaaatagcagtgatttcatgtccctgtatgttctgattaagtcttatatgcagagaggacagagcataaagtctatagaattggcttgggcttgtgtagccccagtcatttgataaagatgttgttaaactgtgtcagcctgagccttcaaagggtaaatttaatcatgattctgagaataaagaacttcaggagcttcttaggtcttgccacaaaaatctgcaaatttgataattctcctgaattcacaatcatggacttgtagactatgaagagatattttatttgtttgtcttttatttaaattactaaggtctaggtttacaaagcatactacaggacccttttctatgcaatatcctaacttttttttttgtgattatgcttgtgagaaattttgtaatactacattctagttctgttttcgtttattttaaaactgaatccttaaacttgcaaacacgcctactgtaagcatgcttggaatgacttgttttggttttcagctgataggatctatgcctctggaccagctgaacttactggtgcagctttttgtgccctctactgagtcccattccagaaactttgagccatgctaggaggtaactagtctatgccttaactcctgacctttcctgcattagtaaaatttcctcctgggctgagcctttgggggttgattcacagcatttaagctttctgattatacctctcaaacattcttctgtcaattccacacaatccttctacctctgctatgctgaacccctcattcaccctgcacctgccaactgcaaaatattgtctgaaagaatctttcacatgttcctgcttcctatggctgcaggaaaggagaaaatgtgattgcatgtggtagttgtggtgatagacgtttagacaggacaggttaatttagcggattgtggacttaagattcaacctctatctggagaggtgaaaacacaaaggcttaaggacaacagtttctaaccaagtttctctgaatcctttcctgagaggtggtgggcaggagggaggagtgagacttatcagatgggacgcttgccccaagactgtgggataaaccaccattgctagtcctcaggaattagaccatatttagtataggagttggggcaaaaataaaagtgtaatttgtaatggtttctgtgggctgtagactctttgtatttacttggaaattcagttatgtggatccattttggagatgaatttcatctcatgagttgctgtggcatttaaacaacaggaaatgtgtccctaaatggaaacaaatataatcccacaaaaccaacaattttatttgcctctactacgtcaggcagaattcttcaattaagttgaactacatttgttgatcccttttctcatcttacccctttatgccacctactgaaaagaaaaacaaatagctaggtttggtttcctgttttttgtctatgtcccagctgacattcagtcaaatgttgggatacttctaatttggtggtgtttctttgtacatttttcagtgcaactgtttagtcatgtgttttcatctaagaaattatcttttgaatatttaagccttgatccttttattctgaaaccattaatattccttcttggctgggtgcagtggtttacgcctgtaatcccagcactgtgggaggccgaggcggatggatcacctgaggtcgggaattcgagaccagcctgaccaacatggagaaactccatctctactaaaaatacaaaattagccaggtgtggtggtgcatgcctgtaatcccagctactcgggaggctgaggcaggaaaatcacttgaacccgggaggcggaggttgcggtgagccaagatcgcaccattgcactccagcctgggcaacaagagtgaaactctgtctc

SEQ ID NO: 965 - protein, 529 aa, Homo sapiens
  ref <308>: DATABASE ACCESSION NUMBER: SWISS-Prot / Q9P2J9
  ref <309>: DATABASE ENTRY DATE: 2002-06-15
MSSTVSYWILNSTRNSIATLQGGRRLYSRYVSNRNKLKWRLFSRVPPTLNSSPCGGFTLCKAYRHTSTEEDDFHLQLSPEQINEVLRAGETTHKILDLESRVPNSVLRFESNQLAANSPVEDRRGVASCLQTNGLMFGIFDGHGGHACAQAVSERLFYYVAVSLMSHQTLEHMEGAMESMKPLLPILHWLKHPGDSIYKDVTSVHLDHLRVYWQELLDLHMEMGLSIEEALMYSFQRLDSDISLEIQAPLEDEVTRNLSLQVAFSGATACMAHVDGIHLHVANAGDCRAILGVQEDNGMWSCLPLTRDHNAWNQAELSRLKREHPESEDRTIIMEDRLLGVLIPCRAFGDVQLKWSKELQRSILERGFNTEALNIYQFTPPHYYTPPYLTAEPEVTYHRLRPQDKFLVLASDGLWDMLSNEDVVRLVVGHLAEADWHKTDLAQRPANLGLMQSLLLQRKASGLHEADQNAATRLIRHAIGNNEYGEMEAERLAAMLTLPEDLARMYRDDITVTVVYFNSESIGAYYKGG

SEQ ID NO: 966 - DNA, 5602 bp, Rattus norvegicus
  misc_feature (1)..(5602): n=a, c, g or t
  ref <308>: DATABASE ACCESSION NUMBER: EMBL / AF063102
  ref <309>: DATABASE ENTRY DATE: 2000-03-03
gaaaatatttaaagggatcaataatggtgtcttctggttgcagaatgcgaagtctctggtttatcatgataatcagtttctcaccgaataccgaaggtttcagcagagcagccttgccattcgggttagttagacgagagctgtcctgtgaaggttattctatagacctgcgatgtccgggcagtgacgtcatcatgatcgagagcgcaaactacggtcggacggacgacaagatctgcgacgcagacccctttcagatggagaacacagactgctacctccctgatgccttcaaaatcatgactcaaaggtgcaacaaccgaacacagtgtgtagtagttaccgggtcagatgtatttcctgatccatgtcccggaacttacaaataccttgaagttcaatatgaatgtgtcccttacatggagcaaaaagtntttgtgtgtcctggaaccttgaaagcaattgtggactctccaagtatctatgaagctgagcaaaaggcaggtgcttggtgcaaggacccccttcaggctgcagataaaatttattttatgccctggactccctaccgcaccgataccttaatagaatatgcttctttagaagattttcaaaacagccgccagacaacaacatacaaacttccaaaccgagtggacggtactggatttgtggtgtatgacggggcagtcttcttcaacaaagaaagaacgagaaacattgttaaatttgacttgaggactagaatcaagagtggggaggccataatcaactacgccaactaccatgacacctcaccctacagatggggggggaagactgacattgacctggcagtggatgaaaatggcttgtgggtcatctacgccaccgagcagaacaacggaatgatcgtgattagccagctcaatccgtacactctccgattcgaagcaacctgggagacgacgtatgacaagcgtgcggcgtccaatgctttcatgatatgcggggtcctctacgtggtcaggtcagtgtaccaagacaatgaaagcgaagctggcaagaacgtcatcgactacatttacaacacaaggttgagccggggagagcacgtggacgttcccttccccaaccagtaccagtacatcgctgcagtggattacaacccaagagacaaccaactctacgtatggaacaataactttatcttacggtattctctggagtttggtccacccgaccctgcccaagtgcctaccacagctgtgacaataacttcttcagctgagctgttcaaaaccacagtgtcaaccacaagcagtacttcacagagaggccccgtgagcagcacagtcgctggtcctcaggaaggaagccgagggacaaagccacctccagcagtctctacaaccaaaattcctcctgtaacaaatatttttcccctgccagagagattctgcgaagcgttagaaatgaaggggataaagtggcctcagacacaaagggggatgatggttgagcgaccgtgtcccaagggaacaagaggaacggcctcgtatctctgcatggcttccacaggaacctggaacccgaagggcccggatcttagcaactgcacctctcactgggtgaatcagctggcccagaagatcagaagtggagagaatgctgcaagtctggccaacgaactggctaagcacaccaaggggacggtgttcgctggggatgtgagctcctctgtgaggctgatggaacagttggtggacatcctggatgcccagctgcaggagctgaaaccgagcgagaaggactcggccgggaggagttataacaagctccaaaaacgagagaagacatgcagggcttaccttaaggccattgtggacacagtagataaccttctgagagccgagactttggactgctggaaacacatgaattcctcagagcaggcgcacacagccaccatgctgttggacaccttggaagaaggagcatttgtcctggcagacaaccttttggaaccaacccgggtctcaatgccaacggataatattgttctagaagtcgctgtcctcagcacggaaggacaggtccaagacttcaccttccatctcggcttcaagggggccttcagctccatccagctctcagccaacaccgtcaagcaaaacagcagaaacgggctggcaaaggtggtattcatcatttaccggagtctgggaccattcctgagcaccgaaaatgcgaccgtcaaactgggcgcagacctcctgggtcggaacagcaccatcgcagtgaactcgcacgtcctttcagtctccatcaataaggagtccagccgtgtgtacttgacagacccggtgcttttttcaatgccacacattgattctgacaattatttcaacgcaaactgctccttctggaactactcagagagaaccatgatgggatattggtctacccagggctgcaagctggttgacactaataaaactcgcacgacgtgtgcatgcagccacctaaccaattttgctattctcatggcccacagggaaattgtgtacaaagatggcgtccacaaattgctgctgacagtcatcacctgggtgggcatcgttgtctccctcgtctgcctggctatctgcatcttcaccttctgcttcttccgaggcctgcaaagcgaccgcaacacgatccacaagaacctgtgtatcaacctcttcatcgctgagtttattttcctaataggcattgataaaacacagtacacgattgcgtgccccgtgtttgcaggactcctgcactttttcttcctggctgctttttcctggatgtgcctagaaggtgtgcagctctacctcatgttggttgaagttttcgagagtgaatactcaaggaagaagtattactatgtcgccgggtacctcttccctgccacagtggtcggtgtttcagctgctatcgactccaagagttacgggacactagaggcttgctggcttcacgttgataactatttcatatggagtttcattgggcctgttactttcatcattctgctaaatattattttcctggtgatcacgctgtgcaaaatggtgaaacattcaaacactttgaaaccagattctagcaggttggaaaacattaataattaccgtgtttgtgatggatactataatacggacttacctggctatgaagataataagccatttatcaagtcttgggtgctcggtgcgttcgccctgctgtgtctcctgggcctaacctggtcctttgggttgctttttgttaacgaggagaccgttgtcatggcttatctcttcaccgcctttaatgctttccagggactgtttattttcatcttccactgtgctcttcaaaagaaagtacggaaagagtatgccaagtgcttcagacactggtactgctgtggcggcctcccgaccgagagcccgcacagctctgtaaaggcgtccacctcccgcaccagtgctcgctactcctctggtacacagagccgtataagaaggatgtggaatgacaccgtgaggaagcagtctgaatcgtcttttatctcaggtgacatcaatagcacttctacccttaatcaaggaatgactggcaattacctactaacaaaccctcttcttcgaccccacggcactaacaacccctataacacattgctcgctgaaacagttgtatgtaatgccccttcagcgcccgtgtttaactcaccaggacattcactgaacaatacccgggacaccagcgccatggatactctaccgctaaatggtaacttcaacaacagctactccctgcgcaaggccgactaccacgacggcgtgcaggttgtggactgtggactaagtctgaacgacaccgcgtttgagaaaatgatcatttcagagttagtgcacaacaacctccggggtagcaacaaaacccacaacttggagctcaagctcccagttaaacccgtgattggcggcagcagcagcgaagatgacgcgatcgtggccgacgcctcatctttgatgcacggtgataacccagggctggaattccgccacaaagagctggaggcaccgctcatccctcagcggactcactcgcttctgtaccaaccccagaaaaaagtgaaacccgaggcaaccgacagctacgtctcccagctgacggccgaggccgacgagcacctccagtcccccaacagagactctctgtacacgagcatgcccaacctaagagactctccctacccggagagcagcccggacatggcagaggacctgtctccctccaggaggagcgagaacgaggacatttactacaaaagtatgcccaatcttggggctggccgccagctccagatgtgctaccagatcagcagaggcaatagcgatggctacatcatccccattaacaaagaagggtgcatcccagagggggacgtcagggaaggacagatgcagctggtaacaagtctttaatagtacagctaaggaattcctagggccacatgcaagtattaactgctaaagactgtgccagccggccctgcagctctccccaactcggccagtagaaccggctctgctggccggcggttctccactgtaggaaaaaaaaatggactgaacctcgcggttctgtgaatttttataaaacatgcaaaaactttgtatatacacagagtatactaaattgaattatttgttacaaagaaaaaagaaatgccaaccaggtattttacgtttctgctgctgtgtagagagattgtaaaacaaacaggagaccctcccagccatgatcccgcggcagttggtgaactgagtctgtaaatagaaccctaccgttttgggttttttttgtttgtttgtttgtttttgtttttgttttgtaggcctgcattgtattatatacaagacgtaggctttaagatcctgtgggacaaattgactgtatcttacttttcctgacaagacttggaaaagcaggagagagattctgcacccgtttgcacttccctgcaaaccttttacattaaggcagccaccgaaaccatgtttaaccagtagcaatcaagccacaggccttatctcatgtttcctcaactgtacaatgaactgttctcatgaagaaaaaaaaagttaatggctaaagaaaattatattttgttctattgctagggtaaaaataaatacatttgtgtccaactgagatatcattaaaataattttaaaaagagtttggagaaaatatcgtgtcaagctcttggttgcacaaaataggcgatgtctcttctcccacccaccatggtgagtttgtgcccctctttgttggttcccactgtagacggtgtctgctctgaccgcttagccccctttcttacacttaaatttcttattgccaaaagagtgtgttttatggggagaaaactctttgaagtcctgccatgccttgcacaaatgtggggaaatctggaggtcttgagtcaaccctctgtttattctggaacagagggcgaaggggtcactgggcacttctcacaaactttctagtgaacaaaaggtgcctattcttttataaaaaaaaaaaaaaaaaa

SEQ ID NO: 967 - protein, 1488 aa, Rattus norvegicus
  misc_feature (1)..(1488): Xaa=Unknown amino acid
MVSSGCRMRSLWFIMIISFSPNTEGFSRAALPFGLVRRELSCEGYSIDLRCPGSDVIMIESANYGRTDDKICDADPFQMENTDCYLPDAFKIMTQRCNNRTQCVVVTGSDVFPDPCPGTYKYLEVQYECVPYMEQKVFVCPGTLKAIVDSPSIYEAEQKAGAWCKDPLQAADKIYFMPWTPYRTDTLIEYASLEDFQNSRQTTTYKLPNRVDGTGFVVYDGAVFFNKERTRNIVKFDLRTRIKSGEAIINYANYHDTSPYRWGGKTDIDLAVDENGLWVIYATEQNNGMIVISQLNPYTLRFEATWETTYDKRAASNAFMICGVLYVVRSVYQDNESEAGKNVIDYIYNTRLSRGEHVDVPFPNQYQYIAAVDYNPRDNQLYVWNNNFILRYSLEFGPPDPAQVPTTAVTITSSAELFKTTVSTTSSTSQRGPVSSTVAGPQEGSRGTKPPPAVSTTKIPPVTNIFPLPERFCEALEMKGIKWPQTQRGMMVERPCPKGTRGTASYLCMASTGTWNPKGPDLSNCTSHWVNQLAQKIRSGENAASLANELAKHTKGTVFAGDVSSSVRLMEQLVDILDAQLQELKPSEKDSAGRSYNKLQKREKTCRAYLKAIVDTVDNLLRAETLDCWKHMNSSEQAHTATMLLDTLEEGAFVLADNLLEPTRVSMPTDNIVLEVAVLSTEGQVQDFTFHLGFKGAFSSIQLSANTVKQNSRNGLAKVVFIIYRSLGPFLSTENATVKLGADLLGRNSTIAVNSHVLSVSINKESSRVYLTDPVLFSMPHIDSDNYFNANCSFWNYSERTMMGYWSTQGCKLVDTNKTRTTCACSHLTNFAILMAHREIVYKDGVHKLLLTVITWVGIVVSLVCLAICIFTFCFFRGLQSDRNTIHKNLCINLFIAEFIFLIGIDKTQYTIACPVFAGLLHFFFLAAFSWMCLEGVQLYLMLVEVFESEYSRKKYYYVAGYLFPATVVGVSAAIDSKSYGTLEACWLHVDNYFIWSFIGPVTFIILLNIIFLVITLCKMVKHSNTLKPDSSRLENINNYRVCDGYYNTDLPGYEDNKPFIKSWVLGAFALLCLLGLTWSFGLLFVNEETVVMAYLFTAFNAFQGLFIFIFHCALQKKVRKEYAKCFRHWYCCGGLPTESPHSSVKASTSRTSARYSSGTQSRIRRMWNDTVRKQSESSFISGDINSTSTLNQGMTGNYLLTNPLLRPHGTNNPYNTLLAETVVCNAPSAPVFNSPGHSLNNTRDTSAMDTLPLNGNFNNSYSLRKADYHDGVQVVDCGLSLNDTAFEKMIISELVHNNLRGSNKTHNLELKLPVKPVIGGSSSEDDAIVADASSLMHGDNPGLEFRHKELEAPLIPQRTHSLLYQPQKKVKPEATDSYVSQLTAEADEHLQSPNRDSLYTSMPNLRDSPYPESSPDMAEDLSPSRRSENEDIYYKSMPNLGAGRQLQMCYQISRGNSDGYIIPINKEGCIPEGDVREGQMQLVTSLX

SEQ ID NO: 968 - DNA, 172 bp, Homo sapiens
  ref <308>: DATABASE ACCESSION NUMBER: EMBL / AW238191
  ref <309>: DATABASE ENTRY DATE: 1999-12-15
gcgtcgacaaacatgcaaaaactttgtatatacacagagtatactaaattgaattatttgttacaaagaaaaaagaaatgccaaccaggtattttacgtttctgctgctgtgtagagagattgtaaaacaaacaagagaccctccctcccgtcgacgcgaccgcggtcgacg

SEQ ID NO: 969 - protein, 1021 aa, Homo sapiens
  ref <308>: DATABASE ACCESSION NUMBER: SWISS-Prot / BAA34506
  ref <309>: DATABASE ENTRY DATE: 2003-02-01
EGSKGTKPPPAVSTTKIPPITNIFPLPERFCEALDSKGIKWPQTQRGMMVERPCPKGTRGTASYLCMISTGTWNPKGPDLSNCTSHWVNQLAQKIRSGENAASLANELAKHTKGPVFAGDVSSSVRLMEQLVDILDAQLQELKPSEKDSAGRSYNKLQKREKTCRAYLKAIVDTVDNLLRPEALESWKHMNSSEQAHTATMLLDTLEEGAFVLADNLLEPTRVSMPTENIVLEVAVLSTEGQIQDFKFPLGIKGAGSSIQLSANTVKQNSRNGLAKLVFIIYRSLGQFLSTENATIKLGADFIGRNSTIAVNSHVISVSINKESSRVYLTDPVLFTLPHIDPDNYFNANCSFWNYSERTMMGYWSTQGCKLVDTNKTRTTCACSHLTNFAILMAHREIAYKDGVHELLLTVITWVGIVISLVCLAICIFTFCFFRGLQSDRNTIHKNLCINLFIAEFIFLIGIDKTKYAIACPIFAGLLHFFFLAAFAWMCLEGVQLYLMLVEVFESEYSRKKYYYVAGYLFPATVVGVSAAIDYKSYGTEKACWLHVDNYFIWSFIGPVTFIILLNIIFLVITLCKMVKHSNTLKPDSSRLENIKSWVLGAFALLCLLGLTWSFGLLFINEETIVMAYLFTIFNAFQGVFIFIFHCALQKKVRKEYGKCFRHSYCCGGLPTESPHSSVKASTTRTSARYSSGTQSRIRRMWNDTVRKQSESSFISGDINSTSTLNQGMTGNYLLTNPLLRPHGTNNPYNTLLAETVVCNAPSAPVFNSPGHSLNNARDTSAMDTLPLNGNFNNSYSLHKGDYNDSVQVVDCGLSLNDTAFEKMIISELVHNNLRGSSKTHNLELTLPVKPVIGGSSSEDDAIVADASSLMHSDNPGLELHHKELEAPLIPQRTHSLLYQPQKKVKSEGTDSYVSQLTAEAEDHLQSPNRDSLYTSMPNLRDSPYPESSPDMEEDLSPSRRSENEDIYYKSMPNLGAGHQLQMCYQISRGNSDGYIIPINKEGCIPEGDVREGQMQLVTSL

SEQ ID NO: 970 - DNA, 5602 bp, Rattus norvegicus; identical to SEQ ID NO: 966
  misc_feature (1)..(5602): n=a, c, g or t
  ref <308>: DATABASE ACCESSION NUMBER: EMBL / AF063102
  ref <309>: DATABASE ENTRY DATE: 2000-03-03

SEQ ID NO: 971 - protein, 1488 aa, Rattus norvegicus; identical to SEQ ID NO: 967
  misc_feature (1)..(1488): Xaa=Unknown amino acid

SEQ ID NO: 972 - DNA, 172 bp, Homo sapiens; identical to SEQ ID NO: 968
  ref <308>: DATABASE ACCESSION NUMBER: EMBL / AW238191
  ref <309>: DATABASE ENTRY DATE: 1999-12-15

SEQ ID NO: 973 - protein, 1021 aa, Homo sapiens; identical to SEQ ID NO: 969
  ref <308>: DATABASE ACCESSION NUMBER: SWISS-Prot / BAA34506
  ref <309>: DATABASE ENTRY DATE: 2003-02-01

SEQ ID NO: 974 - DNA, 5602 bp, Rattus norvegicus; identical to SEQ ID NO: 966
  misc_feature (1)..(5602): n=a, c, g or t
  ref <308>: DATABASE ACCESSION NUMBER: EMBL / AF063102
  ref <309>: DATABASE ENTRY DATE: 2000-03-03

SEQ ID NO: 975 - protein, 1488 aa, Rattus norvegicus; identical to SEQ ID NO: 967
  misc_feature (1)..(1488): Xaa=Unknown amino acid

SEQ ID NO: 976 - DNA, 172 bp, Homo sapiens; identical to SEQ ID NO: 968
  ref <308>: DATABASE ACCESSION NUMBER: EMBL / AW238191
  ref <309>: DATABASE ENTRY DATE: 1999-12-15

SEQ ID NO: 977 - protein, 1021 aa, Homo sapiens; identical to SEQ ID NO: 969
  ref <308>: DATABASE ACCESSION NUMBER: SWISS-Prot / BAA34506
  ref <309>: DATABASE ENTRY DATE: 2003-02-01

SEQ ID NO: 978 - DNA, 5602 bp, Rattus norvegicus; identical to SEQ ID NO: 966
  misc_feature (1)..(5602): n=a, c, g or t
  ref <308>: DATABASE ACCESSION NUMBER: EMBL / AF063102
  ref <309>: DATABASE ENTRY DATE: 2000-03-03

SEQ ID NO: 979 - protein, 1488 aa, Rattus norvegicus; identical to SEQ ID NO: 967
  misc_feature (1)..(1488): Xaa=Unknown amino acid

SEQ ID NO: 980 - DNA, 172 bp, Homo sapiens; identical to SEQ ID NO: 968
  ref <308>: DATABASE ACCESSION NUMBER: EMBL / AW238191
  ref <309>: DATABASE ENTRY DATE: 1999-12-15

SEQ ID NO: 981 - protein, 1021 aa, Homo sapiens; identical to SEQ ID NO: 969
  ref <308>: DATABASE ACCESSION NUMBER: SWISS-Prot / BAA34506
  ref <309>: DATABASE ENTRY DATE: 2003-02-01

SEQ ID NO: 982 - DNA, 5413 bp, Rattus norvegicus
  misc_feature (1)..(5413): n=a, c, g or t
  ref <308>: DATABASE ACCESSION NUMBER: EMBL / AF063103
  ref <309>: DATABASE ENTRY DATE: 2000-03-03
aatcattgatattggaatacagaagaggagccagaagtatactgatttggcttcacctcagaacagccattcttgaggcattctcctccgagaacacagccatgtgtccacctcagctgttcatcctcatgatgcttttagcacctgtagttcatggtggcaagcacaatgagagacatccagccctcgctgctccactgcgacatgctgagcacagcccaggaggccctctccctcccagacatcttcttcagcagccagctgcagagcgctctacagctcatcgaggacaagggccacgtggaactgccagaggagttcgcggacccggtgccccaggagcacagattgcagcccaagctttcagccgtgccccaattcccatggcagtggtccgcagagagctctcctgtgagagctaccccattgagctacgctgtccaggcacagacgtcatcatgatcgaaagcgccaactacgggaggacagatgacaagatctgtgactcggaccctgctcagatggagaatattcggtgttatctgccagatgcctataagattatgtctcaaagatgcaataacagaacccagtgtgcagtggtggcaggtcctgatgtatttccagacccatgtccgggaacatataaataccttgaagtgcagtatgaatgtgtcccttacaaagtggaacaaaaagtttttctttgtcccggactgctcaaaggagtgtaccagagcgaacacttgtttgaatctgaccaccaatctggggcatggtgcaaagaccctctacaggcttctgacaagatttactatatgccctggactccctacagaaccgataccctgacagagtattcatccaaagatgacttcattgctggaaggccgacaactacatacaagctccctcacagagtggatggtactggatttgtagtatatgatggtgccctgttcttcaacaaggagcgtacaaggaacatagtaaagtttgatttgaggactaggataaagagtggagaggcaatcatagcaaatgctaactaccatgatacctccccataccgatggggtggcaagtccgacatagacttggcagtggatgaaaacggattatgggtaatctatgcaacagaacagaacaatggcaaaattgttattagccagttgaacccttacaccctacggattgaggggacatgggacactgcctatgataaaaggtctgcttccaatgcatttatgatttgtgggattctgtatgtggtcaagtctgtatatgaggatgacgacaatgaggccaccggtaataagattgactacatttacaatactgaccaaagcaaggatagcctggtggatgtaccctttcccaactcataccagtacatagcagccgtggactacaatcccagggacaatctgctgtacgtgtggaacaactaccatgttgtcaaatactccttggacttcgggcctctggatagcagatcagggccagtgcatcatggacaagtttcctacatctctccaccgattcaccttgactctgacctggaaaggccccctgtcagagggatttctaccacaggacccctgggtatgggaagcacgaccaccagcaccaccctccggactaccacctggaacctagggaggagtacaacgccatccttgcctggcagaagaaaccgcagtaccagtacgccgtccccagcgattgaggtgctggatgttaccacacacctgccatctgcagcctcccaaatcccagcgatggaagagagctgcgaggctgtggaagcccgagagatcatgtggtttaagacccgacaggggcaagtagcaaagcagtcatgcccagcaggaaccataggtgtatcaacttacctgtgtcttgctcctgatggaatatgggatccccaaggaccagatctcagcaactgctcttctccttgggtcaatcacataacacagaagctgaaatctggagaaacagctgccaatattgccagagagctagcagaacagaccagaaatcatttgaacgccggggatatcacctactcagttcgtgccatggaccaactggttggcctcctggacgtacagctcaggaatttgacaccaggggggaaggacagtgctgcccgaagcttgaacaagcttcagaaaagagagcgctcttgcagagcctatgtccaggcgatggtggagacagttaacaatctccttcagccacaagctctgaatgcgtggagggacctgacgacaagtgatcaactacgcgcagccaccatgttgctcgacactgtggaggagagtgctttcgtgttagccgataaccttttgaagaccgacattgtcagggagaatacagacaatattcagttggaggttgcaaggctgagcacggaaggaaacctagaagatctaaaatttccagaaaacacgggccacggaagcactatacagctttccgcaaacacgttaaagcaaaatggccggaatggagagattagagtggcctttgtcctgtataacaacctgggtccttatttatctacggagaatgccagtatgaagttgggcacagaagctatgtccacaaatcactcagttatcgtcaattcccctgttattacagcagcaataaataaggaattcagtaataaagtgtatttggctgatcctgtggtatttactgttaaacatatcaagcagtcagaggaaaatttcaaccctaactgttcattttggagctattccaagcgcacaatgacaggttattggtcaacacaaggctgtcgactcctgacaacgaacaagacacacactacgtgctcctgtaaccacctcaccaacttcgcagtattaatggcacatgtggaagttaagcacagcgatgccgtccacgatcttcttctggatgtgatcacgtgggtcggaatcctgttgtctcttgtttgtctcctgatctgcatcttcacattctgcttcttccgtgggcttcagagcgaccgtaacaccattcacaagaacctgtgcatcagcctgtttgtggcagaactgctcttcctgattgggatcaacagaaccgaccaaccgattgcctgtgcagtgtttgcggctcttttgcatttcttcttcttggcggccttcacctggatgtttctagaaggggtacagctgtatatcatgctggtggaggtctttgagagtgagcattcccgtaggaagtacttctatctggttggctacgggatgcccgcactcatcgtggccgtttctgctgcagtcgactacaggagctatggaacagacaaagtatgttggcttcgccttgacacctacttcatttggagttttataggaccagcgaccttgataattatgctgaatgtaatcttcctcgggattgctttatacaaaatgtttcaccatactgccatactgaaacctgaatcaggctgtcttgataatatcaactatgaggataacagacccttcatcaagtcatgggttataggtgcaatagcgctgctctgcctattaggattgacctgggcctttggactcatgtatattaatgaaagcacagtcatcatggcgtatctcttcaccattttcaattctctacaggggatgtttatattcattttccactgtgtcctacagaagaaggtacggaaagagtatgggaaatgcctacggacgcattgctgtagtgggaaaagcacggagagttcgattggctcagggaaaacatctggttctcgaactccaggacggtattccacaggctcacagagccggattcggagaatgtggaatgacaccgtccgaaagcagtcagagtcatccttcatcactggagacataaacagctcagcgtcgctcaacagaggatcctatcttccctgcattcaggcgtgtgtaacatatttagaggggcttctgaacaatgccagggatacaagtgtcatggatactctaccactgaatggtaaccatggcaacagttacagcattgctggcggcgaatacctgagcaactgtgtgcaaattatagaccgtggctataaccacaacgagaccgccctagaaaaaaagatcctaaaggaactcacttccaactatatcccttcatacctgaacaaccacgagcgctccagcgaacagaaccggaacatgatgaacaaactggtggacaacttaggcagtgggagtgaagatgacgccatagtcctggatgacgcagcgtcctttaaccacgaggagagtctgggcctggaactcattcacgaggaatcggatgctcccttgctgcccccgagggtttactccaccgataaccaccagccacaccattacagcaggaggcggctcccccaggaccacagcgagagcttcttccctctgctaaccgacgagcacacagaagacccgcagtcaccgcacagggactctctgtacaccagcatgccggccctggccggtgtgcccgctgcagacagtgtgaccaccagcacccagaccgaagccgcagcggccaagggtggtgacgccgaagatgtttactacaaaagcatgccaaacctgggctccagaaaccatgtgcacccgctgcacgcctactaccagctagggcgaggcagcagcgatggattcatagttcctcccaataaagatggggcctctccggaggggacttccaaaggaccggcgcacttggtcactagtctatagaaggtgacacggggatgacaaccaacgggacagctaacacccggtggcccattctgagtcgatataagcagtggtcatcgtgtgtaacacgtgtgtgacatctgatgctgatctcaaaagagagactctgacatttggttttttttttttttttttaacttgaatttttaggtcagcgcaggggagaaagctccccctgtgccccagtctttcccgtctttcccctcagatggacacttcattatgttaatgaacgagataagatgaaaatggcgctcattgtggccctgttgagttaggttgtgattaacagctctgatgctctgttactagaatcacgaggacctgatttttctttcttttttttttttttaaaaaaaaagaggccggaactattgtttggaattagtaacaatgctgcatctagattggagtgctgcccagccgtagaagcagagcagaactgtatcccatancggtgcgcggtcactcgcaacctgagttcaccacagcgagcatagctgtgaaaagcaaaagcaaaacaacagaattaataatctgacggtggggaattctagaattatatgctaaatgcatattttatgatttgctgtattaactgatgataaaactaatggcagaaaaaaaaaaaaaaaaaa

SEQ ID NO: 983 - protein, 1550 aa, Rattus norvegicus
  ref <308>: DATABASE ACCESSION NUMBER: SWISS-Prot / AAC77816
  ref <309>: DATABASE ENTRY DATE: 2003-02-01
MCPPQLFILMMLLAPVVHGGKHNERHPALAAPLRHAEHSPGGPLPPRHLLQQPAAERSTAHRGQGPRGTARGVRGPGAPGAQIAAQAFSRAPIPMAVVRRELSCESYPIELRCPGTDVIMIESANYGRTDDKICDSDPAQMENIRCYLPDAYKIMSQRCNNRTQCAVVAGPDVFPDPCPGTYKYLEVQYECVPYKVEQKVFLCPGLLKGVYQSEHLFESDHQSGAWCKDPLQASDKIYYMPWTPYRTDTLTEYSSKDDFIAGRPTTTYKLPHRVDGTGFVVYDGALFFNKERTRNIVKFDLRTRIKSGEAIIANANYHDTSPYRWGGKSDIDLAVDENGLWVIYATEQNNGKIVISQLNPYTLRIEGTWDTAYDKRSASNAFMICGILYVVKSVYEDDDNEATGNKIDYIYNTDQSKDSLVDVPFPNSYQYIAAVDYNPRDNLLYVWNNYHVVKYSLDFGPLDSRSGPVHHGQVSYISPPIHLDSDLERPPVRGISTTGPLGMGSTTTSTTLRTTTWNLGRSTTPSLPGRRNRSTSTPSPAIEVLDVTTHLPSAASQIPAMEESCEAVEAREIMWFKTRQGQVAKQSCPAGTIGVSTYLCLAPDGIWDPQGPDLSNCSSPWVNHITQKLKSGETAANIARELAEQTRNHLNAGDITYSVRAMDQLVGLLDVQLRNLTPGGKDSAARSLNKLQKRERSCRAYVQAMVETVNNLLQPQALNAWRDLTTSDQLRAATMLLDTVEESAFVLADNLLKTDIVRENTDNIQLEVARLSTEGNLEDLKFPENTGHGSTIQLSANTLKQNGRNGEIRVAFVLYNNLGPYLSTENASMKLGTEAMSTNHSVIVNSPVITAAINKEFSNKVYLADPVVFTVKHIKQSEENFNPNCSFWSYSKRTMTGYWSTQGCRLLTTNKTHTTCSCNHLTNFAVLMAHVEVKHSDAVHDLLLDVITWVGILLSLVCLLICIFTFCFFRGLQSDRNTIHKNLCISLFVAELLFLIGINRTDQPIACAVFAALLHFFFLAAFTWMFLEGVQLYIMLVEVFESEHSRRKYFYLVGYGMPALIVAVSAAVDYRSYGTDKVCWLRLDTYFIWSFIGPATLIIMLNVIFLGIALYKMFHHTAILKPESGCLDNINYEDNRPFIKSWVIGAIALLCLLGLTWAFGLMYINESTVIMAYLFTIFNSLQGMFIFIFHCVLQKKVRKEYGKCLRTHCCSGKSTESSIGSGKTSGSRTPGRYSTGSQSRIRRMWNDTVRKQSESSFITGDINSSASLNRGSYLPCIQACVTYLEGLLNNARDTSVMDTLPLNGNHGNSYSIAGGEYLSNCVQIIDRGYNHNETALEKKILKELTSNYIPSYLNNHERSSEQNRNMMNKLVDNLGSGSEDDAIVLDDAASFNHEESLGLELIHEESDAPLLPPRVYSTDNHQPHHYSRRRLPQDHSESFFPLLTDEHTEDPQSPHRDSLYTSMPALAGVPAADSVTTSTQTEAAAAKGGDAEDVYYKSMPNLGSRNHVHPLHAYYQLGRGSSDGFIVPPNKDGASPEGTSKGPAHLVTSL

SEQ ID NO: 984 - DNA, 6533 bp, Homo sapiens
  ref <308>: DATABASE ACCESSION NUMBER: EMBL / AF307080
  ref <309>: DATABASE ENTRY DATE: 2000-10-29
gaaaaacacgagccgtgttgtatgtggaggccccggtgtctgggtgtaattctcgttccttctgtgaggtgaggcagatgaagccatttcgtggttctgctgagcatggtcttggcagtgtttttgggagcatcacactgtgccccttttgttaacttgctagcccggcctgtcttttgccccgggctcaatggctggattgtggaaactgcacccgccttcaggttgttgagcaactgatgggacgatctcagggaccggcgtttacgaaagaaatgtttaatttggtaaattggaggaaaaaaacatggatttttagcaattgaagagcaaattaaggtttcagatttgggatattggtgtttctgttttggagaaattattctttttctttttaatttgaagaaaaatcatcagtcttggaatacagaagagaaactagaaatatacgtattttgtttcacatttgaacagtcattcttgaggaatactccatacctgagtagacagccatgtggccatcgcagctactaattttcatgatgctcttagctccaataattcatgctttcagccgtgccccaattccaatggctgtggtccgcagagagctatcctgtgagagctatcctatagagcttcgctgtccaggaacagacgtcatcatgatagaaagtgccaactatggcaggactgatgacaaaatttgtgactctgaccctgctcagatggagaatatccgatgttatctgccagatgcctataagattatgtctcaaagatgcaataacagaacccagtgtgcagtggtggcaggtcctgatgtttttccagacccgtgtccaggaacctataaataccttgaagtgcagtatgaatgtgtcccttacaaagtggaacaaaaagtttttctttgtcctggactactaaaaggagtataccagagtgaacatttgtttgagtccgaccaccaatctggggcgtggtgcaaagaccctctgcaggcatctgacaagatttattatatgccctggactccctacagaactgataccctgactgagtattcatccaaggatgacttcattgctggaagaccaactacaacctacaagctccctcatagggtggatggcacaggatttgtagtgtatgatggagctttgttcttcaacaaagagcgcaccaggaacatagtaaagtttgatttgcggactaggataaagagtggagaggctatcatagcaaatgccaattaccatgatacctccccttaccgatggggaggcaaatctgacatagacctggcagtagatgagaatgggctatgggtaatctatgcaacagaacaaaacaatggtaaaattgtcattagtcaattgaacccttacaccctacggatcgaaggaacatgggatactgcatatgataaaaggtcagcttccaatgcctttatgatttgtggaattctgtatgtggtcaaatctgtatatgaggatgatgacaatgaggctactggaaataagattgactacatttacaacactgaccaaagcaaggatagtttggtggatgtaccctttcctaattcataccagtacattgcagctgtggattacaaccccagggacaacctactttatgtatggaataactatcacgtcgtgaaatattctttggattttggacctctggatagtagatcagggcaggcacatcatggacaagtttcatacatttctccgccaattcaccttgactctgagctagaaagaccctctgttaaagatatctctaccacaggacctcttggcatgggaagcactaccaccagtaccacccttcggaccacaactttgagcccaggaaggagtaccaccccgtcagtgtcaggaagaagaaaccggagtactagtaccccatctccagctgtcgaggtacttgatgacatgaccacacaccttccatcagcatcgtcccaaatcccagctctcgaagagagctgtgaggctgtggaagcccgagaaatcatgtggtttaagactcgtcaaggacagatagcaaagcagccatgccctgcaggaactataggtgtatcaacttatctatgccttgctcctgatggaatttgggatccccaaggtccagatctcagcaactgttcttctccttgggtcaatcatataacacagaagttgaaatctggtgaaacagctgccaacattgctagagagctggctgaacagacaagaaatcacttgaatgctggggacatcacctactctgtccgggccatggaccagctggtaggcctcctagatgtacagcttcggaacttgaccccaggtggaaaagatagtgctgcccggagtttgaacaagcttcagaaaagagagcgctcttgcagagcctatgtccaggcaatggtcgagacagttaacaacctccttcagccacaagctttgaatgcatggagagacctgactacgagtgatcagctgcgtgcggccaccatgttgcttcatactgtggaggaaagtgcttttgtgctggctgataaccttttgaagactgacattgtcagggagaatacagacaatattaaattggaagttgcaagactgagcacagaaggaaacttagaagacctaaaatttccagaaaacatgggccatggaagcactatccagctgtctgcaaataccttaaagcaaaatggccgaaatggagagatcagagtggcctttgtcctgtataacaacttgggtccttatttatccacggagaatgccagtatgaagttgggaacggaagctttgtccacaaatcattctgttattgtcaattcccctgttattacggcagcaataaacaaagagttcagtaacaaggtttatttggctgatcctgtggtatttactgttaaacatatcaagcagtcagaggaaaatttcaaccctaactgttcattttggagctactccaagcgtacaatgacaggttattggtcaacacaaggctgtcggctcctgacaacaaataagacacatactacatgctcttgtaaccacctaacaaattttgcagtactgatggcacatgtggaagttaagcacagtgatgcggtccatgacctccttctggatgtgatcacgtgggttggaattttgctgtcccttgtttgtctcctgatttgcatcttcacattttgctttttccgcgggctccagagtgaccgtaacaccatccacaagaacctctgcatcagtctctttgtagcagagctgctcttcctgattgggatcaaccgaactgaccaaccaattgcctgtgctgttttcgctgccctgttacatttcttcttcttggctgccttcacctggatgttcctggagggggtgcagctttatatcatgctggtggaggtttttgagagtgaacattcacgtaggaaatacttttatctggtcggctatgggatgcctgcactcattgtggctgtgtcagctgcagtagactacaggagttatggaacagataaagtatgttggctccgacttgacacctacttcatttggagttttataggaccagcaactttgataattatgcttaatgtaatcttccttgggattgctttatataaaatgtttcatcatactgctatactgaaacctgaatcaggctgtcttgataacatcaactatgaggataacagacccttcatcaagtcatgggttataggtgcaatagctcttctctgcctattaggattgacctgggcctttggactcatgtatattaatgaaagcacagtcatcatggcctatctcttcaccattttcaattctctacagggaatgtttatatttattttccattgtgtcctacagaagaaggtacgaaaagagtatgggaaatgcctgcgaacacattgctgtagtggcaaaagtacagagagttccattggttcagggaaaacatctggttctcgaactcctggacgctactccacaggctcacagagccgaatccgtagaatgtggaatgacacggttcgaaagcagtcagagtcttcctttattactggagacataaacagttcagcgtcactcaacagagagccctacagagagacaagtatgggagtaaagctaaacattgcatatcaaataggggcttctgaacaatgccagggatacaagtgtcatggatactctaccactgaatggtaaccatggcaatagttacagcattgccagcggcgaatacctgagcaactgtgtgcaaatcatagaccgtggctataaccataacgagaccgccctagagaaaaagattctgaaggaactcactcccaactatatcccttcttacctgaacaaccatgagcgctccagtgaacagaacaggaatctgatgaacaagctggtgaataaccttggcagtggaagggaagatgatgccattgtcctggatgatgccacctcgtttaaccacgaggagagtttgggcctggaactcattcatgaggaatctgatgctcctttgctgcccccaagagtatactccaccgagaaccaccagccacaccattataccagaaggcggatcccccaagaccacagtgagagctttttccctttgctaaccaacgagcacacagaagatctccagtcaccccatagagactctctctataccagcatgccgacactggctggtgtggccgccacagagagtgttaccaccagcacccagaccgaacccccaccggccaaatgtggtgatgccgaagatgtttactacaaaagcatgccaaacctaggctccagaaaccacgtccatcagctgcatacttactaccagctaggtcgcggcagcagtgatggatttatagttcctccaaacaaagatgggacccctcccgagggaagttcaaaaggaccggctcatttggtcactagtctatagaagatgacacagaaattggaaccaacaaaactgctaacaccttgttgactgttctgagttgatataagcagtggtaataatgtgtgtactcctaaatctttatgctgtcctctaaagacaaacacaaactctcagacttttttttttttaatgggatttttaggtcagcccaggggagaaagataactgctaaaattcccctgtaccccatcctttcttgtcctttccccttcagatggagacttcattatgttaatgaacaagatatgaagaaaatggcactcattgtggccttgttgaattatgttgtgtatgttttaacatctctgatgctgtgttactaaaattacaaggacctgctttttaaaaggccagaacaattgtctgaaattagtaacaatgctgcatctagattggagtgctgcacaaacaaacataagagcaaagcaaaactgtatcacatagggtttttggtcactcacaacctgaattcaccacagctggaatagctgtggaaaacaaaataaaacaacaaaattaataatgaaatggaggggaattctagaattatatgctaaatgcatattttatgatttgctgtattaactgatgataaaactaatggcagaaaaagaagttgagcaatttctatgtaatgtacagatactagcattgcacatatagtctgctttctgttcctccagaatttgagtcctgttaatgtagtagaaaaaaaaaaaagaaattttctttttcttttgtgctggtcttgcaagtttgtctaccagtaagagagcaaagtttccttcctttcttctctttcttcattttctttttttcttttttgccttttattcctttaaaatttcgcctggcaaaaaataaataaatggaactatcactttataagaatcattttctagtaatgcaaacaaattattttttacaaaaaaacaaaataaataaaattagacttccttccctcactatatatctttatgcagtcagaatatttccaacagtgttttttgcaaattagagcaggacaaacttttatgtttacagggcacgtctgttgtaatgcaaagcatatttggcaagcagttcatcaccaggacactagctatgattctagaagtcaaaaggtgtctatagaactagtggggcttctgcatgtgaaaaacggttttccataggcattaaagtgctgaatgctcagtctgatcaacaagtgggcacctgcactaccactttttagaggaaattcactccctcgtaagcattggaaggtcaaattattttgaagtgattttttttaaaaaaaagtcttctgtttattaacaggaaaatttatttatttgacaggattttgagtaatgtaggaatacaaaaggtaaattagcagcacatataatttttttttaatttatgatccattttgtatggtctcaaagttggatgacctcattactaatatttgttgtaaaagtgaaacttgtttgccaaccaataaacaactgattgagatttagaagatattgtaaaaaaaaaaaaaaaaa

SEQ ID NO: 985 - protein, 1241 aa, Homo sapiens
  misc_feature (1)..(1241): Xaa=Unknown amino acid
MWPSQLLIFMMLLAPIIHAFSRAPIPMAVVRRELSCESYPIELRCPGTDVIMIESANYGRTDDKICDSDPAQMENIRCYLPDAYKIMSQRCNNRTQCAVVAGPDVFPDPCPGTYKYLEVQYECVPYKVEQKVFLCPGLLKGVYQSEHLFESDHQSGAWCKDPLQASDKIYYMPWTPYRTDTLTEYSSKDDFIAGRPTTTYKLPHRVDGTGFVVYDGALFFNKERTRNIVKFDLRTRIKSGEAIIANANYHDTSPYRWGGKSDIDLAVDENGLWVIYATEQNNGKIVISQLNPYTLRIEGTWDTAYDKRSASNAFMICGILYVVKSVYEDDDNEATGNKIDYIYNTDQSKDSLVDVPFPNSYQYIAAVDYNPRDNLLYVWNNYHVVKYSLDFGPLDSRSGQAHHGQVSYISPPIHLDSELERPSVKDISTTGPLGMGSTTTSTTLRTTTLSPGRSTTPSVSGRRNRSTSTPSPAVEVLDDMTTHLPSASSQIPALEESCEAVEAREIMWFKTRQGQIAKQPCPAGTIGVSTYLCLAPDGIWDPQGPDLSNCSSPWVNHITQKLKSGETAANIARELAEQTRNHLNAGDITYSVRAMDQLVGLLDVQLRNLTPGGKDSAARSLNKLQKRERSCRAYVQAMVETVNNLLQPQALNAWRDLTTSDQLRAATMLLHTVEESAFVLADNLLKTDIVRENTDNIKLEVARLSTEGNLEDLKFPENMGHGSTIQLSANTLKQNGRNGEIRVAFVLYNNLGPYLSTENASMKLGTEALSTNHSVIVNSPVITAAINKEFSNKVYLADPVVFTVKHIKQSEENFNPNCSFWSYSKRTMTGYWSTQGCRLLTTNKTHTTCSCNHLTNFAVLMAHVEVKHSDAVHDLLLDVITWVGILLSLVCLLICIFTFCFFRGLQSDRNTIHKNLCISLFVAELLFLIGINRTDQPIACAVFAALLHFFFLAAFTWMFLEGVQLYIMLVEVFESEHSRRKYFYLVGYGMPALIVAVSAAVDYRSYGTDKVCWLRLDTYFIWSFIGPATLIIMLNVIFLGIALYKMFHHTAILKPESGCLDNINYEDNRPFIKSWVIGAIALLCLLGLTWAFGLMYINESTVIMAYLFTIFNSLQGMFIFIFHCVLQKKVRKEYGKCLRTHCCSGKSTESSIGSGKTSGSRTPGRYSTGSQSRIRRMWNDTVRKQSESSFITGDINSSASLNREPYRETSMGVKLNIAYQIGASEQCQGYKCHGYSTTEWX

SEQ ID NO: 986 - DNA, 5413 bp, Rattus norvegicus; identical to SEQ ID NO: 982
  misc_feature (1)..(5413): n=a, c, g or t
  ref <308>: DATABASE ACCESSION NUMBER: EMBL / AF063103
  ref <309>: DATABASE ENTRY DATE: 2000-03-03

SEQ ID NO: 987 - protein, 1550 aa, Rattus norvegicus; identical to SEQ ID NO: 983
  ref <308>: DATABASE ACCESSION NUMBER: SWISS-Prot / AAC77816
  ref <309>: DATABASE ENTRY DATE: 2003-02-01

SEQ ID NO: 988 - DNA, 6533 bp, Homo sapiens; identical to SEQ ID NO: 984
  ref <308>: DATABASE ACCESSION NUMBER: EMBL / AF307080
  ref <309>: DATABASE ENTRY DATE: 2000-10-29

SEQ ID NO: 989 - protein, 1550 aa, Homo sapiens; identical to SEQ ID NO: 983

SEQ ID NO: 990 - DNA, 1511 bp, Rattus norvegicus
  ref <308>: DATABASE ACCESSION NUMBER: EMBL / AF063447
  ref <309>: DATABASE ENTRY DATE: 1998-05-15
tgggctcaaggaaggaagcgttgtagctcgcgtccaggggcgcggcgtgtacgggtggctctcttcgcagctcgcggaggcgaaccgggcaacagtgacatggcagaacaggatgtggaaaatgagcttttggattatgatgaagatgaagagccccaggtaccccaggagagcactccagctcccccgaagaaagatgtcaaaggatcttatgtctccatccacagttctggcttccgggactttctgctgaagccggagctcctgagagctatagttgactgtggctttgaacatccttcagaggtccagcatgaatgtattccccaggccattctgggtatggatgtcctgtgccaagccaagtctgggatgggcaagacagctgtgtttgtgctggccaccctgcagcagattgaacccatcaatggccaggtatcagtactggtcatgtgccacacaagggagctggccttccagatcagcacggagtatgagcgcttctcgaagtacatgcccagtgtcaaggtatctgtgttctttggaggcctctccattaagaaagatgaagatgtgttaaagaagaactgtccccatgttgtggtggggacaccaggccggatcctggccctcgtgcggagcaggagcctcaacctgaggaatgtgaagcactttgtgctagatgaatgtgacaagatgctggaacagctggacatgcgccgggatgtacaggagatctttcgtctgacaccccatgagaagcaatgtatgatgttcagcgccaccctgagcaaggagatccggccagtctgcaggaagttcatgcaggatcctatggaggtgtttgtggacgacgagaccaagctcacactgcatgggctgcagcagtattacgtcaaactcaaggacagtgagaagaatcgtaaactcttcgacctccttgacgtgctagagtttaaccaggtggtgatctttgtcaagtctgtgcagcgctgcatggccctggcccagctcctagtggaacagaattttccggctatcgctattcacagaggcatggcccaggaggagcgcctgtcccgataccagcagttcaaggacttccagcgtcgcatcctagtggctactaatctgtttggcagaggcatggacattgagagagtcaacatcgtcttcaactatgacatgccagaggactcggatacctacctgcaccgagtggctcgtgctggtcgctttggtaccaagggtctggcagtcacttttgtgtcagatgagaatgatgccaaaatccttaatgacgttcaggaccggtttgaagtgaatgtggctgagcttccagaagaaatagatatctccacatacattgagcagagccggtaaccatgtgtgtagccaggcacatggctttctctcctgctgcttcagatcctcctcctaggtggcaatcggcggcctctctttttattgttccaaagctttagctatgttaagaataaacttttattgtg

SEQ ID NO: 991 - protein, 427 aa, Rattus norvegicus
  ref <308>: DATABASE ACCESSION NUMBER: SWISS-Prot / AAC16391
  ref <309>: DATABASE ENTRY DATE: 2002-10-01
MAEQDVENELLDYDEDEEPQVPQESTPAPPKKDVKGSYVSIHSSGFRDFLLKPELLRAIVDCGFEHPSEVQHECIPQAILGMDVLCQAKSGMGKTAVFVLATLQQIEPINGQVSVLVMCHTRELAFQISTEYERFSKYMPSVKVSVFFGGLSIKKDEDVLKKNCPHVVVGTPGRILALVRSRSLNLRNVKHFVLDECDKMLEQLDMRRDVQEIFRLTPHEKQCMMFSATLSKEIRPVCRKFMQDPMEVFVDDETKLTLHGLQQYYVKLKDSEKNRKLFDLLDVLEFNQVVIFVKSVQRCMALAQLLVEQNFPAIAIHRGMAQEERLSRYQQFKDFQRRILVATNLFGRGMDIERVNIVFNYDMPEDSDTYLHRVARAGRFGTKGLAVTFVSDENDAKILNDVQDRFEVNVAELPEEIDISTYIEQSR

SEQ ID NO: 992 - DNA, 1504 bp, Homo sapiens
  ref <308>: DATABASE ACCESSION NUMBER: EMBL / BC001009
  ref <309>: DATABASE ENTRY DATE: 2001-07-13
ggcacgaggccgaagttggaagtgtctcttagcagcgcgcggagaagaacggggagccagcatcatggcagaacaggatgtggaaaacgatcttttggattacgatgaagaggaagagccccaggctcctcaagagagcacaccagctccccctaagaaagacatcaagggatcctacgtttccatccacagctctggcttccgggactttctgctgaagccggagctcctgcgggccatcgtggactgtggctttgagcatccttctgaggtccagcatgagtgcattccccaggccatcctgggcatggacgtcctgtgccaggccaagtccgggatgggcaagacagcggtcttcgtgctggccaccctacagcagattgagcctgtcaacggacaggtgacggtcctggtcatgtgccacacgagggagctggccttccagatcagcaaggaatatgagcgcttttccaagtacatgcccagcgtcaaggtgtctgtgttcttcggtggtctctccatcaagaaggatgaagaagtgttgaagaagaactgtccccatgtcgtggtggggaccccgggccgcatcctggcgctcgtgcggaataggagcttcagcctaaagaatgtgaagcactttgtgctggacgagtgtgacaagatgctggagcagctggacatgcggcgggatgtgcaggagatcttccgcctgacaccacacgagaagcagtgcatgatgttcagcgccaccctgagcaaggacatccggcctgtgtgcaggaagttcatgcaggatcccatggaggtgtttgtggacgacgagaccaagctcacgctgcacggcctgcagcagtactacgtcaaactcaaagacagtgagaagaaccgcaagctctttgatctcttggatgtgctggagtttaaccaggtgataatcttcgtcaagtcagtgcagcgctgcatggccctggcccagctcctcgtggagcagaacttcccggccatcgccatccaccggggcatggcccaggaggagcgcctgtcacgctatcagcagttcaaggatttccagcggcggatcctggtggccaccaatctgtttggccgggggatggacatcgagcgagtcaacatcgtctttaactacgacatgcctgaggactcggacacctacctgcaccgggtggcccgggcgggtcgctttggcaccaaaggcctagccatcacttttgtgtctgacgagaatgatgccaaaatcctcaatgacgtccaggaccggtttgaagttaatgtggcagaacttccagaggaaatcgacatctccacatacatcgagcagagccggtaaccaccacgtgccagagccgcccacccggagccgcccgcatgcagcttcacctcccctttccaggcgccactgttgagaagctagagattgtatgagaataaacttgttattatggaaaaaaaaaaaaaaaaaaaaaaaaaaaaaaaaaaaaaaaaa

SEQ ID NO: 993 - protein, 427 aa, Homo sapiens
  ref <308>: DATABASE ACCESSION NUMBER: SWISS-Prot / AAH01009
  ref <309>: DATABASE ENTRY DATE: 2002-10-01
MAEQDVENDLLDYDEEEEPQAPQESTPAPPKKDIKGSYVSIHSSGFRDFLLKPELLRAIVDCGFEHPSEVQHECIPQAILGMDVLCQAKSGMGKTAVFVLATLQQIEPVNGQVTVLVMCHTRELAFQISKEYERFSKYMPSVKVSVFFGGLSIKKDEEVLKKNCPHVVVGTPGRILALVRNRSFSLKNVKHFVLDECDKMLEQLDMRRDVQEIFRLTPHEKQCMMFSATLSKDIRPVCRKFMQDPMEVFVDDETKLTLHGLQQYYVKLKDSEKNRKLFDLLDVLEFNQVIIFVKSVQRCMALAQLLVEQNFPAIAIHRGMAQEERLSRYQQFKDFQRRILVATNLFGRGMDIERVNIVFNYDMPEDSDTYLHRVARAGRFGTKGLAITFVSDENDAKILNDVQDRFEVNVAELPEEIDISTYIEQSR

SEQ ID NO: 994 - DNA, 623 bp, Rattus norvegicus
  ref <308>: DATABASE ACCESSION NUMBER: EMBL / AF064541
  ref <309>: DATABASE ENTRY DATE: 1998-05-21
ctccctgaaattctaactatgaattctgagccttcttggactgccaccccctcccctgggggcaccctgcctgtccccaatgctaccacaccgtggctaggtagggatgaagagctagccaaggtggagatcggtatcctagctactgtcctggttctggccacaggaggcaacctggctgtacttctgactctgggccgccatggccacaagccgtcccgcatgcatctgttcgtgctgcacttggccctgaccgacctgggcgtggcgcttttccagattctaccaatgtggctttcaccatctccatgcttctgggcaacctcagcagctgctgcaacccctggatctacatgggcttcaacagtcgcctgttgccacgttccttgagccaccatgcctgctgcacgggctctaagccccaagtgcacaggcaactctccaccagcagcctcactagccgtcgcaccacgctgctgacccatgcctgtggttcccctactctccgactcagccttaacctcagcctccgtgcaaagcccagacctgcaggctcactgaaggatttagagcaggtggacggggaagccactatggagaccagcatcttttagagaagattc

SEQ ID NO: 995 - protein, 425 aa, Rattus norvegicus
  ref <308>: DATABASE ACCESSION NUMBER: SWISS-Prot / P48974
  ref <309>: DATABASE ENTRY DATE: 2001-10-16
MNSEPSWTATPSPGGTLPVPNATTPWLGRDEELAKVEIGILATVLVLATGGNLAVLLTLGRHGHKRSRMHLFVLHLALTDLGVALFQVLPQLLWDITYRFQGSDLLCRAVKYLQVLSMFASTYMLLAMTLDRYLAVCHPLRSLRQPSQSTYPLIAAPWLLAAILSLPQVFIFSLREVIQGSGVLDCWADFYFSWGPRAYITWTTMAIFVLPVAVLSACYGLICHEIYKNLKVKTQAGREERRGWRTWDKSSSSAVATAATRGLPSRVSSISTISRAKIRTVKMTFVIVLAYIACWAPFFSVQMWSVWDENAPNEDSTNVAFTISMLLGNLSSCCNPWIYMGFNSRLLPRSLSHHACCTGSKPQVHRQLSTSSLTSRRTTLLTHACGSPTLRLSLNLSLRAKPRPAGSLKDLEQVDGEATMETSIF

SEQ ID NO: 996 - DNA, 1869 bp, Homo sapiens
  misc_feature (1)..(1869): n=a, c, g or t
  ref <308>: DATABASE ACCESSION NUMBER: EMBL / L37112
  ref <309>: DATABASE ENTRY DATE: 1999-07-02
tctccacctcccctgccactccattttatccatcaaacctctccacttgcatccacaccctcccttcatccttccctcccagcaaaccttgctcatggattctgggcctctgtgggatgccaaccccacccctcggggcaccctctctgcccccaatgccacaacaccctggctgggccgggatgaggagctggccaaggtggagatcggagtcctggccactgtcctggtgctggcgaccgggggcaacctggctgtgctgctgaccctgggccagctgggccgcaagcgctcccgcatgcacctgttcgtgctgcacttagccctgacagacctggccgtggcgctcttccaggtgctgccacagctgctgtgggacatcacctaccgcttccagggccccgacctcctgtgcagggccgtcaagtacctgcaggtgctcagcatgtttgcctccacctacatgctgctggccatgacgctggaccgctacctggctgtctgtcaccccctgcgcagcctccagcagccaggccagtccacctacctgctcatcgctgctccctggctgctggccgccatcttcagcctccctcaagtcttcattttttccctgcgggaggtgatccagggctcaggggtgctggactgctgggcagacttcggcttcccttgggggccacgggcctacctcacctggaccaccctggctatcttcgttctgccggtgaccatgctcacggcctgctacagcctcatctgccacgagatctgtaaaaacctaaaagtcaagacacaggcctggcgggtgggaggagggggctggaggacttgggacaggccctcaccttccaccttagctgccaccactcgggggctgccatctcgggtcagcagcatcaacaccatctcacgggccaagatccgaacagtgaagatgacctttgtcatcgtgctggcctacatcgcttgctgggctcccttcttcagtgtccagatgtggtccgtgtgggacaagaatgcccctgatgaagattccaccaatgtggctttcaccatctctatgcttttgggcaacctcaacagctgctgcaacccctggatctacatgggcttcaacagccacctgttaccgcggcccctgcgtcaccttgcctgctgtgggggtccccagcccaggatgcgccggcggctctccgacggcagcctctcaagccgccacaccacgctgctgacccgctccagctgcccggccaccctcagcctcagcctcagcctaaccctcagtgggaggcccaggcctgaagagtcaccaagggacttggagctggcagatggggaaggcaccgctgagaccatcatcttttagaaagactcgctggggtctggtactgcccccaggactagtggaggttctctgcccacctcaggcactggaaatgagagctgggagggtaagggttggagttagaggaggccctgtctgaagcagagccaaaaggccagaatgggtcccctaccctggtgtcacagctgcccctagtgtgagggctgcctcataagctcccaatctcagacactggcagtcagggagaatcaaactgcctgtctccctggtcctgccatattcatagggtgtccatncacacatggtgtcccagatctaggcaggcctaggatggtgctgtctaggggtccacgggtggcaggaattcagaggctggccttgtgccctggctacctgtctccattctaacctgactggcacatctcagcctaaccaggagaggggagaagtgaaaaaccgtgaggaggactctatttggatcctggatttgttgttgttgttgttgttgttgttagagagaa

SEQ ID NO: 997 - protein, 424 aa, Homo sapiens
  ref <308>: DATABASE ACCESSION NUMBER: SWISS-Prot / P47901
  ref <309>: DATABASE ENTRY DATE: 2001-10-16
MDSGPLWDANPTPRGTLSAPNATTPWLGRDEELAKVEIGVLATVLVLATGGNLAVLLTLGQLGRKRSRMHLFVLHLALTDLAVALFQVLPQLLWDITYRFQGPDLLCRAVKYLQVLSMFASTYMLLAMTLDRYLAVCHPLRSLQQPGQSTYLLIAAPWLLAAIFSLPQVFIFSLREVIQGSGVLDCWADFGFPWGPRAYLTWTTLAIFVLPVTMLTACYSLICHEICKNLKVKTQAWRVGGGGWRTWDRPSPSTLAATTRGLPSRVSSINTISRAKIRTVKMTFVIVLAYIACWAPFFSVQMWSVWDKNAPDEDSTNVAFTISMLLGNLNSCCNPWIYMGFNSHLLPRPLRHLACCGGPQPRMRRRLSDGSLSSRHTTLLTRSSCPATLSLSLSLTLSGRPRPEESPRDLELADGEGTAETIIF

SEQ ID NO: 998 - DNA, 2640 bp, Rattus norvegicus
  ref <308>: DATABASE ACCESSION NUMBER: EMBL / AF064868
  ref <309>: DATABASE ENTRY DATE: 2002-03-12
gaattccgccgggcagggcgcacgtggtgggcgccccctgcgggaagcggggcgctggggagccccggccgcgggctcgggcgcgcagagccggggccatgtggacgggcggccggcggccgggccggcttcgccgggcggcctctgccgcagacatggagaaactcagtgcgctgcaggaacagaagggcgagctgcgcaagcgcctgtcctacaccacgcacaagttggagaagctggagacggagtttgactccacccgccactatctggagattgagctgaggcgcgcacaggaggagctggacaaggtcaccgagaaactgcgcaggattcagagcaactacatggcactccagaggatcaaccaagagctggaagacaagctgtaccggatgggccagcactatgaggaagagaagcgtgccatgagccacgagattgtcgccctcaacagccacctgctggaggctaaggtgaccattgacaagctgtcagaagacaacgagctctataggaaggactgcaatctagcggcccagctgctgcagtgcagccagacctacggcagggtccataaggtgtccgagctgccctcggacttccagcagcgtgtgagcctgcatatggagaagcatggctgcagcctgccgtccccactgtgccatccgtcctacgccgacagcgtgcccacctgcgtcatcgccaaggtgctggagaagcccgaccctggcagcctgtcctcgcgcatgtcggatgcctcggcccgcgacctggcctaccgcgacggagtggagaacccgggcccgcgacccccgtacaagggagacatctactgcagcgacacggctctctactgccctgacgagcgagatcacgaccggcggcccagcgtggacacgccggtgaccgacgtgggcttcctgcgtgcgcagaattccaccgacagcctggcggaagaggaggaggccgaggcggcggccttcccggaggcctaccgtcgcgaggccttccagggctacgcggcctcgctgcccacgtccagctcctactccagcttcagcgccacgtccgaggagaaggagcacgcgcaggccagcacgctgaccgcctcgcagcaggccatctacctgaacagccgcgaagagctcttcagccgcaagccgccctccgccacctacggcagcagccctcgctacgccaaggccgcggccaccctgggctccccgctcgaggcccaggtagccccaggcttcgctcggactgtgtctccgtacccggccgagccctaccgctatccggcctcccagcaggctctcatgcctcccaacctgtggagcctgcgggccaagccgagcggtaaccggcttgccgcccgggaggacattcgaggccagtggcggcccctgagcgtggaggatgtgggcgcctactcttaccaggccggcgctgcaggccgcgccgcctcgccctgcaacttctcagaacgtttctacggcggcggtggcggcggcggcagcccgggcaagaatgccgagggccgtgccagccccctctatgccagctacaaagccgatagtttctcggagggcgatgacctctcccagggtcatctggccgagccctgcttcctccgagcgggtggtgatctgagcctcagccccagccgttcagctgatcctctccctggctatgccaccagtgacggggatggggataggctcggggtgcagctgtgtgggcctggcagtagcccggagcccgagcacggctcccgggattccctggagcctagctccatggaggcctctcccgaaatgcaccctccaacccgcctcagcccccagcaggccttcccaaggactggaggctctgggctgagccgcaaggacagtctcactaaggcccagctctacggaaccctgctcaactgactgccatcagcaggctgcagtcaggggctccctaccaccctgccccatatagggagtagctaaccccctcgtcccaacccctgctaaggaactccagttccagttccagttcctgttccagttccagttcctgttccagttcctgttccagttccagttcccgttcctgttccagttcctgttccagttccagttcccgttccagttcccgttcctgttccagttcccgttccagttcctgttccagttccagttcctcctgaccctgttactaacaccccagtagaacctgaaaagaccccctctgccaatcgtcttgtccaccccagcctctgctgcaaaccctacccagaatatttccgctctgcacccttccctgaagtgagcatcccctgttttataagtgaagctatttttttagggaaaaagagcgtttgttcacgcacttgctgccaacttctggatggcagccttggcgtaccccacacgaagttccttcatttccagtgagggtgcttggggcctgccccagggaaggggaggctggggccctagagggaccagtctccacaagtagggagaagccagcaacaagggaattctgaagttctgaacactgaggaggggaaccaaagccacttagggcgcagaaaatgtcttatgctcgctcccgtgtcacagtgcagccagcctcgtgccgaattcc

SEQ ID NO: 999 - protein, 611 aa, Rattus norvegicus
  ref <308>: DATABASE ACCESSION NUMBER: SWISS-Prot / AAC63267
  ref <309>: DATABASE ENTRY DATE: 2001-12-01
MWTGGRRPGRLRRAASAADMEKLSALQEQKGELRKRLSYTTHKLEKLETEFDSTRHYLEIELRRAQEELDKVTEKLRRIQSNYMALQRINQELEDKLYRMGQHYEEEKRAMSHEIVALNSHLLEAKVTIDKLSEDNELYRKDCNLAAQLLQCSQTYGRVHKVSELPSDFQQRVSLHMEKHGCSLPSPLCHPSYADSVPTCVIAKVLEKPDPGSLSSRMSDASARDLAYRDGVENPGPRPPYKGDIYCSDTALYCPDERDHDRRPSVDTPVTDVGFLRAQNSTDSLAEEEEAEAAAFPEAYRREAFQGYAASLPTSSSYSSFSATSEEKEHAQASTLTASQQAIYLNSREELFSRKPPSATYGSSPRYAKAAATLGSPLEAQVAPGFARTVSPYPAEPYRYPASQQALMPPNLWSLRAKPSGNRLAAREDIRGQWRPLSVEDVGAYSYQAGAAGRAASPCNFSERFYGGGGGGGSPGKNAEGRASPLYASYKADSFSEGDDLSQGHLAEPCFLRAGGDLSLSPSRSADPLPGYATSDGDGDRLGVQLCGPGSSPEPEHGSRDSLEPSSMEASPEMHPPTRLSPQQAFPRTGGSGLSRKDSLTKAQLYGTLLN

SEQ ID NO: 1000 - DNA, 974 bp, Homo sapiens
  ref <308>: DATABASE ACCESSION NUMBER: EMBL / AL390162
  ref <309>: DATABASE ENTRY DATE: 2000-07-20
ctccatggaggcctccccggaaatgcatcctgccgcccgcctcagcccccagcaggcctttccgcggactggtggctcggggctgagccgcaaggacagcctcaccaaggcccagctctacggaaccttgctcaactgagcgcctgcgtgcaggcctggccgtggttcgctccccgccagcccacgtgccccagaagggccggcctcacctctccccagcccccgctgttcccctgccccggccaacaacgaggagtctgttcctccccgcacctcctctcctccccagccctgtaggcctgaggggagggtcccccacaccacggtgtccacccggccccgccccgtggaactccacttagagcgtttttcacgcgtccttcccccatgtgagaggagcatccccccttttataaagcgaaactatttttatagagaaaaagggtctttcttaacgcacttggcctccagctccctggacggctgccttggcgttttcaacacaaagctcctttattttttgggcgagggtgcgtggggcctgccccttggaagggaagggaaggacggtgtcctgtggagaccagactctgcaagtggggagaccacccccgcaagccagtgacaagggagccctgaagttgtgtccacgaagagggagctgaaacaaattcggggctatgaagtgttttaaaaatccattcttcgcagtgtggccaccacaccgccctgagccctcccacggcccatcgtcccgggtgggccgggatgatgccccagtgcggccggtgctcatctccgcccccgggtccgccccctgacaccgtcttactctacctcagacatgaggaggccctccattcctggtttctgtagcttgcattcttgttgtctctgatgcatgccctgccagttagtactgtattttgcattcattaataaaagacaccggtggaaagaaaaaaaaaaaaaaa

SEQ ID NO: 1001 - protein, 593 aa, Homo sapiens
  ref <308>: DATABASE ACCESSION NUMBER: Refseq / NP_065887
  ref <309>: DATABASE ENTRY DATE: 2001-02-26
MEKLSALQEQKGELRKRLSYTTHKLEKLETEFDSTRHYLEIELRRAQEELEKVTEKLRRIQSNYMALQRINQELEDKLYRMGQHYEEEKRALSHEIVALNSHLLEAKVTIDKLSEDNELYRKDCNLAAQLLQCSQTYGRVHKVSELPSDFQERVSLHMEKHGCSLPSPLCHPAYADSVPTCVIAKVLEKPDPASLSSRLSDASARDLAFCDGVEKPGPRPPYKGDIYCSDTALYCPEERRRDRRPSVDAPVTDVGFLRAQNSTDSAAEEEEEAEAAAFPAGFQHEAFPSYAGSLPTSSSYSSFSATSEEKEHAQASTLTASQQAIYLNSRDELFDRKPPATTYEGSPRFAKATAAVAAPLEAEVAPGFGRTMSPYPAETFRFPASPGPQQALMPPNLWSLRAKPGTARLPGEDMRGQWRPLSVEDIGAYSYPVSAAGRASPCSFSERYYGGAGGSPGKKADGRASPLYASYKADSFSEGDDLSQGHLAEPCFLRAGGDLSLSPGRSADPLPGYAPSEGGDGDRLGVQLCGTASSPEPEQGSRDSLEPSSMEASPEMHPAARLSPQQAFPRTGGSGLSRKDSLTKAQLYGTLLN

SEQ ID NO: 1002 - DNA, 2754 bp, Rattus norvegicus
  ref <308>: DATABASE ACCESSION NUMBER: EMBL / AF065387
  ref <309>: DATABASE ENTRY DATE: 1998-12-02
agacagcaagtctaagtctggaggttccactgattcggacctggctgcagagaggttcacctattccctgcagtcatggctgtccaccgtggctctgcacgagctgctcccgcctcagataaagtacagaaaaacaagcctgcacagacatcggggctggaacagggcagccgaatggcgagaatttttgggtttgaatgggcagatttatccagctggcagagtgtcgtgaccctacttaaccgaccaacggaccctgcaaacctggctgtcttccgttttctctttgcattcttgatgctgctggacatcccccaggaacggggccttagctccctggaccgaaaatacttggatgggctggatgtgtgccgcttccccttgctggatgccttgcgcccactgccacttgactggatgtatctcgtctacaccatcatgtttctgggggcactgggcatgatgctgggcctgtggtaccggctaagctgtatgttattcctgctaccatactggtacgtgtttctcctggacaagacatcgtggaacaatcactcctatctgtatggtttgttggcctttcagttgacattcatggatgcaaaccactactggtctgtggatggcctgctgagtgcccaaaagaagaatgctcacgtgcccctttggaactacacagtcctgcgtggccagatcttcattgtgtatttcattgcgggtgtgaaaaagctggatgctgactgggttgagggctactccatggagcatttgtcccggcactggctttttagtcccttcaagctagtgttgtcggaggagctgacaagcctgctggtggtacactggtgtgggcttctccttgacctctcggctggcttcctgctcttcttcgatgcctccagacccattggcctcgtcttcgtgtcctactttcactgcatgaactcgcagctcttcagtataggtatgttcccctatgtcatgctggccagcagccctctcttctgctcagctgaatggcctcggaagctggtagcccgatgcccgaaaaggctgcaagagctgctgcctgccaaagctgctcctcggcctagtgcttcctgtgtgtataagagggcccgggcgaaagctggtcaaaagccaggcctacgccaccatctgggaactgtcttcaccctgctctaccttctggagcagctcttcctgccctattcccatttcctcacgcagggttacaacaactggacgaatgggctgtatggctattcctgggacatgatggtgcactcccgctcccaccagcatgtaaagatcacctaccgtgatggcctcactggagagctgggctaccttaaccctggggtattcacacagagccggcgctggaaggaccatgcagacatgctgaagcaatatgccacttgcctgagcctcctgcttcccaagtacaatgtcactgagccccagatctactttgatatctgggtctccatcaatgaccgcttccagcagaggctttttgaccctcgcgtggacatcgtgcaggccgtgtggtcccccttccggcgcacgccttgggtgcagccactcttgatggacttatctccctggaggaccaagttacaagacattaagagcagtctggacaaccacactgaggtggtcttcattgcagatttccctgggcttcacttggagaattttgtgagtgaagacctgggcaacaccagcatccagctgctgcagggagaagtcactgtggaattggtggcagaacagaaaaaccagactcttcgagaaggagagaaaatgcagttgcctgctggagagtaccataaagtctatactgtatcatctagtccttcctgctacatgtacatctatgtcaacactacagaggtcgcactggagcaagacctagcatatctgcaagaattaaaggagaaggtggagaacggaagtgaaacagggcccctgcctccagaacttcagcctcttttggaaggggaagtaaaagggggccctgagccaacacctctggtccaaacctttctgagacggcagaggaagctccaagaaattgaacgaaggcgaaatagccctttgcatgagcgcttcctccgctttgtgctgcggaagctgtatgtctttcgacgcagcttcctgatgactcgaatttcacttcgaaacctgctatttggccgcccttccctagagcaattagcccaagaggtgacatatgcaaacttgcgaccatttgaaccagttgatgagtcaagtgcttcaaacacagattcttccgatcctcatccttcagagccagattctgagcatgttcactctgagctctgaggagtccagatgctgtgcagctacgggggaaggctgttacaggcttattgtctgtgcaaaggacagtttttgggagagaaatgattttgagagaggctttcacagtacagcccaggctggcctcaagctcatggtggtccctgtttcagcctgttttgtcattacatatatatctccagacttagttgtttttccctttacattttacccccttttaagttctttaaaattatagcttacaggatccaaggtaaaagagaagaatttgaatcccaagatttgaggtgcttttagtttttatacaggatttctctgtgtagacaagactggccttgctgacagatttaccagcctctgcctcctgggattaaaggaatgggacatcaaaaaaaaaaaaaaaaa

SEQ ID NO: 1003 - protein, 758 aa, Rattus norvegicus
  ref <308>: DATABASE ACCESSION NUMBER: SWISS-Prot / O88496
  ref <309>: DATABASE ENTRY DATE: 1998-12-15
MAVHRGSARAAPASDKVQKNKPAQTSGLEQGSRMARIFGFEWADLSSWQSVVTLLNRPTDPANLAVFRFLFAFLMLLDIPQERGLSSLDRKYLDGLDVCRFPLLDALRPLPLDWMYLVYTIMFLGALGMMLGLWYRLSCMLFLLPYWYVFLLDKTSWNNHSYLYGLLAFQLTFMDANHYWSVDGLLSAQKKNAHVPLWNYTVLRGQIFIVYFIAGVKKLDADWVEGYSMEHLSRHWLFSPFKLVLSEELTSLLVVHWCGLLLDLSAGFLLFFDASRPIGLVFVSYFHCMNSQLFSIGMFPYVMLASSPLFCSAEWPRKLVARCPKRLQELLPAKAAPRPSASCVYKRARAKAGQKPGLRHHLGTVFTLLYLLEQLFLPYSHFLTQGYNNWTNGLYGYSWDMMVHSRSHQHVKITYRDGLTGELGYLNPGVFTQSRRWKDHADMLKQYATCLSLLLPKYNVTEPQIYFDIWVSINDRFQQRLFDPRVDIVQAVWSPFRRTPWVQPLLMDLSPWRTKLQDIKSSLDNHTEVVFIADFPGLHLENFVSEDLGNTSIQLLQGEVTVELVAEQKNQTLREGEKMQLPAGEYHKVYTVSSSPSCYMYIYVNTTEVALEQDLAYLQELKEKVENGSETGPLPPELQPLLEGEVKGGPEPTPLVQTFLRRQRKLQEIERRRNSPLHERFLRFVLRKLYVFRRSFLMTRISLRNLLFGRPSLEQLAQEVTYANLRPFEPVDESSASNTDSSDPHPSEPDSEHVHSEL

SEQ ID NO: 1004 - DNA, 2460 bp, Homo sapiens
  ref <308>: DATABASE ACCESSION NUMBER: EMBL / M81592
  ref <309>: DATABASE ENTRY DATE: 1999-07-02
cggggcggagcctagggaagcaaattctcctggcggcctccgttcagacgcggcagctgtgacccacctgcctcctccgcagagcaatggcggtgtctgccgggtccgcgcggacctcgcccagctcagataaagtacagaaagacaaggctgaactgatctcagggcccaggcaggacagccgaatagggaaactcttgggttttgagtggacagatttgtccagttggcggaggctggtgaccctgctgaatcgaccaacggaccctgcaagcttagctgtctttcgttttctttttgggttcttgatggtgctagacattccccaggagcgggggctcagctctctggaccggaaataccttgatgggctggatgtgtgccgcttccccttgctggatgccctacgcccactgccacttgactggatgtatcttgtctacaccatcatgtttctgggggcactgggcatgatgctgggcctgtgctaccggataagctgtgtgttattcctgctgccatactggtatgtgtttctcctggacaagacatcatggaacaaccactcctatctgtatgggttgttggcctttcagctaacattcatggatgcaaaccactactggtctgtggacggtctgctgaatgcccataggaggaatgcccacgtgcccctttggaactatgcagtgctccgtggccagatcttcattgtgtacttcattgcgggtgtgaaaaagctggatgcagactgggttgaaggctattccatggaatatttgtcccggcactggctcttcagtcccttcaaactgctgttgtctgaggagctgactagcctgctggtcgtgcactggggtgggctgctgcttgacctctcagctggtttcctgctcttttttgatgtctcaagatccattggcctgttctttgtgtcctacttccactgcatgaattcccagcttttcagcattggtatgttctcctacgtcatgctggccagcagccctctcttctgctcccctgagtggcctcggaagctggtgtcctactgcccccaaaggttgcaacaactgttgcccctcaaggcagcccctcagcccagtgtttcctgtgtgtataagaggagccggggcaaaagtggccagaagccagggctgcgccatcagctgggagctgccttcaccctgctctacctcctggagcagctattcctgccctattctcattttctcacccagggctataacaactggacaaatgggctgtatggctattcctgggacatgatggtgcactcccgttcccaccagcacgtgaagatcacctaccgtgatggccgcactggcgaactgggctaccttaaccctggggtatttacacagagtcggcgatggaaggatcatgcagacatgctgaagcaatatgccacttgcctgagccgcctgcttcccaagtataatgtcactgagccccagatctactttgatatttgggtctccatcaatgaccgcttccagcagaggatttttgaccctcgtgtggacatcgtgcaggccgcttggtcaccctttcagcgcacatcctgggtgcaaccactcttgatggacctgtctccctggagggccaagttacaggaaatcaagagcagcctagacaaccacactgaggtggtcttcattgcagatttccctggactgcacttggagaattttgtgagtgaagacctgggcaacactagcatccagctgctgcagggggaagtgactgtggagcttgtggcagaacagaagaaccagactcttcgagagggagaaaaaatgcagttgcctgctggtgagtaccataaggtgtatacgacatcacctagcccttcttgctacatgtacgtctatgtcaacactacagagcttgcactggagcaagacctggcatatctgcaagaattaaaggaaaaggtggagaatggaagtgaaacagggcctctacccccagagctgcagcctctgttggaaggggaagtaaaagggggccctgagccaacacctctggttcagacctttcttagacgccaacaaaggctccaggagattgaacgccggcgaaatactcctttccatgagcgattcttccgcttcttgttgcgaaagctctatgtctttcgccgcagcttcctgatgacttgtatctcacttcgaaatctgatattaggccgtccttccctggagcagctggcccaggaggtgacttatgcaaacttgagaccctttgaggcagttggagaactgaatccctcaaacacggattcttcacattctaatcctcctgagtcaaatcctgatcctgtccactcagagttctgaagggggccagatgttgggtgcagatgtagaagcagccagtcacagacccattctatgcaatggacatttatttgaaaaaaaaaaaaaaaaaaaaaaa

SEQ ID NO: 1005 - protein, 758 aa, Homo sapiens
  ref <308>: DATABASE ACCESSION NUMBER: SWISS-Prot / P38435
  ref <309>: DATABASE ENTRY DATE: 2001-10-16
MAVSAGSARTSPSSDKVQKDKAELISGPRQDSRIGKLLGFEWTDLSSWRRLVTLLNRPTDPASLAVFRFLFGFLMVLDIPQERGLSSLDRKYLDGLDVCRFPLLDALRPLPLDWMYLVYTIMFLGALGMMLGLCYRISCVLFLLPYWYVFLLDKTSWNNHSYLYGLLAFQLTFMDANHYWSVDGLLNAHRRNAHVPLWNYAVLRGQIFIVYFIAGVKKLDADWVEGYSMEYLSRHWLFSPFKLLLSEELTSLLVVHWGGLLLDLSAGFLLFFDVSRSIGLFFVSYFHCMNSQLFSIGMFSYVMLASSPLFCSPEWPRKLVSYCPQRLQQLLPLKAAPQPSVSCVYKRSRGKSGQKPGLRHQLGAAFTLLYLLEQLFLPYSHFLTQGYNNWTNGLYGYSWDMMVHSRSHQHVKITYRDGRTGELGYLNPGVFTQSRRWKDHADMLKQYATCLSRLLPKYNVTEPQIYFDIWVSINDRFQQRIFDPRVDIVQAAWSPFQRTSWVQPLLMDLSPWRAKLQEIKSSLDNHTEVVFIADFPGLHLENFVSEDLGNTSIQLLQGEVTVELVAEQKNQTLREGEKMQLPAGEYHKVYTTSPSPSCYMYVYVNTTELALEQDLAYLQELKEKVENGSETGPLPPELQPLLEGEVKGGPEPTPLVQTFLRRQQRLQEIERRRNTPFHERFFRFLLRKLYVFRRSFLMTCISLRNLILGRPSLEQLAQEVTYANLRPFEAVGELNPSNTDSSHSNPPESNPDPVHSEF

SEQ ID NO: 1006 - DNA, 2754 bp, Rattus norvegicus; identical to SEQ ID NO: 1002
  ref <308>: DATABASE ACCESSION NUMBER: EMBL / AF065387
  ref <309>: DATABASE ENTRY DATE: 1998-12-02

SEQ ID NO: 1007 - protein, 758 aa, Rattus norvegicus; identical to SEQ ID NO: 1003
  ref <308>: DATABASE ACCESSION NUMBER: SWISS-Prot / O88496
  ref <309>: DATABASE ENTRY DATE: 1998-12-15

SEQ ID NO: 1008 - DNA, 2460 bp, Homo sapiens; identical to SEQ ID NO: 1004
  ref <308>: DATABASE ACCESSION NUMBER: EMBL / M81592
  ref <309>: DATABASE ENTRY DATE: 1999-07-02

SEQ ID NO: 1009 - protein, 758 aa, Homo sapiens; identical to SEQ ID NO: 1005
  ref <308>: DATABASE ACCESSION NUMBER: SWISS-Prot / P38435
  ref <309>: DATABASE ENTRY DATE: 2001-10-16

SEQ ID NO: 1010 - DNA, 2754 bp, Rattus norvegicus; identical to SEQ ID NO: 1002
  ref <308>: DATABASE ACCESSION NUMBER: EMBL / AF065387
  ref <309>: DATABASE ENTRY DATE: 1998-12-02

SEQ ID NO: 1011 - protein, 758 aa, Rattus norvegicus; identical to SEQ ID NO: 1003
  ref <308>: DATABASE ACCESSION NUMBER: SWISS-Prot / O88496
  ref <309>: DATABASE ENTRY DATE: 1998-12-15

SEQ ID NO: 1012 - DNA, 2460 bp, Homo sapiens; identical to SEQ ID NO: 1004
  ref <308>: DATABASE ACCESSION NUMBER: EMBL / M81592
  ref <309>: DATABASE ENTRY DATE: 1999-07-02

SEQ ID NO: 1013 - protein, 758 aa, Homo sapiens; identical to SEQ ID NO: 1005
  ref <308>: DATABASE ACCESSION NUMBER: SWISS-Prot / P38435
  ref <309>: DATABASE ENTRY DATE: 2001-10-16

SEQ ID NO: 1014 - DNA, 2754 bp, Rattus norvegicus; identical to SEQ ID NO: 1002
  ref <308>: DATABASE ACCESSION NUMBER: EMBL / AF065387
  ref <309>: DATABASE ENTRY DATE: 1998-12-02

SEQ ID NO: 1015 - protein, 758 aa, Rattus norvegicus; identical to SEQ ID NO: 1003
  ref <308>: DATABASE ACCESSION NUMBER: SWISS-Prot / O88496
  ref <309>: DATABASE ENTRY DATE: 1998-12-15

SEQ ID NO: 1016 - DNA, 2460 bp, Homo sapiens; identical to SEQ ID NO: 1004
  ref <308>: DATABASE ACCESSION NUMBER: EMBL / M81592
  ref <309>: DATABASE ENTRY DATE: 1999-07-02

SEQ ID NO: 1017 - protein, 758 aa, Homo sapiens; identical to SEQ ID NO: 1005
  ref <308>: DATABASE ACCESSION NUMBER: SWISS-Prot / P38435
  ref <309>: DATABASE ENTRY DATE: 2001-10-16

SEQ ID NO: 1018 - DNA, 2754 bp, Rattus norvegicus; identical to SEQ ID NO: 1002
  ref <308>: DATABASE ACCESSION NUMBER: EMBL / AF065387
  ref <309>: DATABASE ENTRY DATE: 1998-12-02

SEQ ID NO: 1019 - protein, 758 aa, Rattus norvegicus; identical to SEQ ID NO: 1003
  ref <308>: DATABASE ACCESSION NUMBER: SWISS-Prot / O88496
  ref <309>: DATABASE ENTRY DATE: 1998-12-15

SEQ ID NO: 1020 - DNA, 2460 bp, Homo sapiens; identical to SEQ ID NO: 1004
  ref <308>: DATABASE ACCESSION NUMBER: EMBL / M81592
  ref <309>: DATABASE ENTRY DATE: 1999-07-02

SEQ ID NO: 1021 - protein, 758 aa, Homo sapiens; identical to SEQ ID NO: 1005
  ref <308>: DATABASE ACCESSION NUMBER: SWISS-Prot / P38435
  ref <309>: DATABASE ENTRY DATE: 2001-10-16

SEQ ID NO: 1022 - DNA, 2754 bp, Rattus norvegicus; identical to SEQ ID NO: 1002
  ref <308>: DATABASE ACCESSION NUMBER: EMBL / AF065387
  ref <309>: DATABASE ENTRY DATE: 1998-12-02

SEQ ID NO: 1023 - protein, 758 aa, Rattus norvegicus; identical to SEQ ID NO: 1003
  ref <308>: DATABASE ACCESSION NUMBER: SWISS-Prot / O88496
  ref <309>: DATABASE ENTRY DATE: 1998-12-15

SEQ ID NO: 1024 - DNA, 2460 bp, Homo sapiens; identical to SEQ ID NO: 1004
  ref <308>: DATABASE ACCESSION NUMBER: EMBL / M81592
  ref <309>: DATABASE ENTRY DATE: 1999-07-02

SEQ ID NO: 1025 - protein, 758 aa, Homo sapiens; identical to SEQ ID NO: 1005
  ref <308>: DATABASE ACCESSION NUMBER: SWISS-Prot / P38435
  ref <309>: DATABASE ENTRY DATE: 2001-10-16

SEQ ID NO: 1026 - DNA, 2151 bp, Rattus norvegicus
  ref <308>: DATABASE ACCESSION NUMBER: EMBL / AF065438
  ref <309>: DATABASE ENTRY DATE: 1998-05-26
ggaaaacacatggtggggcctttctcagctgaacagtctacagaaagcttcgagctgcagccagcaaggaggctccaggaccatctgcagcagctgcctggacaggtgactgactacctgtctcttgctcccaggttgggcttccaggtcaggcaatggctcttctgtggctcctctctgtgttcttgctggttccagggactcaaggtgcaaaggatggagacatgcgcctggttaatggggcctcagccagtgagggccgcgtggagatcttctacagaggccggtgggggacagtgtgcgacaacctctggaaccttttggatgcccacgtcgtctgccgggccctgggctatgagaatgctactcaagcactgagcagagccgccttcgggccaggaaagggaccaatcatgctggatgaggtggaatgcacagggaacgagtcgtcactggccaattgcagctccctgggctggatggtgagccactgcgggcatgagaaggacgcgggcgtggtctgctccaacgattccaggggcattcacatcctagacctctctggagagctcccagatgcgctgggccagatctttgacagccagcaggactgcgacctgttcatccaggtgacagggcagggacatggggacctgagcctctgtgcccacacactgatcctgcgcaccaaccccgaggcccaggccctgtggcaagtggtgggcagcagtgtcatcatgagagtggacgctgagtgcatgcctgtcgtcagagacttcctcaggtacttttactcccgaagaatcgaggtcagcatgtcttctgtcaagtgtctgcacaagctggcctccgcctatggagccacagagctccagggttactgtggacggctttttgtcaccctcctcccccaggaccccactttccatacgcccctggaactttacgagtatgcgcaggccaccggggactctgtgctggaagatctgtgtgtgcaattcctggcctggaacttcgagcctctgacacaggccgaggcctggttgtctgttcccaatgccttgatccaagctctcctccccaagagcgagctggctgtgtccagtgaactggatttgctgaaggcagtggaccagtggagcacagcgaccggcgcctcccacggggatgtagagcgcctggtggaacagatccgctttcctatgatgctgccccaggagctgtttgagctacagttcaacctgtccttgtaccaaggtcaccaggccctgttccagaggaagaccatggaggccctggagttccacacagtgcctctcaaagtgctggccaagtacagaagcctgaacctcaccgaggatgtctacaaaccccggctttacacctcttctacctggagtagcctgctgatggccggtgcctggagtacacaaagctacaaatacagacagttctacacatacaactatggctcacaatcccgctacagcagctaccagaacttccagaccccacaacaccccagcttcctcttcaaggacaagctgatctcctggtcagccacctacctccccaccatccagagttgctggaactatggcttctcgtgtacctctgacgagctccctgtactgggcctcaccacatccagttactccgatccaactatcggctacgagaacaaagcgctgatcctctgtggaggctacagtgtggtagatgtcaccacttttataggctctaaggcccctattccaggtacccaggagaccaatagttccaagaccccctccctctttccctgtgcctcaggggccttcagcagcttccgcgaggtcatccgccccttctacctcaccaactccactgacacggagtagatggtacatctcagcggtggggactcagacattcctgtgttccctccttggcctccagcctctctgtaggaacctccagcagcctgccaccagatttcccttagcttccactgtctccatgagctttaaaatgtactagaaggtttcagccagtactcactccagatctgagagtctcagggcccccaattgtaggcacaaggaggtcctgtgggattccccatcagtcacagtcactaatctgaaatcattaaagtggcacgtgcttctc

SEQ ID NO: 1027 - protein, 574 aa, Rattus norvegicus
  ref <308>: DATABASE ACCESSION NUMBER: SWISS-Prot / AAC17177
  ref <309>: DATABASE ENTRY DATE: 2002-03-01
MALLWLLSVFLLVPGTQGAKDGDMRLVNGASASEGRVEIFYRGRWGTVCDNLWNLLDAHVVCRALGYENATQALSRAAFGPGKGPIMLDEVECTGNESSLANCSSLGWMVSHCGHEKDAGVVCSNDSRGIHILDLSGELPDALGQIFDSQQDCDLFIQVTGQGHGDLSLCAHTLILRTNPEAQALWQVVGSSVIMRVDAECMPVVRDFLRYFYSRRIEVSMSSVKCLHKLASAYGATELQGYCGRLFVTLLPQDPTFHTPLELYEYAQATGDSVLEDLCVQFLAWNFEPLTQAEAWLSVPNALIQALLPKSELAVSSELDLLKAVDQWSTATGASHGDVERLVEQIRFPMMLPQELFELQFNLSLYQGHQALFQRKTMEALEFHTVPLKVLAKYRSLNLTEDVYKPRLYTSSTWSSLLMAGAWSTQSYKYRQFYTYNYGSQSRYSSYQNFQTPQHPSFLFKDKLISWSATYLPTIQSCWNYGFSCTSDELPVLGLTTSSYSDPTIGYENKALILCGGYSVVDVTTFIGSKAPIPGTQETNSSKTPSLFPCASGAFSSFREVIRPFYLTNSTDTE

SEQ ID NO: 1028 - DNA, 2254 bp, Homo sapiens
  ref <308>: DATABASE ACCESSION NUMBER: Refseq / NM_005567
  ref <309>: DATABASE ENTRY DATE: 2001-06-20
aatcgaaagtagactcttttctgaagcatttcctgggatcagcctgaccacgctccatactgggagaggcttctgggtcaaaggaccagtctgcagagggatcctgtggctggaagcgaggaggctccacacggccgttgcagctaccgcagccaggatctgggcatccaggcacggccatgacccctccgaggctcttctgggtgtggctgctggttgcaggaacccaaggcgtgaacgatggtgacatgcggctggccgatgggggcgccaccaaccagggccgcgtggagatcttctacagaggccagtggggcactgtgtgtgacaacctgtgggacctgactgatgccagcgtcgtctgccgggccctgggcttcgagaacgccacccaggctctgggcagagctgccttcgggcaaggatcaggccccatcatgctggacgaggtccagtgcacgggaaccgaggcctcactggccgactgcaagtccctgggctggctgaagagcaactgcaggcacgagagagacgctggtgtggtctgcaccaatgaaaccaggagcacccacaccctggacctctccagggagctctcggaggcccttggccagatctttgacagccagcggggctgcgacctgtccatcagcgtgaatgtgcagggcgaggacgccctgggcttctgtggccacacggtcatcctgactgccaacctggaggcccaggccctgtggaaggagccgggcagcaatgtcaccatgagtgtggatgctgagtgtgtgcccatggtcagggaccttctcaggtacttctactcccgaaggattgacatcaccctgtcgtcagtcaagtgcttccacaagctggcctctgcctatggggccaggcagctgcagggctactgcgcaagcctctttgccatcctcctcccccaggacccctcgttccagatgcccctggacctgtatgcctatgcagtggccacaggggacgccctgctggagaagctctgcctacagttcctggcctggaacttcgaggccttgacgcaggccgaggcctggcccagtgtccccacagacctgctccaactgctgctgcccaggagcgacctggcggtgcccagcgagctggccctactgaaggccgtggacacctggagctggggggagcgtgcctcccatgaggaggtggagggcttggtggagaagatccgcttccccatgatgctccctgaggagctctttgagctgcagttcaacctgtccctgtactggagccacgaggccctgttccagaagaagactctgcaggccctggaattccacactgtgcccttccagttgctggcccggtacaaaggcctgaacctcaccgaggatacctacaagccccggatttacacctcgcccacctggagtgcctttgtgacagacagttcctggagtgcacggaagtcacaactggtctatcagtccagacgggggcctttggtcaaatattcttctgattacttccaagccccctctgactacagatactacccctaccagtccttccagactccacaacaccccagcttcctcttccaggacaagagggtgtcctggtccctggtctacctccccaccatccagagctgctggaactacggcttctcctgctcctcggacgagctccctgtcctgggcctcaccaagtctggcggctcagatcgcaccattgcctacgaaaacaaagccctgatgctctgcgaagggctcttcgtggcagacgtcaccgatttcgagggctggaaggctgcgattcccagtgccctggacaccaacagctcgaagagcacctcctccttcccctgcccggcagggcacttcaacggcttccgcacggtcatccgccccttctacctgaccaactcctcaggtgtggactagacgcgtggccaagggtggtgagaaccggagaaccccaggacgccctcactgcaggctcccctcctcggcttccttcctctctgcaatgaccttcaacaaccggccaccagatgtcgccctactcacctgaggctcagcttcaagaaattactggaaggcttccactagggtccaccaggagttctcccaccacctcaccagtttccaggtggtaagcaccaggaggccctcgaggttgctctggatccccccacagcccctggtcagtctgcccttgtcactggtctgaggtcattaaaattacattgaggttccta

SEQ ID NO: 1029 - protein, 585 aa, Homo sapiens
  ref <308>: DATABASE ACCESSION NUMBER: Refseq / NP_005558
  ref <309>: DATABASE ENTRY DATE: 2001-06-20
MTPPRLFWVWLLVAGTQGVNDGDMRLADGGATNQGRVEIFYRGQWGTVCDNLWDLTDASVVCRALGFENATQALGRAAFGQGSGPIMLDEVQCTGTEASLADCKSLGWLKSNCRHERDAGVVCTNETRSTHTLDLSRELSEALGQIFDSQRGCDLSISVNVQGEDALGFCGHTVILTANLEAQALWKEPGSNVTMSVDAECVPMVRDLLRYFYSRRIDITLSSVKCFHKLASAYGARQLQGYCASLFAILLPQDPSFQMPLDLYAYAVATGDALLEKLCLQFLAWNFEALTQAEAWPSVPTDLLQLLLPRSDLAVPSELALLKAVDTWSWGERASHEEVEGLVEKIRFPMMLPEELFELQFNLSLYWSHEALFQKKTLQALEFHTVPFQLLARYKGLNLTEDTYKPRIYTSPTWSAFVTDSSWSARKSQLVYQSRRGPLVKYSSDYFQAPSDYRYYPYQSFQTPQHPSFLFQDKRVSWSLVYLPTIQSCWNYGFSCSSDELPVLGLTKSGGSDRTIAYENKALMLCEGLFVADVTDFEGWKAAIPSALDTNSSKSTSSFPCPAGHFNGFRTVIRPFYLTNSSGVD

SEQ ID NO: 1030 - DNA, 2151 bp, Rattus norvegicus; identical to SEQ ID NO: 1026
  ref <308>: DATABASE ACCESSION NUMBER: EMBL / AF065438
  ref <309>: DATABASE ENTRY DATE: 1998-05-26

SEQ ID NO: 1031 - protein, 574 aa, Rattus norvegicus; identical to SEQ ID NO: 1027
  ref <308>: DATABASE ACCESSION NUMBER: SWISS-Prot / AAC17177
  ref <309>: DATABASE ENTRY DATE: 2002-03-01

SEQ ID NO: 1032 - DNA, 2254 bp, Homo sapiens; identical to SEQ ID NO: 1028
  ref <308>: DATABASE ACCESSION NUMBER: Refseq / NM_005567
  ref <309>: DATABASE ENTRY DATE: 2001-06-20

SEQ ID NO: 1033 - protein, 585 aa, Homo sapiens; identical to SEQ ID NO: 1029
  ref <308>: DATABASE ACCESSION NUMBER: Refseq / NP_005558
  ref <309>: DATABASE ENTRY DATE: 2001-06-20

SEQ ID NO: 1034 - DNA, 1099 bp, Rattus norvegicus
  ref <308>: DATABASE ACCESSION NUMBER: EMBL / AF067790
  ref <309>: DATABASE ENTRY DATE: 1998-06-11
cgcagggatctgagcagcagatcgttggggttgctcaggatttcagactggtggaaatcctgtggtgagtccttgaagcctacgggggctccacgcccatagaaggtgggagcatgccggggctatggaggcagaggcttccttcggcttgggctttgcttctcctgcctttcctgccgctgctgttgcccgcagcccccgcaccccaccgcgggtcctacaagccagtgatcgtggtgcatgggctctttgacagttcatacagcttccgccacctgctggactacatcaatgagacacaccccgggactgtggtgacagtgcttgatctcttcgatggcagagagagcttgcgacccctgtgggaacaggttcaagggttccgagaggctgtggtccccatcatggaaaaggcccctgagggggtacacctcatctgctactcccagggaggcctggtgtgccgcgcattgctgtctgtcatggatgagcacaatgtggattccttcatctccctttcttctccacagatgggacagtatggagacacggactatttgaagtggctgttccctttctgccatggctgaggttgggaagcaagcaccaggtttttaactgtggcttcaccgctgctgctgttgcttctccgggtctggctgtaccggaggagaacccagcccctgcccacctcaggggtcttccaggccactcaggacatttttagcttgttattcccatgcccctcttttctgtccctgtggccagcctccccaccgagaggggcgcccgtacaagggggttctgaggctcccctatggggacagttccacttttgaagtgtcagtgttggggaatatctgtggcctgcaaggcccatctcaggtttggggatcccccagtccctatgatcagtgttggggtatcccctgggagcctaggttctttgaggccccagcccctcttttaaccacccttgagtgggtggtccccgtatttatagaaataaaagttccatttcctcaaaaaaaaaaaaaaaaaaaaaaaaaaaaaaaaaaaaaaaaaaaaaaaaaaaaaaaaaaaaaaaaaaaaaaaaaaa

SEQ ID NO: 1035 - protein, 302 aa, Rattus norvegicus
  ref <308>: DATABASE ACCESSION NUMBER: SWISS-Prot / O70489
  ref <309>: DATABASE ENTRY DATE: 2002-06-15
MPGLWRQRLPSAWALLLLPFLPLLLPAAPAPHRGSYKPVIVVHGLFDSSYSFRHLLDYINETHPGTVVTVLDLFDGRESLRPLWEQVQGFREAVVPIMEKAPEGVHLICYSQGGLVCRALLSVMDEHNVDSFISLSSPQMGQYGDTDYLKWLFPTSMRSNLYRICYSPWGQEFSICNYWHDPHHDDLYLNASSFLALINGERDHPNATAWRKNFLRVGRLVLIGGPDDGVITPWQSSFFGFYDANETVLEMEEQPVYLRDSFGLKTLLARGAIVRCPMAGVSHTTWHSNRTLYDACIEPWLS

SEQ ID NO: 1036 - DNA, 2202 bp, Homo sapiens
  ref <308>: DATABASE ACCESSION NUMBER: Refseq / NM_005155
  ref <309>: DATABASE ENTRY DATE: 2002-04-28
ggaagtggggagaatcaaggcggggaaatcggactttcgggtcgctgggggcaacgaagcctggagaggccttctttccattcccagaatatgtttgctgctttttcctctccccactggcctaaatggatcgctccgcctgtttcctccccagcacctagggcgcaatggaatattccattgcccctcctgtcctgggtctgtgttgcggggaacgctcgcgcggttgccagagaaagccccggacgtgacggatttgcgcgaccccaagcagcccgcccttccccctcccatccgtcattcccctgcgttctctttcctcacccttccccccgccaccgtgggttccagacttgggataagtaaacagcgggtggagcgaggcctacggacccaggccaggtgggagtctgcactcttcaaggggcctgggctgctgctcacgggtattaaagaactccgcgttgttcatggctgaggcgatgcattaggaagatcctggacctagagaacaagtcccccgaacgctgagttggaggcgggacttcgggtgcgcgttggcgggagcatgctggggctctgggggcagcggctccccgcggcgtgggtcctgcttctgttgcctttcctgccgctgctgctgcttgcagcccccgcgccccaccgcgcgtcctacaagccggtcatcgtggtgcatgggctcttcgacagctcgtacagcttccgccacctgctggaatacatcaatgagacacaccccgggactgtggtgacagtgctcgatctcttcgatgggagagagagcttgcgacccctgtgggaacaggtgcaagggttccgagaggctgtggtccccatcatggcaaaggcccctcaaggggtgcatctcatctgctactcgcaggggggccttgtgtgccgggctctgctttctgtcatggatgatcacaacgtggattctttcatctccctctcctctccacagatgggacagtatggagacacggactacttgaagtggctgttccccacctccatgcggtctaacctctatcggatctgctatagcccctggggccaggaattctccatctgcaactactggcatgatccccaccacgatgacttgtacctcaatgccagcagcttcctggccctgatcaatggggaaagagaccatcccaatgccacagtatggcggaagaactttctgcgtgtgggccacctggtgctgattgggggccctgatgatggtgttattactccctggcagtccagcttctttggtttctatgatgcaaatgagaccgtcctggagatggaggagcaactggtttatctgcgggattcttttgggttgaagactctattggcccggggggccatagtgaggtgtccaatggccggtatctcccacacagcctggcactccaaccgtaccctttatgagacctgcattgaaccttggctctcctgaggatatattcaggggtccccaggaactcctcggtccagagaccaagtggtggccttggaaagcagatgtcaggctttggtgtgcctgtgaccacctcattgctcccatattatcccccatttttagtagagacggggttttagtagagacttggcctcccagaacccccttcctctgctcctccatgaatgacaattccaggcctcccctacctcatgtcctctcatttgggggattgctccgtgctgtccctttctctcaaggccgaagttgggaagtgagaaaccatgtttttaacttgtggctgcttttgctgctgctgctcctccgtatctggctgtatgggtggagaacccaccccctgcccaccacaggggtctccttccaggccactcaggacatttttagcttctctcctccccatgttcccttttttctctaaagtcccctgacatcagccctcccaactcctaagagggactacccatgagagtggggttctgaggctcccctatggggacagttccgttcttgaagtgtcagtgttggggaatatctgtggcctatgaggcccatctcaggtttggggatcccccagtccctatgatcagtgttggagtacccccctgggagagcctagtttctttgaggccccaggccctcttttaactacctttgaataggtgttatccctgtatttatggaaataaagttccatttcctca

SEQ ID NO: 1037 - protein, 302 aa, Homo sapiens
  ref <308>: DATABASE ACCESSION NUMBER: SWISS-Prot / Q9UMR5
  ref <309>: DATABASE ENTRY DATE: 2002-06-15
MLGLWGQRLPAAWVLLLLPFLPLLLLAAPAPHRASYKPVIVVHGLFDSSYSFRHLLEYINETHPGTVVTVLDLFDGRESLRPLWEQVQGFREAVVPIMAKAPQGVHLICYSQGGLVCRALLSVMDDHNVDSFISLSSPQMGQYGDTDYLKWLFPTSMRSNLYRICYSPWGQEFSICNYWHDPHHDDLYLNASSFLALINGERDHPNATVWRKNFLRVGHLVLIGGPDDGVITPWQSSFFGFYDANETVLEMEEQLVYLRDSFGLKTLLARGAIVRCPMAGISHTAWHSNRTLYETCIEPWLS

SEQ ID NO: 1038 - DNA, 312 bp, Rattus norvegicus
  ref <308>: DATABASE ACCESSION NUMBER: EMBL / AF068860
  ref <309>: DATABASE ENTRY DATE: 1999-09-01
gtctcacgtcctctctgcactctggaccctgacttcaccgacatgaaaactcattactttctcctggtgatgttattttttctcttctcccagatggagctgggtgctggcattctcacaagtcttggacgcagaacagatcaataccgatgcctccaaaatggaggattctgtctccgctccagctgcccatctcataccaaactacaaggaacatgtaaaccagataagcccaactgttgcaggagttgacagtggtttgaagaatggacataaaggacaagcaagggattgtaaaattagtgttttaat

SEQ ID NO: 1039 - protein, 69 aa, Rattus norvegicus
  ref <308>: DATABASE ACCESSION NUMBER: SWISS-Prot / O89117
  ref <309>: DATABASE ENTRY DATE: 2002-06-15
MKTHYFLLVMLFFLFSQMELGAGILTSLGRRTDQYRCLQNGGFCLRSSCPSHTKLQGTCKPDKPNCCRS

SEQ ID NO: 1040 - DNA, 366 bp, Homo sapiens
  ref <308>: DATABASE ACCESSION NUMBER: Refseq / NM_005218
  ref <309>: DATABASE ENTRY DATE: 2002-07-31
gtcagctcagcctccaaaggagccagcctctccccagttcctgaaatcctgagtgttgcctgccagtcgccatgagaacttcctaccttctgctgtttactctctgcttacttttgtctgagatggcctcaggtggtaactttctcacaggccttggccacagatctgatcattacaattgcgtcagcagtggagggcaatgtctctattctgcctgcccgatctttaccaaaattcaaggcacctgttacagagggaaggccaagtgctgcaagtgagctgggagtgaccagaagaaatgacgcagaagtgaaatgaactttttataagcattcttttaataaaggaaaattgcttttgaagtat

SEQ ID NO: 1041 - protein, 68 aa, Homo sapiens
  ref <308>: DATABASE ACCESSION NUMBER: SWISS-Prot / Q09753
  ref <309>: DATABASE ENTRY DATE: 2002-06-15
MRTSYLLLFTLCLLLSEMASGGNFLTGLGHRSDHYNCVSSGGQCLYSACPIFTKIQGTCYRGKAKCCK

SEQ ID NO: 1042 - DNA, 6207 bp, Rattus norvegicus
  ref <308>: DATABASE ACCESSION NUMBER: EMBL / AF069525
  ref <309>: DATABASE ENTRY DATE: 2000-03-03
cacgagcggatcccgggttgaggagacgccgacccgggcgcagagccgagttcctggaaggaggagcgcgcgggaccccaccgtatggccagctccggcacttcgtccccagtgggcgcggggagccccgatcttgagcagggtgactttggatcctgttattcacgaagctctcaaaagtcggatgccaatgcaagttacttgagagcagctcgggcggggcacctggaaaaggcccttgactacatcaaaaatggagtggacgtcaacatctgtaaccagaatgggttgaatgcgctccatcttgcttccaaagaagggcatgtggaagtggtctccgagctgctgcagagagaagccaacgtcgatcagccaacaaagaaaggaaacacagccttacacatcgcatccttggctggacaagcggaagtggtcaaggtcttggttacgaacggagcgaacgtcaacgcacagtctcagaatggcttcacgccgctgtatatggcggcccaggagaaccacctggaagtcgtcaggtttcttctggacaatggtgccagccaaagcctggctacagaggatggcttcacgccattggccgtggctcttcaacaaggtcacgaccaagtcgtatccctcctgctcgagaacgacacgaagggaaaagtgcgcctcccagccctccacatcgcggcccggaaagatgacaccaaagcggcagctctgctcctacagaacgacaccaatgcagacatagagtcaaagagtggcttcaccccactccacatagctgcccactacgggaatatcaatgtggccacgttgctgttaaaccgagcggctgccgtggacttcaccgcacggaatgacatcactcctttgcatgttgcctcgaaacggggaaacgcaaatatggtaaagctgttgctcgaccggggtgcgaagatcgacgccaagaccagggacggtctgaccccgctgcactgcggggcgagaagtggccacgaacaggtggtagagatgttgctggacagagccgcccccatcctttcgaaaaccaagaatggactgtccccactgcacatggccacacaaggagaccatttaaactgcgtccaactcctcctccagcacaacgtgcccgtggatgacgtcaccaacgactacctgaccgccctccacgtggcggcccactgcgggcattacaaagttgccaaggttcttttggataagaaagctaaccccaatgccaaagctctgaatggcttcacccccctccatatcgcctgcaaaaagaaccgaatccgagtaatggaactccttttgaagcacggtgcatctattcaagccgtaaccgagtcgggccttaccccaatccatgtcgctgccttcatgggacatgtaaatatcgtgtcacagctaatgcatcatggagcctccccaaacaccaccaacgtgagaggagaaacagcattgcatatggcggctcggtcggggcaagcagaagtggtgcggtatttggtacaagatggagctcaggtagaagcaaaagctaaggatgagcaacaccccactccacatttcagccgactcgggaaggctgagatagtgcaacaagtcttacagcaaggagcgtccccgaatgcagcaacaacttccgggtacaccccccttcacctttcggccagagaggggcatgaggatgtagctgccttccttctggaccatggagcattcttatccataacaacaaagaagggattcacgcctctgcatgtggctgcaaagtatgggaagcttgaagtggcaagtctcctgctgcagaagagtgcgtctcctgatgccgctgggaagagcgggctaactccactgcatgtagcagcacattacgataatcagaaagtggcccttctgcttttggaccagggagcctcaccccacgcagctgcaaagaacggttatacgccactgcacatcgccgccaagaagaaccagatggacatagccacgtccctgctggagtacggtgctgatgcaaacgccgttacccggcaagggattgcgtccgtccaccttgcagcgcaggaagggcacgtggacatggtgtcgctgctcctcagtagaaatgcgaacgtcaacttgagcaataagaggggcctcaacccactccacctggggggtcaagaagaccgagtgaacgtggctgaggtccttgtcaaccaaggggcccacgtggatgcacagacaaagatgggctacacgccgctccatgtgggctgtcactatggaaacatcaaaatagtcaattttctgctgcagcattctgcgaaagttaatgccaagacaaagaatggatacacgccactgcaccaggcagcccagcaggggcacacacacatcatcaacgtcctgctccagaacaacgcttcccccaatgaactcactgtgaatgggaacacagccctggccatcgcccgacgccttggctacatctcggtggttgacaccctaaaggtcgtgacagaggaaattatgaccaccactaccatcacggagaagcacaaaatgaatgtcccagaaacaatgaatgaagtcctcgacatgtcagacgatgaagttggtaaaggcagcgcccccgaaaagctcagtcatggggaatatatctcagatggtgaagaaggtgaagatgccatcacaggggacactgacaaatctctcggcccacaggacctcaaggagctgggcgatgactccctgcctgccgagggctatgtgggcttcagtctcggagcccgttctggcagtcttcgctccttcagttcggataggtcctacaccctgaacagaagctcctatgcgcgggacagcatgatgatcgaggagcttctggtgccatccaaagagcagcacctcccattcacgagggagtttgactccgactccctcagacactacagttggccagcagacacactggacaatgtgaacctggtctccagccctgtgcattctgggtttctggttagctttatggtggacgcgagagggggctccatgcgaggaagccgccaccacgggatgcggatcatcatccctccccgcaagtgtacggcccccacccgcatcacttgccgcctggtaaagagacataaactggccaacccacccccccatggtggaaggagagggattagcagtaggctggtagaaatgggtcctgcgggggcacaatttttaggcccggtcatagtggaaatccctcattttgggtccatgagaggaaaggagagggaactcattgtcctccggagcgagaacggagagacctggaaggaacaccagtttgacagcaaaaacgaagacctctcggagctcctcaatggcatggacgaagaacttgacagcccagaagagttgggcacaaagcgcatctgcagaatcatcacgaaggatttcccccagtatttcgctgtggtttcccggattaagcaggaaagcaaccagattggtcccgaaggtgggattctgagcagcaccacggtccccctcgtccaggcgtctttcccagagggtgccttaaccaaaaggatccgtgtgggtctgcaggctcagcccgtaccagaggagactgtgaaaaagatccttggaaacaaagcaacgtttagcccaattgtcacggtggagccgaggaggaggaaacataagccgatcaccatgaccatcccgatcaccatgaccatcccggtgcccccaccctcgggagaaggggtgtccaatgggtacaaagggggaaacacgcccagcctgcgattcctctgcaggattacaggagggacttccccggctcagtgggaagacatcacaggcacaacccctctgaccttcataaaggactgtgtgtctttcacaaccaatgtttcagccaggttctggctggcggactgccatcaggtgttagaaaccgtaggcttagcctcgcagctgtacagagagttgatatgtgtcccttacatggccaagtttgttgtttttgccaaaacaaacgaccccgtggaagccgccctaaggtgcttctgtatgacagacgacagagtggacaaaaccctggaacagcaggagaatttcgaggaggttgccagaagcaaagacatcgaggttctggaaggaaagcccatctatgttgattgctatggaaacctggctcctctgaccaaaggagggcagcagcttgtttttaacttctattctttcaaagaaaacagactgccattttccatcaaggttagagacaccagccaagagccctgcgccgtctgtcttttcctgaaggagccgaaaacaacaaaaggattaccccaaacggctgtttgcaacttaaatattactctaccggcgcataaaaaggctgagaaggcagacagacgccagagcttcacatccctagccttacgtaagcgctacagctacttgactgagcccagcatgagtccgcagagtccttgtgagcggacggatatcaggatggcaatagtagccgatcacctgggacttagttggacagagctggcaagggaactgaatttttcagtggatgaaatcaaccaaatacgagtggaaaatcccaattctttaatttctcagagcttcatgttattaaaaaagtgggtgacgagagacgggaagaatgccacaactgatgccttaacttcggtcttaacaaaaattaaccgaatagacatagtaactctgctggaaggaccaatatttgattatgggaatatttcaggcaccagaagctttgcagatgaaaacaatgttttccatgacccagttgatggttggcagaacgagacgccaagtggaagcctagagtccccggcgcaagcgcgaagaatcaccggtgggttactggaccgtctggacgacaggtctgaccaggttcgggatcccattacctcatacctcacaggagaagctgggaagttcgaagcaaacggaaaccacgcagaagtcattccagaagcaaaggccaaggcctactttcctgaatcccaaaacgatatagggaaacagagcatcaaggagaacttgaaaccaaaaacacacggatgtggtcgcgctgaggaaccagtgtcacccctcacaggctaccagaaatctctggaagaaaccagcaagcttgtcatagaagacgcacctaaaccctgtgtgcctgtcggcatgaaaaagatgaccaggactccggctgacggcaaagccaggctcaacctccaggaagaggaggggtccgccaggtcagagcctaagcagggagaaggctataaggtgaaaacaaagaaggaaatccggaatgtggagaagaaagcccactagtgacggtgacgtcagtccaggaccacgcgttcgtactgccagtattgagaaactcaccagagatcagcagggaggagaatctctagcaagagcggagtgtggatctgccaccccacacatcagtgacatgtttggggttttgggtttttttggtttttttttttaatgcagaaggataaagaaaatcaccttttttttatttagcatgagccaatttacagagcatggagactcactttcattcccggcgctgacacgcgtgcactaagcaagtgcaatgtaagatacaagaagccatgttgttcagactcagcctcaagtaatttggtgtcactttcggagaaggacagacaaccaacgacacctgtgccaccggaaggaggggggccagcaccaagtggagcggtcccaatccaggaagacacccttgaaattactaaaacccaccacaagctcgccttatttttcttggacccaaactaactgtcagggtataaacactgtttgtttcttttttttttttaaaagtttaaataataataagagaaatcaatagttttgctgtaaataataacactgtaaattctaacagaagaaactacaataaagaattataaggcacctgcctcacggaacacaaagataccacaaacgcgtccaatgacaggcgtaccaagtggcctcaccctggacaaggacgggaatctggcgcgtgcgggacgctctctcactgactcctgtatattagcaattatgatgtttgtacacgccaaactgctggcttggttttaaaaagaaaatgcaaatctttaaaaaaaaaaaaaaaaaaaaaaa

SEQ ID NO: 1043 - protein, 751 aa, Rattus norvegicus
  ref <308>: DATABASE ACCESSION NUMBER: SWISS-Prot / P97570
  ref <309>: DATABASE ENTRY DATE: 2002-06-15
MQFFGRLVNTLSSVTNLFSNPFRAKEVSLADYASSERVREEGQLILLQNASNRTWDCDLVSPRNPQSDFRLFQLESEADVLVNFQQYSSQLPPFYESSEQVLHVEVLQLTDLIRNHPSWTVTHLAVELGIRECFHHSRIITCANSTENEEGCTPLHLACRKGDSEILVELVQYCHAQMDVTDNKGETAFHYAVQGDNPQVLQLLGKNASAGLNQVNNQGLTPLHLACQMGKQEMVRVLLLCNARCNIMGPGGFPIHTAMKFSQKGCAEMIISMDSNQIHSKDPRYGASPLHWAKNAEMARMLLKRGCDVDSTSASGNTALHVAVTRNRFDCVMVLLTYGANAGARGEHGNTPLHLAMSKDNMEMVKALIVFGAEVDTPNDFGETPAFIASKISKQLQDLMPVSRARKPAFILSSMRDEKRTHDHLLCLDGGGVKGLVIIQLLIAIEKASGVATKDLFDWVAGTSTGGILALAILHSKSMAYMRGVYFRMKDEVFRGSRPYESGPLEEFLKREFGEHTKMTDVKKPKVMLTGTLSDRQPAELHLFRNYDAPEAVREPRCTPNINLKPPTQPADQLVWRAARSSGAAPTYFRPNGRFLDGGLLANNPTLDAMTEIHEYNQDMIRKGQGNKVKKLSIVVSLGTGKSPQVPVTCVDVFRPSNPWELAKTVFGAKELGKMVVDCCTDPDGRAVDRARAWCEMVGIQYFRLNPQLGSDIMLDEVSDAVLVNALWETEVYIYEYREEFQKLVQLLLSP

SEQ ID NO: 1044 - DNA, 3470 bp, Homo sapiens
  ref <308>: DATABASE ACCESSION NUMBER: EMBL / AL136710
  ref <309>: DATABASE ENTRY DATE: 2002-03-20
agctttaaaaggatgtctgcgaagtggtcaaaaggatcttaacctcaattaagtggggttttttaaaaagattttttggggggcctgaaattttgaaaatcttcgaactctgagtggggaaagatgtataattcctcaattgcctacgaggatatcaagatgctgagaggaattcagcggtggtgaagagagtggatacaaaccagggattggtttccttgagctgttttggaggttgattctaaatcactgcttaaggaattcctggaaacatcaggaaaacatttgatcatccaagcctagtggaaatggctttaccgcagagtgaagatgcaatgaccggggacacagacaaatatcttgggccacaggaccttaaggaattgggtgatgattccctgcctgcagagggttacatgggctttagtctcggagcgcgttctgccagcctccgctccttcagttcggatgggtcttacaccttgaacagaagctcctatgcacgggacagcatgatgattgaagaactcctcgtgccatccaaagagcagcatctaacattcacaagggaatttgattcagattctcttagacattacagctgggctgcagacaccttagacaatgtcaatcttgttccaagccccattcattctgggtttctggttagctttatggtggacgcgagagggggctccatgagaggaagccgtcatcacgggatgagaatcatcattcctccacgcaagtgtacggcccccactcgaatcacctgccgtttggtaaagagacataaactggccaacccaccccccatggtggaaggagagggattagccagtaggctggtagaaatgggtcctgcaggggcacaatttttaggccctgtcatagtggaaatccctcactttgggtccatgagaggaaaagagagagaactcattgttcttcgaagtgaaaatggtgaaacttggaaggagcatcagtttgacagcaaaaatgaagatttaaccgagttacttaatggcatggatgaagaacttgatagcccagaagagttagggaaaaagcgtatctgcaggattatcacgaaagatttcccccagtattttgcagtggtttcccggattaagcaggaaagcaaccagattggtcctgaaggtggaattctgagcagcaccacagtgccccttgttcaagcatctttcccagagggtgccctaactaaaagaattcgagtgggcctccaggcccagcctgttccagatgaaattgtgaaaaagatccttggaaacaaagcaacttttagcccaattgtcactgtggaaccaagaagacggaaattccataaaccaatcacaatgaccattccggtgcccccgccctcaggagaaggtgtatccaatggatacaaaggggacactacacccaatctgcgtcttctctgtagcattacagggggcacttcgcctgctcagtgggaagacatcacaggaacaactcctttgacgtttataaaagattgtgtctcctttacaaccaatgtttcagccagattttggcttgcagactgccatcaagttttagaaactgtggggttagccacgcaactgtacagagaattgatatgtgttccatatatggccaagtttgttgtttttgccaaaatgaatgatcccgtagaatcttccttgcgatgtttctgcatgacagatgacaaagtggacaaaactttagagcaacaagagaattttgaggaagtcgcaagaagcaaagatattgaggttctggaaggaaaacctatttatgttgattgttatggaaatttggccccacttaccaaaggaggacagcaacttgtttttaacttttattctttcaaagaaaatagactgccattttccatcaagattagagacaccagccaagagccctgtggtcgtctgtcttttctgaaagaaccaaagacaacaaaaggactgcctcaaacagcggtttgcaacttaaatatcactctgccagcacataaaaagattgagaaaacagatggacgacagagcttcgcatccttagctttacgtaagcgctacagctacttgactgagcctggaatgagtccacagagtccatgtgaacggacagatatcaggatggcaatagtagccgatcacctgggacttagttggacagaactggcaagggaactgaatttttcagtggatgaaatcaatcaaatacgtgtggaaaatccaaattctttaatttctcagagcttcatgtttttaaaaaaatgggttaccagagacggaaaaaatgccacaactgatgccttaacttcggtcttgacaaaaattaatcgaatagatatagtgacactgctagaaggaccaatatttgattatggaaatatttcaggcaccagaagttttgcagatgagaacaatgttttccatgaccctgttgatggttatccttcccttcaagtggaactggaaacccccacagggttgcactacacaccacctacccctttccagcaagatgattattttagtgatatctctagcatagaatctccccttagaacccctagtagactgagtgatgggctagtgccttcccaggggaacatagagcattccgcagatggacctccagtcgtaactgcagaagacgcttccttagaagacagcaaactggaagactcagtgcctttaacagaaatgcctgaagcagtgatgtagatgagagccagttggagaatgtatgtctgagttggcagaatgagacatcaagtggaaacctagagtcctgcgctcaagctcgaagagtaactggtgggttactagatcgactggatgacagccctgaccagtgtagagattccattacctcatatctcaaaggagaagctggcaaatttgaagcaaatggaagccatacagaaatcactccagaagcaaagacaaaatcttactttccagaatcccaaaatgatgtaggaaaacagagtaccaaggaaactctgaaaccaaaaatacatggatctggtcatgttgaagaaccagcatcaccactagcagcatatcagaaatctctagaagaaaccagcaagcttataatagaagagactaaaccctgtgtgcctgtcagtatgaaaaagatgagtaggacttctccagcagatggcaagccaaggcttagcctccatgaagaagaggggtccagtgggtctgagcaaaagcagggagaaggttttaaggtgaaaacgaagaaagaaatccggcatgtggaaaagaagagccactcgtaacagcgaacggtcagtcaaggatcataagtttttactgccagtattgagaaattcgtggaagaaatgtcagcaggaagtaaaaattcaccgagaagtgtgtgtgtgttcgctgcttccacacattaatggcatgattttttttatgcaaaaaaaaaaa

SEQ ID NO: 1045 - protein, 812 aa, Homo sapiens
  misc_feature (1)..(812): Xaa=Unknown amino acid
MALPQSEDAMTGDTDKYLGPQDLKELGDDSLPAEGYMGFSLGARSASLRSFSSDGSYTLNRSSYARDSMMIEELLVPSKEQHLTFTREFDSDSLRHYSWAADTLDNVNLVPSPIHSGFLVSFMVDARGGSMRGSRHHGMRIIIPPRKCTAPTRITCRLVKRHKLANPPPMVEGEGLASRLVEMGPAGAQFLGPVIVEIPHFGSMRGKERELIVLRSENGETWKEHQFDSKNEDLTELLNGMDEELDSPEELGKKRICRIITKDFPQYFAVVSRIKQESNQIGPEGGILSSTTVPLVQASFPEGALTKRIRVGLQAQPVPDEIVKKILGNKATFSPIVTVEPRRRKFHKPITMTIPVPPPSGEGVSNGYKGDTTPNLRLLCSITGGTSPAQWEDITGTTPLTFIKDCVSFTTNVSARFWLADCHQVLETVGLATQLYRELICVPYMAKFVVFAKMNDPVESSLRCFCMTDDKVDKTLEQQENFEEVARSKDIEVLEGKPIYVDCYGNLAPLTKGGQQLVFNFYSFKENRLPFSIKIRDTSQEPCGRLSFLKEPKTTKGLPQTAVCNLNITLPAHKKIEKTDGRQSFASLALRKRYSYLTEPGMSPQSPCERTDIRMAIVADHLGLSWTELARELNFSVDEINQIRVENPNSLISQSFMFLKKWVTRDGKNATTDALTSVLTKINRIDIVTLLEGPIFDYGNISGTRSFADENNVFHDPVDGYPSLQVELETPTGLHYTPPTPFQQDDYFSDISSIESPLRTPSRLSDGLVPSQGNIEHSADGPPVVTAEDASLEDSKLEDSVPLTEMPEAVMX

SEQ ID NO: 1046 - DNA, 432 bp, Rattus norvegicus
  ref <308>: DATABASE ACCESSION NUMBER: EMBL / AF069775
  ref <309>: DATABASE ENTRY DATE: 1998-06-11
tattatcgctgcacagccagcaatttgttggggaaagccagtcacgattttcacgtcatagtagaagagcctccccgctggaaaaagaagcctcagagtgccgtgtacagcacagggagcaacggtatcttgttgtgtgaagcagaaggagaaccccagcccacaatcaaatggagagtcaatggcttgccgattgaaaatcatccatttcctggtgacgttatgttccccagggaaatcagttttacaaacttacagccaaatcatactgctgtatatcagtgcgaagcctcaaatattcatggaaccattttggccaacgccaatattgatgttgtagatgttgttccactgatacaaactaagaatgaagaaaactatgaaactgtggttgggtacagcgctttcttacattgcgagttctttgcttca

SEQ ID NO: 1047 - protein, 144 aa, Rattus norvegicus
  ref <308>: DATABASE ACCESSION NUMBER: SWISS-Prot / AAC21580
  ref <309>: DATABASE ENTRY DATE: 2003-02-01
YYRCTASNLLGKASHDFHVIVEEPPRWKKKPQSAVYSTGSNGILLCEAEGEPQPTIKWRVNGLPIENHPFPGDVMFPREISFTNLQPNHTAVYQCEASNIHGTILANANIDVVDVVPLIQTKNEENYETVVGYSAFLHCEFFAS

SEQ ID NO: 1048 - DNA, 7642 bp, Homo sapiens
  ref <308>: DATABASE ACCESSION NUMBER: EMBL / AF002246
  ref <309>: DATABASE ENTRY DATE: 2000-03-03
cggaccctgcgcgcccccgtcccggctcccggccggctcgggggagaaggcgcccgaggggaggcgccggacagatcgcgtttcggaggcggcgcaggtgctgtaaactgcaaaccataatcctgtcttaatactgcaaacaaatcatagtggaactaaggggaacttaatttactgtttccaggttaactaaggtctcagctgtaaaccaaaagtgagaggagacattaagattttcattcttaccgggttgtcttcttcctgaagagcaatggagccgcttttacttggaagaggactaatcgtatatctaatgttcctcctgttaaaattctcaaaagcaattgaaataccatcttcagttcaacaggttccaacaatcataaaacagtcaaaagtccaagttgcctttcccttcgatgagtattttcaaattgaatgtgaagctaaaggaaatccagaaccaacattttcgtggactaaggatggcaaccctttttatttcactgaccatcggataattccatcgaacaattcaggaacattcaggatcccaaacgaggggcacatatctcactttcaagggaaataccgctgctttgcttcaaataaactgggaatcgctatgtcagaagaaatagaatttatagttccaagtgttccaaaattcccaaaagaaaaaattgaccctcttgaagtggaggagggagatccaattgtcctcccatgcaatcctcccaaaggcctcccacctttacacatttattggatgaatattgaattagaacacatcgaacaagatgaaagagtatacatgagccaaaagggagatctatacttcgcaaacgtggaagaaaaggacagtcgcaatgactactgttgctttgctgcatttccaagattaaggactattgtacagaaaatgccaatgaaactaacagttaacagtttaaagcatgctaatgactcaagttcatccacagaaattggttccaaggcaaattccatcaagcaaagaaaacccaaactgctgttgcctcccactgagagtggcagtgagtcttcaattaccatcctcaaaggggaaatcttgctgcttgagtgttttgctgaaggcttgccaactccacaggttgattggaacaaaattggtggtgacttaccaaaggggagagaagcaaaagaaaattatggcaagactttgaagatagagaatgtctcctaccaggacaaaggaaattatcgctgcacagccagcaatttcttgggaacagccactcacgattttcacgttatagtagaagagcctcctcgctggacaaagaagcctcagagtgctgtgtatagcaccggaagcaatggcatcttgttatgtgaggctgaaggagaacctcaacccacaatcaagtggagagtcaatggctccccagttgacaatcatccatttgctggtgatgttgtcttccccagggaaatcagttttaccaaccttcaaccaaatcatactgctgtgtaccagtgtgaagcctcaaatgtccatggaactatccttgccaatgccaatattgatgttgtggatgtccgtccattgatacaaaccaaagatggagaaaattacgctacagtggttgggtacagtgctttcttacattgcgagttctttgcttcacctgaggcagtcgtgtcctggcagaaggtggaagaagtgaaacccctggagggcaggcggtatcatatctatgaaaatggcacattgcagatcaacagaaccaccgaagaagatgctgggtcttactcatgttgggtagaaaatgctataggaaaaactgcagtcacagccaatttggatattagaaatgctacaaaacttagagtttctcctaagaatcctcgtatccccaaattgcatatgcttgaattacattgtgaaagcaaatgtgactcacatttgaaacacagtttgaagttgtcctggagtaaagatggagaagcctttgaaattaatggcacagaagatggcaggataattattgatggagctaatttgaccatatctaatgtaactttagaggaccaaggtatttactgctgttcagctcatactgctctagacagtgctgccgatataactcaagtaactgttcttgatgttccggatccaccagaaaaccttcacttgtctgaaagacagaacaggagtgttcggctgacctgggaagctggagctgaccacaacagcaatattagcgagtatattgttgaatttgaaggaaacaaagaagagcctggaaggtgggaggaactgaccagagtccaaggaaagaaaaccacagttatcttacctttggctccatttgtgagataccagttcagggtcatagccgtgaacgaagtagggagaagtcagcctagccagccgtcagaccatcatgaaacaccaccagcagctccagataggaatccacaaaacataagggttcaagcctctcaacccaaggaaatgattataaagtgggagcctttgaaatccatggagcagaatggaccaggcctagagtacagagtgacctggaagccacagggagccccagtggagtgggaagaagaaacagtcacaaaccacacattgcgggtgatgacgcctgctgtctatgccccttatgatgtcaaggtccaggctatcaatcaactaggatctgggcctgaccctcagtcagtgactctctattctggagaagactatcctgatacagctccagtgatccatggggtggacgttataaacagtacattagttaaagttacctggtcaacagttccaaaggacagagtacatggacgtctgaaaggctatcagataaattggtggaaaacaaaaagtctgttggatggaagaacacatcccaaagaagtgaacattctaagattttcaggacaaagaaactctggaatggttccttccttagatgcctttagtgaatttcatttaacagtcttagcctataactctaaaggagctggtcctgaaagtgagccttatatatttcaaacaccagaaggagtacctgaacagccaacttttctaaaggtcatcaaagttgataaagacactgccactttatcttggggactacctaagaaattaaatggaaacttaactggctatcttttgcaatatcagataataaatgacacctacgagattggagaattaaatgatattaacattacaactccatcaaagcccagctggcacctctcaaacctgaatgcaactaccaagtacaaattctacttgagggcttgcacttcacagggctgtggaaaaccgatcacggaggaaagctccaccttaggagaagggagtaaaggtatcgggaagatatcaggagtaaatcttactcaaaagactcacccagtagaggtatttgagccgggagctgaacatatagttcgcctaatgactaagaattggggcgataacgatagcatttttcaagatgtaattgagacaagagggagagaatatgctggtttatatgatgacatctccactcaaggctggtttattggactgatgtgtgcgattgctcttctcacactactattattaactgtttgctttgtgaagaggaatagaggtggaaagtactcagttaaagaaaaggaagatttgcatccagacccagaaattcagtcagtaaaagatgaaacctttggtgaatacagtgacagtgatgaaaagcctctcaaaggaagccttcggtcccttaatagggatatgcagcctactgaaagtgctgacagcttagtcgaatacggagagggagaccatggtctcttcagtgaagatggatcatttattggtgcctacgctggatctaaggagaagggatctgttgaaagcaatggaagttctacagcaacttttccccttcgggcataaacacaacatatgtaagcaacgctactggttcaccccaaccttccatatttatctgttcaaaggagcaagaactttcatataggaatagaaacatgctggccgaagatttcatccagaagtcaacatcctgcaattatgttgaaaagagtagtactttcttcaaaatataaaatgccaagcacttcaggcctatgttttgcttatattgttttcaggtgctcaaaatgcaaaacacaaaacaaatcctgcatttagatacacctcaactaaatccaaagtccccattcagtatattccatatttgcctgattttactattcggtgtgtttgcatagatgttgctacttggtgggtttttctccgtatgcacattggtatacagtctctgagaactggcttggtgactttgcttcactacaggttaaaagaccataagcaaactggttatttaaaatgtaaaaaggaatatgaaagtcttattaaaacacttcattgaaaatatacagtctaaatttattatttaaattttactagcaaaagtcttaggtgaacaatcaactagtatttgttgagctcctatttgcccagagatggtcatatttaaacagaagtatacgtttttcagtttcaacatgaatttttttatttctgtcagttatgacatccacgagcatcactttttgtgtctgtttttttttttttcttggactaaattcaactgcatggaagcggtggtcagaaggttgttttatacgagaacaggcagaaagtgcccattgttcaggattctaatagctacatctacttaatatcttcatttctaaattgactgcttttacctttttctcatgtttatataatggtatgcttgcatatatttcatgaatacattgtacatattatgttaatatttacacaatttaaaatatagatgtgttttattttgaagtgagaaaatgaacattaacaggcatgtttgtacagctagaatatattagtaagatactgtttttcgtcattccagagctacaactaataacacgaggttccaaagctgaagactttgtataaagtatttgggttttgttcttgtattgctttctttcaacagtttcaaaataaaatatcatacaaatattgagggaaatgttttcatatttttcaaaataggtttttattgttgaatgtacatctaccccagcccctcaaaagaaaaactgtttacatagaaattcctacacatacgtttgcgtatatgttattttaaacatctttgtggtgagaattttttccccgatattctccttctgtcaaagtcagaacaaattcagggaatttattttctggcagttgtgctccagtccttttaaaattgtacatgaacatgttttagaaacaatatggaggatgatgcatacatgtcggtcaagttcagcgctcgacattttatggaaagatttttttaaccttaccacgaaatacttaactactgtttaagtgaattgacttatttcactttagtttttgaactgtgattattggtatactgttatatcctcaacttggatttatggtaaccccttttagttcatggagaccaaaatttggggtatttataatagtcagcgcaggaatgcacatggaatatctacttgtccttttgaacctcacgagtcatccagaatgtatagacaggaaaagcatgtcttatttaaaactgtaatttatgggctcaggatctgaccgcagtcccgggagtaagcatttcaaagggggaaggcagtgtggtccctaccctgtgtgaatgtgaggatgtagacatccatcagtgcaactcgagctccatcctcctccgatttctaaggttccagttttctggagggacagtcatcatgttttgatttatctgggagaaaactgtggtgcacagcttgtgaggagggcaaggttgtgacgttcgagcttagttctggtgttattctgtctcctcttctttgtcatcagccaaaacgtggtttttaaagagagtcatgcaggttagaaataatgtcaaaaatatttaggaatttaataacctttaagtcagaaactaaaacaaatactgaaatattagctcttcctacacttcgtgttcccctttagctgcctgaaaatcaagattgctcctactcagatcttctgagtggctaaaacttatggatatgaaaaatgagattgaatgatgactatgctttgctatcattgttacctttcctcaatactatttggcaactactgggactcttcagcacaaaaggaatagatctatgattgaccctgattttaattgtgaaattatatgattcatatattttatgaatcagaataaccttcaaataaaataaatctaagtcggttaaaatggatttcatgattttccctcagaaaatgagtaacggagtcccacggcgtgcaatggtaattataaattggtgatgcttgtttgcaaattgcccactcgtgataagtcaacagccaatatttaaaactttgttcgttactggctttaccctaactttctctagtctactgtcaatatcattttaatgtaattgattgtatatagtctcaagaatggttggtgggcatgagttcctagagaactgtccaagggttgggaaaatccaaattctcttcctggctccagcactgattttgtacataaacattaggcaggttgcttaacctttttatttcaaactctctcaactctaaagtgctaataataatctcagttaccttatctttgtcacagggtgttcttttttatgaagaaaaatttgaaaatgataaaagctaagatgccttctaacttcataagcaaacctttaactaattatgtatctgaaagtcacccccacataccaactcaacttttttcctgtgaacacataaatatatttttatagaaaaacaaatctacataaaataaatctactgtttagtgagcagtatgacttgtacatgccattgaaaattattaatcagaagaaaattaagcagggtctttgctatacaaaagtgttttccactaattttgcatgcgtatttataagaaaaatgtgaatttggtggttttattctatcggtataaaggcatcgatattttagatgcacccgtgtttgtaaaaatgtagagcacaatggaattatgctggaagtctcaaataatatttttttcctattttatactcatggaagagataagctaaagaggggacaataatgagaaatgttggtgtgcttttctaagcatttaaaacataattgccaattgaaaccctaaatatgtttacataccattaagatatgattcatgtaacaatgttaaattaattataatgggattgggtttgttatctgtggtagtatatatcctagtgttcctatagtgaaataagtagggttcagccaaagctttctttgttttgtaccttaaattgttcgattacgtcatcaaaagagatgaaaggtatgtagaacaggttcacgtgattacctttttcttttggcttggattaatattcatagtagaactttataaaacgtgtttgtattgtaggtggtgtttgtattatgcttatgactatgtatggtttgaaaatattttcattatacatgaaattcaactttccaaataaaagttctacttcatgt

SEQ ID NO: 1049 - protein, 1224 aa, Homo sapiens
  ref <308>: DATABASE ACCESSION NUMBER: SWISS-Prot / AAB60937
  ref <309>: DATABASE ENTRY DATE: 2003-02-01
MEPLLLGRGLIVYLMFLLLKFSKAIEIPSSVQQVPTIIKQSKVQVAFPFDEYFQIECEAKGNPEPTFSWTKDGNPFYFTDHRIIPSNNSGTFRIPNEGHISHFQGKYRCFASNKLGIAMSEEIEFIVPSVPKFPKEKIDPLEVEEGDPIVLPCNPPKGLPPLHIYWMNIELEHIEQDERVYMSQKGDLYFANVEEKDSRNDYCCFAAFPRLRTIVQKMPMKLTVNSLKHANDSSSSTEIGSKANSIKQRKPKLLLPPTESGSESSITILKGEILLLECFAEGLPTPQVDWNKIGGDLPKGREAKENYGKTLKIENVSYQDKGNYRCTASNFLGTATHDFHVIVEEPPRWTKKPQSAVYSTGSNGILLCEAEGEPQPTIKWRVNGSPVDNHPFAGDVVFPREISFTNLQPNHTAVYQCEASNVHGTILANANIDVVDVRPLIQTKDGENYATVVGYSAFLHCEFFASPEAVVSWQKVEEVKPLEGRRYHIYENGTLQINRTTEEDAGSYSCWVENAIGKTAVTANLDIRNATKLRVSPKNPRIPKLHMLELHCESKCDSHLKHSLKLSWSKDGEAFEINGTEDGRIIIDGANLTISNVTLEDQGIYCCSAHTALDSAADITQVTVLDVPDPPENLHLSERQNRSVRLTWEAGADHNSNISEYIVEFEGNKEEPGRWEELTRVQGKKTTVILPLAPFVRYQFRVIAVNEVGRSQPSQPSDHHETPPAAPDRNPQNIRVQASQPKEMIIKWEPLKSMEQNGPGLEYRVTWKPQGAPVEWEEETVTNHTLRVMTPAVYAPYDVKVQAINQLGSGPDPQSVTLYSGEDYPDTAPVIHGVDVINSTLVKVTWSTVPKDRVHGRLKGYQINWWKTKSLLDGRTHPKEVNILRFSGQRNSGMVPSLDAFSEFHLTVLAYNSKGAGPESEPYIFQTPEGVPEQPTFLKVIKVDKDTATLSWGLPKKLNGNLTGYLLQYQIINDTYEIGELNDINITTPSKPSWHLSNLNATTKYKFYLRACTSQGCGKPITEESSTLGEGSKGIGKISGVNLTQKTHPVEVFEPGAEHIVRLMTKNWGDNDSIFQDVIETRGREYAGLYDDISTQGWFIGLMCAIALLTLLLLTVCFVKRNRGGKYSVKEKEDLHPDPEIQSVKDETFGEYSDSDEKPLKGSLRSLNRDMQPTESADSLVEYGEGDHGLFSEDGSFIGAYAGSKEKGSVESNGSSTATFPLRA

SEQ ID NO: 1050 - DNA, 840 bp, Rattus norvegicus
  ref <308>: DATABASE ACCESSION NUMBER: EMBL / AF071225
  ref <309>: DATABASE ENTRY DATE: 1998-07-07
gctgcgcctctcggagcgcaatatgaaggtgctcttcgccgccgccctcatcgtgggctccgttgtcttccttttgctgcctggaccctccgtggccaacgataagaagaagggacctaaagtcacagtcaaggtatactttgatttccaaattggagacgaacctgtaggacgagtgacctttggactctttggaaagactgttccaaaaacagtggataattttgtagccttagctacaggagagaaaggatttggctataagaacagcaagttccatcgtgtcatcaaggacttcatgatccagggtggagacttcaccaggggagatggcacaggaggaaagagcatctatggtgagcgcttcccagatgagaacttcaagctgaagcactatgggcccggatgggtgagcatggccaatgcaggcaaagacaccaatggctcccagttcttcataactacagtcaagacctcctggctagacggcaagcacgtggttttcggcaaagttctggaaggcatggatgtggtacggaaggtggagaacaccaagacggacagccgggacaagcccctgaaggatgtgatcattgtagactgtggcaagatcgaagtggagaaaccctttgccattgccaaggagtagagagagcctcggggacctcatccctctaaacagctgtctgtgcgggtcctgtcgattccctcacaggtgaaagcagccagtcacaaggctctgtgcggctctggctccagtgcttccatccgacggggtggccacacccctcacattccacaggcctgatttttatataaaactcctaccaatgctgatat

SEQ ID NO: 1051 - protein, 208 aa, Rattus norvegicus
  ref <308>: DATABASE ACCESSION NUMBER: SWISS-Prot / AAC25590
  ref <309>: DATABASE ENTRY DATE: 2002-10-01
MKVLFAAALIVGSVVFLLLPGPSVANDKKKGPKVTVKVYFDFQIGDEPVGRVTFGLFGKTVPKTVDNFVALATGEKGFGYKNSKFHRVIKDFMIQGGDFTRGDGTGGKSIYGERFPDENFKLKHYGPGWVSMANAGKDTNGSQFFITTVKTSWLDGKHVVFGKVLEGMDVVRKVENTKTDSRDKPLKDVIIVDCGKIEVEKPFAIAKE

SEQ ID NO: 1052 - DNA, 1028 bp, Homo sapiens
  ref <308>: DATABASE ACCESSION NUMBER: Refseq / NM_000942
  ref <309>: DATABASE ENTRY DATE: 2002-11-05
ggcacgaggacggcgcccgccgcccgcccggagcccgcgagcaaccccagtcccccccacccgcgcgtggcggcgccggctccctagccaccgcggccccaccctcttccggcctcagctgtccgggctgctttcgcctccgcctgtggatgctgcgcctctccgaacgcaacatgaaggtgctccttgccgccgccctcatcgcggggtccgtcttcttcctgctgctgccgggaccttctgcggccgatgagaagaagaaggggcccaaagtcaccgtcaaggtgtattttgacctacgaattggagatgaagatgtaggccgggtgatctttggtctcttcggaaagactgttccaaaaacagtggataattttgtggccttagctacaggagagaaaggatttggctacaaaaacagcaaattccatcgtgtaatcaaggacttcatgatccagggcggagacttcaccaggggagatggcacaggaggaaagagcatctacggtgagcgcttccccgatgagaacttcaaactgaagcactacgggcctggctgggtgagcatggccaacgcaggcaaagacaccaacggctcccagttcttcatcacgacagtcaagacagcctggctagatggcaagcatgtggtgtttggcaaagttctagagggcatggaggtggtgcggaaggtggagagcaccaagacagacagccgggataaacccctgaaggatgtgatcatcgcagactgcggcaagatcgaggtggagaagccctttgccatcgccaaggagtagggcacagggacatctttctttgagtgaccgtctgtgcaggccctgtagtccgccacagggctttgagctgcactggccccggtgctggcatctggtggagcggacccactcccctcacattccacaggcccatggactcacttttgtaacaaactcctaccaaccctgaccaataaaaaaaaatgtgggtttttttttttttttaataaaaaaaaaaaaaaaaaaaaa

SEQ ID NO: 1053 - protein, 208 aa, Homo sapiens
  ref <308>: DATABASE ACCESSION NUMBER: SWISS-Prot / P23284
  ref <309>: DATABASE ENTRY DATE: 2002-06-15
MKVLLAAALIAGSVFFLLLPGPSAADEKKKGPKVTVKVYFDLRIGDEDVGRVIFGLFGKTVPKTVDNFVALATGEKGFGYKNSKFHRVIKDFMIQGGDFTRGDGTGGKSIYGERFPDENFKLKHYGPGWVSMANAGKDTNGSQFFITTVKTAWLDGKHVVFGKVLEGMEVVRKVESTKTDSRDKPLKDVIIADCGKIEVEKPFAIAKE

SEQ ID NO: 1054 - DNA, 1590 bp, Rattus norvegicus
  ref <308>: DATABASE ACCESSION NUMBER: EMBL / AF071495
  ref <309>: DATABASE ENTRY DATE: 1998-06-23
cacgcggacatgggcggcagctccagggcacgctgggtggccttggggctgggcgttctagggctgctgtgtgctgcgctcggcgttatcgtgattctcatggtgccctcgctcatcaaacagcaggtgctcaagaatgtccgcatagaccccagcagcctgtcctttgggatgtggaaggagatccctgttcccttctacttgtccgtctacttcttcgaggtggtcaaccccagcgaggtcctaaatggccagaagccagtagtccgggagcgcggaccctatgtctacagggagttcagacaaaaggttaacatcaccttcaatgacaatgacacggtgtcctacatagagaaccgaagccttcatttccagccagacaggtcccagggctcagagagtgactacattgtactgcctaacatcctggtcctgggaggggcagtgatgatggaggacaagcccacaagcctgaagctgctaatgaccttggggttggtcaccatgggccagcgggcctttatgaaccgcacggttggtgagatcctgtggggctatgaggatccgttcgtgaatttcctcagcaaatatttcccagacatgttccccatcaaaggcaaatttggcctgttcgttgggatgaaccactcagagttctggctcttcaccgtcttacagggtgtccagaatttcagcaagatccatctggtggataagtggaacggcctcagcgaggtcaaatattggcattcggaacagtgcaacatgatcaatggtactgccgggcagatgtgggcaccattcatgacacccgaatcctcactggaattcttcagcccagaagcctgcagatctatgaagctcacctaccaggaatcaagggtgttcgaaggcatccccacttatcgcttcacggcccccgatactttgtttgccaacgggtccgtctacccacctaatgaaggcttctgcccgtgccgcgagtccggcattcagaatgtcagcacctgcaggtttggtgcgcccctgtttctctcccagccccacttctacaatgctgaccccgtgctgtcagaagctgttcttggtctgaaccctgacccaagggagcattctttgttccttgacatccacccggtcactgggatccccatgaactgttccgtgaagatgcagctgagtctgtacatcaaatccgtcaagggcgtcgggcaaacagggaagatcgagccagtagtcctgccattgctgtggttcgaacagagcgggatgatgggtggcaagaccctgaacacgttctacacgcagctggtgctgatgccccaggttcttcactacgcgcagtatgtgctgctggggcttggaggcctcctgctgctggtgcccatcatttaccaactgcgcagccaggagaaatgctttttattttggagtggtagtaaaaagggctcgcaggataaggaggccatgcaggcctactctgagtctctgatgtcaccagctgccaagggcacggtagtgcaagaagccaagctgtagggcccagaagacaccacgagccccccaaacctgatagcttggtcagaccag

SEQ ID NO: 1055 - protein, 509 aa, Rattus norvegicus
  ref <308>: DATABASE ACCESSION NUMBER: SWISS-Prot / AAC23892
  ref <309>: DATABASE ENTRY DATE: 2002-10-01
MGGSSRARWVALGLGVLGLLCAALGVIVILMVPSLIKQQVLKNVRIDPSSLSFGMWKEIPVPFYLSVYFFEVVNPSEVLNGQKPVVRERGPYVYREFRQKVNITFNDNDTVSYIENRSLHFQPDRSQGSESDYIVLPNILVLGGAVMMEDKPTSLKLLMTLGLVTMGQRAFMNRTVGEILWGYEDPFVNFLSKYFPDMFPIKGKFGLFVGMNHSEFWLFTVLQGVQNFSKIHLVDKWNGLSEVKYWHSEQCNMINGTAGQMWAPFMTPESSLEFFSPEACRSMKLTYQESRVFEGIPTYRFTAPDTLFANGSVYPPNEGFCPCRESGIQNVSTCRFGAPLFLSQPHFYNADPVLSEAVLGLNPDPREHSLFLDIHPVTGIPMNCSVKMQLSLYIKSVKGVGQTGKIEPVVLPLLWFEQSGMMGGKTLNTFYTQLVLMPQVLHYAQYVLLGLGGLLLLVPIIYQLRSQEKCFLFWSGSKKGSQDKEAMQAYSESLMSPAAKGTVVQEAKL

SEQ ID NO: 1056 - DNA, 2751 bp, Homo sapiens
  ref <308>: DATABASE ACCESSION NUMBER: Refseq / NM_005505
  ref <309>: DATABASE ENTRY DATE: 2002-09-06
ggcacgaggccggatccaccgtgcctctgcggcctgcgtgcccggagtccccgcctgtgtcgtctctgtcgccgtccccgtctcctgccaggcgcggagccctgcgagccgcgggtgggccccaggcgcgcagacatgggctgctccgccaaagcgcgctgggctgccggggcgctgggcgtcgcggggctactgtgcgctgtgctgggcgctgtcatgatcgtgatggtgccgtcgctcatcaagcagcaggtccttaagaacgtgcgcatcgaccccagtagcctgtccttcaacatgtggaaggagatccctatccccttctatctctccgtctacttctttgacgtcatgaaccccagcgagatcctgaagggcgagaagccgcaggtgcgggagcgcgggccctacgtgtacagggagttcaggcacaaaagcaacatcaccttcaacaacaacgacaccgtgtccttcctcgagtaccgcaccttccagttccagccctccaagtcccacggctcggagagcgactacatcgtcatgcccaacatcctggtcttgggtgcggcggtgatgatggagaataagcccatgaccctgaagctcatcatgaccttggcattcaccaccctcggcgaacgtgccttcatgaaccgcactgtgggtgagatcatgtggggctacaaggacccccttgtgaatctcatcaacaagtactttccaggcatgttccccttcaaggacaagttcggattatttgctgagctcaacaactccgactctgggctcttcacggtgttcacgggggtccagaacatcagcaggatccacctcgtggacaagtggaacgggctgagcaaggttgacttctggcattccgatcagtgcaacatgatcaatggaacttctgggcaaatgtggccgcccttcatgactcctgagtcctcgctggagttctacagcccggaggcctgccgatccatgaagctaatgtacaaggagtcaggggtgtttgaaggcatccccacctatcgcttcgtggctcccaaaaccctgtttgccaacgggtccatctacccacccaacgaaggcttctgcccgtgcctggagtctggaattcagaacgtcagcacctgcaggttcagtgcccccttgtttctctcccatcctcacttcctcaacgccgacccggttctggcagaagcggtgactggcctgcaccctaaccaggaggcacactccttgttcctggacatccacccggtcacgggaatccccatgaactgctctgtgaaactgcagctgagcctctacatgaaatctgtcgcaggcattggacaaactgggaagattgagcctgtggtcctgccgctgctctggtttgcagagagcggggccatggagggggagactcttcacacattctacactcagctggtgttgatgcccaaggtgatgcactatgcccagtacgtcctcctggcgctgggctgcgtcctgctgctggtccctgtcatctgccaaatccggagccaagtaggtgctggccagagggcagcccgggctgacagccattcgcttgcctgctgggggaaaggggcctcagatcggaccctctggccaaccgcagcctggagcccacctccagcagcagtcctgcgtctctgccggagtgggagcggtcactgctgggggctgcgcagcacgcttgcgtcttttgcatgccgcgttgccactactctgcctgttctggaaggcctgggaccctcccttggagggggcacagggtcctgaggacaccgtgagccagccaggcctggccgctgggcctgaccggccccccagcccctacaccccgcttctcccggactctcccagcggacagccccccagccccacagcctgagcctcccagctgccatgtgcctgttgcacacctgcacacacgccctggcacacatacacacatgcgtgcaggcttgtgcagacactcagggatggagctgctgctgaagggacttgtagggagaggctcgtcaacaagcactgttctggaaccttctctccacgtggcccacaggcctgaccacaggggctgtgggtcctgcgtccccttcctcgggtgagcctggcctgtcccgttcagccgttgggcccaggcttcctcccctccaaggtgaaacactgcagtcccggtgtggtggctccccatgcaggacgggccaggctgggagtgccgccttcctgtgccaaattcagtggggactcagtgcccaggccctggccacgagctttggccttggtctacctgccaggccaggcaaagcgcctttacacaggcctcggaaaacaatggagtgagcacaagatgccctgtgcagctgcccgagggtctccgcccaccccggccggactttgatccccccgaagtcttcacaggcactgcatcgggttgtctggcgcccttttcctccagcctaaactgacatcatcctatggactgagccggccactctctggccgaagtggccgcaggctgtgcccccgagctgcccccaccccctcacagggtccctcagattataggtgcccaggctgaggtgaagaggcctgggggccctgccttccgggcgctcctggaccctggggcaaacctgtgacccttttctactggaatagaaatgagttttatcatctttgaaaaataattcactcttgaagtaataaacgtttaaaaaaaaaaaaaaaaaa

SEQ ID NO: 1057 - protein, 552 aa, Homo sapiens
  ref <308>: DATABASE ACCESSION NUMBER: Refseq / NP_005496
  ref <309>: DATABASE ENTRY DATE: 2002-09-06
MGCSAKARWAAGALGVAGLLCAVLGAVMIVMVPSLIKQQVLKNVRIDPSSLSFNMWKEIPIPFYLSVYFFDVMNPSEILKGEKPQVRERGPYVYREFRHKSNITFNNNDTVSFLEYRTFQFQPSKSHGSESDYIVMPNILVLGAAVMMENKPMTLKLIMTLAFTTLGERAFMNRTVGEIMWGYKDPLVNLINKYFPGMFPFKDKFGLFAELNNSDSGLFTVFTGVQNISRIHLVDKWNGLSKVDFWHSDQCNMINGTSGQMWPPFMTPESSLEFYSPEACRSMKLMYKESGVFEGIPTYRFVAPKTLFANGSIYPPNEGFCPCLESGIQNVSTCRFSAPLFLSHPHFLNADPVLAEAVTGLHPNQEAHSLFLDIHPVTGIPMNCSVKLQLSLYMKSVAGIGQTGKIEPVVLPLLWFAESGAMEGETLHTFYTQLVLMPKVMHYAQYVLLALGCVLLLVPVICQIRSQVGAGQRAARADSHSLACWGKGASDRTLWPTAAWSPPPAAVLRLCRSGSGHCWGLRSTLASFACRVATTLPVLEGLGPSLGGGTGS

SEQ ID NO: 1058 - DNA, 1469 bp, Rattus norvegicus
  ref <308>: DATABASE ACCESSION NUMBER: EMBL / AF072411
  ref <309>: DATABASE ENTRY DATE: 2000-08-30
tgattctgctgcacgaggaggagaatgggctgcgatcggaactgtgggctcattactggagccgttattggtgctgtcctggctgtgtttggaggcattctcatgccggttggagacctactcattgagaagacaatcaaaagggaagttgtccttgaagaaggaaccattgctttcaaaaactgggtgaaaacgggcaccactgtgtacagacagttttggatctttgacgtgcaaaacccagaggaagtggcaaagaatagcagcaagatcaaggttaaacagagaggtccttacacatacagagttcgttatttagccaaggaaaatataactcaggaccccaaggacagcactgtctcttttgtacaacccaatggagccatctttgagccttcactgtctgttggaacagagaatgacaacttcacagttctcaatctggctgtggcagctgcaccacatatctacacaaactcatttgttcaaggtgtgctcaacagccttatcaaaaagtccaagtcttctatgttccaaacacgaagtttgaaggaactcttgtggggttacaaagatccattcttgagtttggttccatatcctataagtaccacagttggtgtgttttatccttacaataacactgtagatggagtttataaagttttcaatggaaaggataacataagcaaggttgccataattgatacctataaagggaaaaggaatttgtcctattgggaaagttattgcgacatgattaatggcacagatgcagcctcctttccaccttttgttgagaagtctcaaacactgaggttcttttcctctgacatttgcaggtccatctatgctgtgtttgaatctgaagtgaaccttaaaggaatccccgtatacagatttgttcttccagccaacgcctttgcctccccactccagaacccagacaaccactgtttctgcactgaaaaagtaatctcaaataactgtacgtcgtatggtgtgctggacattggcaagtgcaaagaaggaaagcctgtgtacatttctcttccacatttcctacatgcaagtcctgatgtctcagaacctatcgaaggcttgaatcctaacgaagatgagcataggacatacttggatgtggaacccataactggattcactctacagtttgcaaaacgactgcaggtcaacatactggtcaagccagctagaaaaatagaagcactgaagaatctgaagagaccttacattgtacctatactgtggctaaatgagactgggaccatcggcgatgagaaagcagaaatgttcagaaaccaagtgaccgggaaaataaagctcctgggcctggttgagatggtcttacttggtgttggagtagtgatgtttgttgcttttatgatttcatactgtgcttgcagatctaagaatggaaaataagtagtggatgagcctacattatgcac

SEQ ID NO: 1059 - protein, 471 aa, Rattus norvegicus
  ref <308>: DATABASE ACCESSION NUMBER: SWISS-Prot / Q07969
  ref <309>: DATABASE ENTRY DATE: 1999-07-15
GCDRNCGLITGAVIGAVLAVFGGILMPVGDLLIEKTIKREVVLEEGTIAFKNWVKTGTTVYRQFWVFDVQNPEEVAKNSSKIKVIQRGPYTYRVRYLAKENITQDPKDSTVSFVQPNGAIFEPSLSVGTENDNFTVLNLAVAAAPHIYTNSFVQGVLNSLIKKSKSSMFQTRSLKELLWGYKDPFLSLVPYPISTTVGVFYPYNNTVDGVYKVSNGKDNISKVAIIDTYKGKRNLSYWESYCDMINGTDAASFPPLGEKSRTLRFFSSDICRSIYAVFESEVNLKGIPVYRFVLPANAFASPLQNPDNHCFCTEKVISNNCTSYGVLDIGKCKEGKPVYNSLPHFLHASPDVSEPIEGLNPTEDEHRTYLDVEPITGFTLQFSKRLQVNILVKPARKIEALKNLKRPYIVPILWLNETGTIGDEKAEMFRNQVTGKIKLLGLVEMVLLGVGVVMFVAFMISYCACRSKNGK

SEQ ID NO: 1060 - DNA, 1749 bp, Homo sapiens
  ref <308>: DATABASE ACCESSION NUMBER: EMBL / BC008406
  ref <309>: DATABASE ENTRY DATE: 2001-07-13
gaggactgcagtgtaggactttcctgcagaataccatttgatcctattaagaattgtccaaatgttggagcatttgattgaaaaatccttcttagccattttaaagatagctttccaatgattagacgaattgattctttctgtgactcatcagttcatttcctgtaaaattcatgtcttgctgttgatttgtgaataagaaccagagcttgtagaaaccactttaatcatatccaggagtttgcaagaaacaggtgcttaacactaattcacctcctgaacaagaaaaatgggctgtgaccggaactgtgggctcatcgctggggctgtcattggtgctgtcctggctgtgtttggaggtattctaatgccagttggagacctgcttatccagaagacaattaaaaagcaagttgtcctcgaagaaggtacaattgcttttaaaaattgggttaaaacaggcacagaagtttacagacagttttggatctttgatgtgcaaaatccacaggaagtgatgatgaacagcagcaacattcaagttaagcaaagaggtccttatacgtacagagttcgttttctagccaaggaaaatgtaacccaggacgctgaggacaacacagtctctttcctgcagcccaatggtgccatcttcgaaccttcactatcagttggaacagaggctgacaacttcacagttctcaatctggctgtggcagctgcatcccatatctatcaaaatcaatttgttcaaatgatcctcaattcacttattaacaagtcaaaatcttctatgttccaagtcagaactttgagagaactgttatggggctatagggatccatttttgagtttggttccataccctgttactaccacagttggtctgttttatccttacaacaatactgcagatggagtttataaagttttcaatggaaaagataacataagtaaagttgccataatcgacacatataaaggtaaaaggaatctgtcctattgggaaagtcactgcgacatgattaatggtacagatgcagcctcatttccaccttttgttgagaaaagccaggtattgcagttcttttcttctgatatttgcaggtcaatctatgctgtatttgaatccgacgttaatctgaaaggaatccctgtgtatagatttgttcttccatccaaggcctttgcctctccagttgaaaacccagacaactattgtttctgcacagaaaaaattatctcaaaaaattgtacatcatatggtgtgctagacatcagcaaatgcaaagaagggagacctgtgtacatttcacttcctcattttctgtatgcaagtcctgatgtttcagaacctattgatggattaaacccaaatgaagaagaacataggacatacttggatattgaacctataactggattcactttacaatttgcaaaacggctgcaggtcaacctattggtcaagccatcagaaaaaattcaagtattaaagaatctgaagaggaactatattgtgcctattctttggcttaatgagactgggaccattggtgatgagaaggcaaacatgttcagaagtcaagtaactggaaaaataaacctccttggcctgatagaaatgatcttactcagtgttggtgtggtgatgtttgttgcttttatgatttcatattgtgcatgcagatcgaaaacaataaaataagtaagtatgtaccaaaaaaaaaaaaaaaaaaaaaaaaaaaa

SEQ ID NO: 1061 - protein, 471 aa, Homo sapiens
  ref <308>: DATABASE ACCESSION NUMBER: SWISS-Prot / P16671
  ref <309>: DATABASE ENTRY DATE: 2002-06-15
GCDRNCGLIAGAVIGAVLAVFGGILMPVGDLLIQKTIKKQVVLEEGTIAFKNWVKTGTEVYRQFWIFDVQNPQEVMMNSSNIQVKQRGPYTYRVRFLAKENVTQDAEDNTVSFLQPNGAIFEPSLSVGTEADNFTVLNLAVAAASHIYQNQFVQMILNSLINKSKSSMFQVRTLRELLWGYRDPFLSLVPYPVTTTVGLFYPYNNTADGVYKVFNGKDNISKVAIIDTYKGKRNLSYWESHCDMINGTDAASFPPFVEKSQVLQFFSSDICRSIYAVFESDVNLKGIPVYRFVLPSKAFASPVENPDNYCFCTEKIISKNCTSYGVLDISKCKEGRPVYISLPHFLYASPDVSEPIDGLNPNEEEHRTYLDIEPITGFTLQFAKRLQVNLLVKPSEKIQVLKNLKRNYIVPILWLNETGTIGDEKANMFRSQVTGKINLLGLIEMILLSVGVVMFVAFMISYCACRSKTIK

SEQ ID NO: 1062 - DNA, 1469 bp, Rattus norvegicus; identical to SEQ ID NO: 1058
  ref <308>: DATABASE ACCESSION NUMBER: EMBL / AF072411
  ref <309>: DATABASE ENTRY DATE: 2000-08-30

SEQ ID NO: 1063 - protein, 471 aa, Rattus norvegicus; identical to SEQ ID NO: 1059
  ref <308>: DATABASE ACCESSION NUMBER: SWISS-Prot / Q07969
  ref <309>: DATABASE ENTRY DATE: 1999-07-15

SEQ ID NO: 1064 - DNA, 1749 bp, Homo sapiens; identical to SEQ ID NO: 1060
  ref <308>: DATABASE ACCESSION NUMBER: EMBL / BC008406
  ref <309>: DATABASE ENTRY DATE: 2001-07-13

SEQ ID NO: 1065 - protein, 471 aa, Homo sapiens; identical to SEQ ID NO: 1061
  ref <308>: DATABASE ACCESSION NUMBER: SWISS-Prot / P16671
  ref <309>: DATABASE ENTRY DATE: 2002-06-15

SEQ ID NO: 1066 - DNA, 2971 bp, Rattus norvegicus
  ref <308>: DATABASE ACCESSION NUMBER: EMBL / AF072439
  ref <309>: DATABASE ENTRY DATE: 1998-06-29
tactcactatagggctcgagcggccgcccgggcaggttctgactccaacaaggacctgacaaagccagaggcggtgggccggaggagtacggacaaagccaggcgtccgaaggagatggctacacccgagcctgcagagagcgatgcggaatgggagcagctggaacctgggcagagaaacttgtacaaggatacaaagctagagacctgcagcaatccagcctcgatgggaaatcaagatcccaaacaaggcctagtctctaagttggatggagaagaagagcggtggtcttcagtgagggcaaataagaacagctcaagtagtctgcacagactcaagaaaacaggaaccagtgcaaaggtccaacaagatggtgcacagacggaggggaagcagaaattccaaaggaaactcacttcagaagtgacattcaggaagaaaagttcaaacagtaagaaaagcagtgagtgtacattgttggagaagaaaaatgtccattcaaaacatgatccttctgaaaaaagattgcataaatccaatttgtatgggaagaacttgaatcagaatttagacttacccagtcagattaaaatctctgcgaaaaagaaacccgatacagctaatgaatataggaaatcactcagccattctgcatccgatgtgaacagagatgaaatttcaactagaaagaaatgtgacaagtcacccaacaataaattgtttggtaaaggtgacaaaaaccaaacaggcaagaaatgtgagaaagtatgccgtcataccgcatcccataccaaggaagacaaaattcataccggggaaaaacggaaatcaccctgccgtagtccatctaaatctgacaaggctccaggctctgggaaaccttatgaatgtaatcaatgtgggaaggtcctcagccataaacaggggctccttgaccatcaaagaactcatgccggggaagaaccatatgaatgttacgaatgcgggatagctttcagccaaaagtcccaccttgtcgtacatcagaaaactcccactggggaaaaggcgccatacgagtgtgtccagtgtggcaaagcccacggtcacaaacatgccctcactgaccacctgagaatatcccataccggagaaaagccctacaaatgtaatgaatgtggcaaaacctttaggcacagctcaaaccttatgcaacacataagatctcacacgggcgagaagccgtacgagtgtaaggagtgtggcaaatccttcagatataattcatctttcaccgaacatgtgagaacacacacaggcgaaataccctatgaatgtaatgaatgtggcaaagcttttaagtatggctcatccctgactaaacacatgcgaattcatacaggcgagaagccatttgaatgtactgagtgtgggaagacttttagcaaaaagtcacacctagttatacatcagagaactcacacgaaggagaaaccttataaatgtaaggagtgtggcaaagcctttggacatagctcatctcttacttatcacatgagaactcacaccggggattgcccttttgaatgtaataaatgtggcaaggctttcaagcaaatcgagggccttactcaacaccagagagttcatacaggagagaaaccctatgagtgtgttgaatgtggaaaagccttcagtcagaagtcacacctcatcgtacatcagagaactcatacaggggagaagccctttgaatgttatgagtgcggaaaggccttcaatgcaaaatcacaacttgttattcatcagagatcccacactggagagaaaccctataaaccctatgagtgtgttgaatgtggcaaggccttcaaacaaaatgcttctcttaccagacatatgaagactcactcggaagaacaatctcaggaggaagattaatgtgggaactctgacaggtgactggtttgaaatgtttaaccctcaagatgtatttagtttgatgatgttagagtctttttttaagagtatgaatctttacatgagatcattagatggtaataaagtttaaacttcatcctaaactttctttccaggaaatagtgtgttttactgtacaatggccatattgataatgattggccaggtagtctcagggattctcttagcctcactttcccagttatgaggttgcaagatgcacagcagcaaaatcaaaatcccacccctaggaaccacatcaaaatctaaatacgacgaagcgctcacggaacatcataactacgaaactccagattaaagaataaagaagaccacatgaccaaaatatggtttaatttacaagccaaagggcaaaacaaaaacttccaaaaaaagggaacaggactcaacaaaaagggaactcgtgttacacacacacacacacacacacacacacacacacacaaatttgtgaaaatgttaattagagcaacaaacagtaaaatacagtaattcatgtactttttacgcgtgtgcttagccaccacaattagtatttattttgcatttatgtttactgaaatactagggcctgtgtaaaatacaggcgagggtatcctctggtatcgcctagcttcctttgttaatgtcttcgttaggttctgaagtaataaaaaattttagggaggtcttttgttttgttttgtttgaacagaatcttaccatattagtgctggctaaccaagaacttgttatgttaaaccatgctgaccttgaagtttttatgttaaacaggctggccttgaactccccaaaaatgtgcctgtctctgcctccccaagttgcctagaattaaaaacttccaaagaaaaacttggaaggaatttttcctaaaattttggtttaaataaaaaattcaaattaaaaatgttggaaaaacaactgggcaatgttttttgttaatgaaatggtactggtttatatcggtttaaacttccaaaaatcccaata

SEQ ID NO: 1067 - protein, 601 aa, Rattus norvegicus
  ref <308>: DATABASE ACCESSION NUMBER: SWISS-Prot / O88553
  ref <309>: DATABASE ENTRY DATE: 2001-10-16
MATPEPAESDAEWEQLEPGQRNLYKDTKLETCSNPASMGNQDPKQGLVSKLDGEEERWSSVRANKNSSSSLHRLKKTGTSAKVQQDGAQTEGKQKFQRKLTSEVTFRKKSSNSKKSSECTLLEKKNVHSKHDPSEKRLHKSNLYGKNLNQNLDLPSQIKISAKKKPDTANEYRKSLSHSASDVNRDEISTRKKCDKSPNNKLFGKGDKNQTGKKCEKVCRHTASHTKEDKIHTGEKRKSPCRSPSKSDKAPGSGKPYECNQCGKVLSHKQGLLDHQRTHAGEEPYECYECGIAFSQKSHLVVHQKTPTGEKAPYECVQCGKAHGHKHALTDHLRISHTGEKPYKCNECGKTFRHSSNLMQHIRSHTGEKPYECKECGKSFRYNSSFTEHVRTHTGEIPYECNECGKAFKYGSSLTKHMRIHTGEKPFECTECGKTFSKKSHLVIHQRTHTKEKPYKCKECGKAFGHSSSLTYHMRTHTGDCPFECNKCGKAFKQIEGLTQHQRVHTGEKPYECVECGKAFSQKSHLIVHQRTHTGEKPFECYECGKAFNAKSQLVIHQRSHTGEKPYKPYECVECGKAFKQNASLTRHMKTHSEEQSQEED

SEQ ID NO: 1068 - DNA, 2308 bp, Homo sapiens
  ref <308>: DATABASE ACCESSION NUMBER: EMBL / AK000351
  ref <309>: DATABASE ENTRY DATE: 2000-02-22
gttttcaggctcttggcggtgaaggtcagagtgcagacctgagaccactgctcaccgacttcagactccagtttatctgtgccccagcttcctcacttagtctcagaagacttaggctgaggcctcagaaggagatctccatcctttgtccagagcagaacaggatggccatgtcccaggaatcattgaccttcaaggacgtgtttgtggacttcaccctggaggagtggcagcaactggactctgcccagaagaacctctacagggatgtcatgcttgagaactacagccacctggtgtccgtggggtatctagttgcgaagcctgatgtgatcttcaggttgggaccaggtggagagtcctggatggcagatggggggaccccggtacggacctgtgcagaagtctggcaagttgatgagcagatagatcactacaaggaaagccaagacaaacttccttggcaagctgcattcataggcaaggaaacactgaaggatgaaagcggtcaagaatccagaacatgtagaaaaagcatttatctgagcacagaatttgattctgtaaggcaaagactccctaaatattattcgtgggaaaaggcattcaaaacatcatttaaactttcttggtcaaaatggaagctatgtaagaaagaaagatgatggatgtaaagcatattggaaagtatgcttccattataatcttcataaagctcaacctgcagagagattttttgaccctaatcaacgagggaaagccctccaccaaaagcaagcccttagaaaaagtcagagaagtcaaactggggagaaactctacaaatgtactgaatgtggaaaagtgtttatccagaaagcaaacttagttgtacatcaaagaactcacaccggagagaaaccttatgaatgctgcgaatgtgcaaaagccttcagccagaagtcaaccctcatagcacaccagagaactcacacaggggagaagccctatgaatgcagtgaatgtggaaaaacctttatccagaagtcaactctgattaaacataagaaaattcatatggagagagaccctataaatgcagtgtctgtgagaaagccttcagtaggaagtcaactctcattaaacatcagataattcatatgggagaaaccttatgaatgtaataaatgtgggaaatcttttagtgttaaatcaactctcattgtatgtcacagaacataaatgcataagttgcatgctattgtgaatagtgtgatgaaattttgcactgtcctgctctttcctgctcaggatgcaaatcagtgaatctttttttttttttttttttgagacagagtcttgctctgtcatccaaactggagtgcagtggcacaatcttggctcactgcaacctccgcctcttgggttcaaccgattctcctgcctcaacctcccaaatagttgggattacaggcacatgccaccatacgcagctaatttgtatttttagtagagacagggtttcaccatgttggccagcctggtcttgaactcctgacctcaagtgatccgcctgcctcagcctcccaaagtgctgggattacaggcatgagccactgcacccggcttgaatcatccttttgtccagtattatatccatgctgtatatgctacccgcccactagtcccttagctgtctcagttgtcagattgactgtcatgggattgcagtgcttgcattaaagctacccttattgtataatgaccccaaagtgcaagagtagtgatgttggcaatttgcatacaccaaaaataagttataaagtgcttccttaaagtgaaatggttaaagttcttgacttaataaagaaaaaaaatgtatgctgaggttgttaagatttacagtaagaatgaatcttctatccagaaattgtgaaggaggaaaaagaaacttgtgctagttttgctgtcacatctgaaactgcaaaagttgtggccacagtgcatcataagtgctaagacgaaaaagacattaaatttgcggatggaaggcgtgaatagaaatgggttctgacagcaatcaggttcggtactattcacagtttcaggcatccgctagggatcttggaacatatcccccatggataagggaggggtactgtaccttgtcatattgtgcattaaagaattcattgagtgtaatcatgtaagtctaacacacatttaaaaagctctcagatatcatttcgccttcggttgatgtaagaaaattcaaagctactcaaatcattcaataaatgataaaattatttaaaaaaaaaaaaaaaaa

SEQ ID NO: 1069 - protein, 597 aa, Homo sapiens
  ref <308>: DATABASE ACCESSION NUMBER: SWISS-Prot / Q9Y6Q3
  ref <309>: DATABASE ENTRY DATE: 2001-10-16
MAVSEPEASAAEWKQLDPAQSNLYNDVMLENYCNQASMGCQAPKPDMISKLEKGEAPWLGKGKRPSQGCPSKIARPKQKETDGKVQKDDDQLENIQKSQNKLLREVAVKKKTQAKKNGSDCGSLGKKNNLHKKHVPSKKRLLKFESCGKILKQNLDLPDHSRNCVKRKSDAAKEHKKSFNHSLSDTRKGKKQTGKKHEKLSSHSSSDKCNKTGKKHDKLCCHSSSHIKQDKIQTGEKHEKSPSLSSSTKHEKPQACVKPYECNQCGKVLSHKQGLIDHQRVHTGEKPYECNECGIAFSQKSHLVVHQRTHTGEKPYECIQCGKAHGHKHALTDHLRIHTGEKPYECAECGKTFRHSSNLIQHVRSHTGEKPYECKECGKSFRYNSSLTEHVRTHTGEIPYECNECGKAFKYSSSLTKHMRIHTGEKPFECNECGKAFSKKSHLIIHQRTHTKEKPYKCNECGKAFGHSSSLTYHMRTHTGESPFECNQCGKGFKQIEGLTQHQRVHTGEKPYECNECGKAFSQKSHLIVHQRTHTGEKPYECNECEKAFNAKSQLVIHQRSHTGEKPYECNECGKTFKQNASLTKHVKTHSEDKSHE

SEQ ID NO: 1070 - DNA, 2971 bp, Rattus norvegicus; identical to SEQ ID NO: 1066
  ref <308>: DATABASE ACCESSION NUMBER: EMBL / AF072439
  ref <309>: DATABASE ENTRY DATE: 1998-06-29

SEQ ID NO: 1071 - protein, 601 aa, Rattus norvegicus; identical to SEQ ID NO: 1067
  ref <308>: DATABASE ACCESSION NUMBER: SWISS-Prot / O88553
  ref <309>: DATABASE ENTRY DATE: 2001-10-16

SEQ ID NO: 1072 - DNA, 2308 bp, Homo sapiens; identical to SEQ ID NO: 1068
  ref <308>: DATABASE ACCESSION NUMBER: EMBL / AK000351
  ref <309>: DATABASE ENTRY DATE: 2000-02-22

SEQ ID NO: 1073 - protein, 597 aa, Homo sapiens; identical to SEQ ID NO: 1069
  ref <308>: DATABASE ACCESSION NUMBER: SWISS-Prot / Q9Y6Q3
  ref <309>: DATABASE ENTRY DATE: 2001-10-16

SEQ ID NO: 1074 - DNA, 4527 bp, Rattus norvegicus
  ref <308>: DATABASE ACCESSION NUMBER: EMBL / AF074609
  ref <309>: DATABASE ENTRY DATE: 2000-09-09
ggttcgacaaatcttagtctgcttccatgagatcagtggcgggctgggattccccatctcctcctagtttcacttctgctcctaacctgttgattccttctgcctggatgacgccttggcaaatctcactcccatttgtgtgctgcgatccttgtgaaccaatcagcttcgcctcagacagtggttataaagttcacgcagccctggagactcagaagcgtctggaatctcagatggcagaggtggcgcaccccacgctgcccctgctgctggcggccaccctggccccgacccagacccgcgcgggtgagtgcgggatcaggagggaaaaggcctctgcggggcagggcggggtcggccttggagaagccgggtccccgggtcgcacaccagaccctctgtcccttctccacctgggactcgaacactgcgccctgctccccaaccggcccgcgcatccgcccgggttaccagaaggaggtcggggtctcaccgcgcgccgcccctaggctcacactcgctgcggtatttctacaccgctgtgtcccggcccggccttggggagccccttttcattgctgtcggctacgtggacgacacgccgttcgtgcgctacgacagcgatgcggagaatccgaggatggagccgcgggtgacgtggatggagcgggaggggccggagtattgggaggaggagacacggagaatccaggaaaccgagcagtggttccaaatggacctgaggaccctgcgcggctactacaaccagaacgaggacggtgagtgaccccgggtcgggggtcaagacccctccgcgttcccacaccacctgcggagacatccctagtccctagtccgaggttcaggagctgaacctactgggtccggtttacctgggtgggtgggcggagctgaccgcgaggtcctcaggctctcacaccatccagagaatctttggctgtgacttgggatcggacgggaaactccgccgcgggtatgatcagctcgcctatgatggcctcgatcacatcgcccttaaagaagacctgaaaaagtggacggtggcagacaaggtggcatggattacccgaagcaggttggagcagactggtgaaacagagagacgaagggcctacctggagggtgaatgcgtggagtctctccacagatacctggagcttgggaaggagcgctctgcggcgtcaggtgcgggggccgcgggcttctcctcctcctgccctcgggctggggctcagtcctggggaagaagaaaccctcagctgggtatgcccctgtctcagagggggagacagtgtccctgggtctcctgatctctcatcacagtgactgcactgcctctcccagggcccagcttctccctggagagttctgagtccctctcaggaaggaaggagagaatttcctgtcttaacagcaggagctccctgctatcagccatggcctctcccaggccaggttctctgcccacacccactctctgaggacactgactcctgtcctgctgagtgtgtcagcccttacacctgaggaccagaagtctcctttacctcataggagacatggactccactacactaggctggttctcccgagtttccagaactttccatagaatacattctcacagatccctccctgatgtggggtttgcttctcttccacaccccaattctctctattcctacagtggagaatggtcccatgagcccttatggggtaccccagaggaacataaattgtgggatttctctttgttttttcttttttttctctctttttcttcttactttcttttttctttcctttttttttttgaagggattattttgcttctagtcaggttttctctgcaaacacatattaaaccaattattttccattccctcttccgttctatgaccacccatctcatgctatagaacatcacataaggacggccatgttgacccactggctcatgtggattccctcttagcttctgagtccctcaggaaagtgtgcagttctgtgctgagggcaccagctctccctgcagctcactagttgatgacagttgaagtgtcagacacacacagttcagtgtcatccttgatttaactgtgtcttgtgtagatttcagtttgtcttgttaactgtgtgatttcttaaatcttccacacagatcccctaaaggtgcatgtgactcttcaccccagacctgaaggtggtgtcaccctgaggtgctgggccctgggcttctaccctgctgaaatcaccctgtcctggcagttgaatggggaggacctgacccaggacgtggagattgtggagaccaggcctgcaggggatggaaccttccagaagtgggcatctgtggtggtgcctcctgggaaggagcagaagtacacatgccatgtggatcatgagggactgcctgagccgattacccagagatggggtaaggatggagccttctgtagaccctgagctggtcagggctgagaggtggggtcatgacccccaccttcatttcttgaacctgtacttcccagagccttctccatccaccgactccaacatggaaacctatgtcatttatgtcgtccttggagctgtggccatcattgcagctgtgatcattggagctgtggtggctgttgtgaggaagaggaggagaaacacaggtaggaaagagcagggtctgtttcccctcagcttcctttagaagagcgctctgctcattaatgggaaacatggccacacccctcattgctgctgtctccaactaggtcctctgtcagttctggaaacttcctcctgtcaagatcttccttgaactctcacagcttttcttctcacaggaggaacaggaggagactacacccctgctccaggttagtgtgggggcaggagtgtccctgaggttattggagtgaagctggagatgctgggagctctgggaatccatagtagctcctccagagaaatcttctgggggtctcagttgtaccatgatatgaatctatacacacacatacatatacattttacatatatacatatacatatgttttgttttaccctaggcagggacagctcctagagctctgatgtgtccctcccagattgtaaaggtgactctgggtctgactggggagggataatgtggacatgattgggtttcagggactcccagaatcccctgtgagtggagggttgttgggctgttgtcttcacagtgatggtttgtgactctcgttctccagcatgaagacagctgcctggagtggactgagtgacagacgatgtgttcaggtctctcctgtgacatccagagccctcagttctctttagacaccagtgtctgaagttccctgtgattctatggcttcagtgtgaagaactgtggagcccagcctgccctgcacaccaggaccctgtccctgcactgcctgtgttcccctccacattcagccttgctggtccagcctagggttcaggggtggggacatctgcatcctgtccccctgtgccaccctgagcttcagcccctcactccacactgagaataagaatctgagtgtgaacttgattgtccacatccttgacacagtgtggatggctttttaaattactggatggaatatttagtggttttttgttttggggttttgctttgtttcgttttgtttttgaaaaaataaatggaagatggagaagcttccagaatctgtgtcactaagctgtgtgtctggtgggacagggtgaggtggtgggagctgagtgtggacagggctgtgcccaggtgtgctcagtcagttcttgtctttgatgggctcaggcctcagctctgtcacctccaggctgtgccctctccatcactgtgaagacatggggagagtctgtgatcacaaggacacagggaaggccagagccttgtcctgaccccaggattatgagccccccagggctgaagatcagagactcaagtggggtcctctaaagtgcagggtgcacaagatgagtccactacatttcctcccacccacttaatttagctgctaatgatgtggtcgggaagctgccctggtctctccctgtggccatgctgctgtggtgatttctgcttctcctctcccagtgcagggaactgccggtataggaagtgcctttttgttgaactttcagaagcacatccacagctggagataactggattagacttttcaaaacctattttcagtaatgggtttcttaaatatgtaacctcccttctcatccaaaccccaccaaaggacatggaaaagaagtgttatgaggatactggagaggtgggcttgtttagaaatggttctctggggcaaattaatctgcagctcagttcacaagaatcagcaatggctggtcagttcagaagaagctgggaggctgagctgtttgctgtgtagtagttcctggggtcaactccaatctctaattgacagtacagcagccgtccaggtccgtagtgtcaggatggcagacacg

SEQ ID NO: 1075 - protein, 363 aa, Rattus norvegicus
  ref <308>: DATABASE ACCESSION NUMBER: SWISS-Prot / AAC33332
  ref <309>: DATABASE ENTRY DATE: 2003-02-01
MAEVAHPTLPLLLAATLAPTQTRAGSHSLRYFYTAVSRPGLGEPLFIAVGYVDDTPFVRYDSDAENPRMEPRVTWMEREGPEYWEEETRRIQETEQWFQMDLRTLRGYYNQNEDGSHTIQRIFGCDLGSDGKLRRGYDQLAYDGLDHIALKEDLKKWTVADKVAWITRSRLEQTGETERRRAYLEGECVESLHRYLELGKERSAASDPLKVHVTLHPRPEGGVTLRCWALGFYPAEITLSWQLNGEDLTQDVEIVETRPAGDGTFQKWASVVVPPGKEQKYTCHVDHEGLPEPITQRWEPSPSTDSNMETYVIYVVLGAVAIIAAVIIGAVVAVVRKRRRNTAFLLTGGTGGDYTPAPGRDSS

SEQ ID NO: 1076 - DNA, 4198 bp, Rattus norvegicus
  ref <308>: DATABASE ACCESSION NUMBER: EMBL / AF076183
  ref <309>: DATABASE ENTRY DATE: 1998-08-17
gacgcgctgagccgctgccgccgcgggggggaagcctgcgagtagctcgcgtgcccgcagtccgcgtaagccccgcgccccttccacccctggccaggccatggcggaacgtggaggggcgggcggtggtcccggaggcgccgggggcggcagcagtcagcggggctctggggttgcccagtccccgcagcagcagccgccgcagcagccatctcagccgcaacagccaacgccccccaaactggcccaggccacctcgtcctcctcgtccacctcggctgcggccgcctcctcctcgtcctcctccacctccacctccatggccgtcgcggtggcctcgggctctgcgcctcccggcggtccgggaccaggccgcacccccgccccagtgcagatgaatttgtatgctacctgggaggtggaccggagctcatccagctgcgtgcccagactcttcagtttgactctgaagaaacttgttatgcttaaagaaatggacaaagatcttaactcagtagtcattgctgtgaagctgcagggttcaaaaaggattcttcgctctaatgagatcatccttccagccagtggcctggtggaaacagagctccagttaaccttctccctccagtaccctcatttccttaagcgagatgccaacaaactgcagattatgttgcaaaggaggaagcggtacaagaaccggactatcttgggctataaaaccttggctgtgggactcatcaacatggcagaggtgatgcaacaccctaacgagggtgctttagtacttggcctgcatagcaacgtaaaggatgtctctgtgcctgtggcagaaataaaaatctactctttatccagccagcccattgaccatgaaggaatcaagtctaagctgtctgatcgctccccagatattgacaactactctgaagaagaggaggaaagcttctcctcagagcaggaaggcagtgatgacccattacatggacaggacctattctatgaagatgaagatcttcggaaagtaaagaagactcgaaggaaactgacctcaacctcagccatcactaggcaaccgaacatcaaacagaagtttgtggccctcctgaaacgattcaaagtttctgatgaggtgggctttgggctagaacatgtgtcaagggagcagattcgggaagtggaagaggacctggatgaactatacgacagtctagaaatgtacaaccccagcgacagtggccctgagatggaagaaacagaaagcatcctcagcaccccaaagcccaagctcaagcccttctttgaggggatgtctcagtccagctcacagacggagatcggcagtctcaacagcaagggcagccttggaaaagacaccaccagccctatggaattggcagctttagaaaaagttaagtctacttggattaaaaaccaagatgacagcttgactgaaacagacactttagaaatcactgaccaggacatgtttggagatgcgagcacaagtctggttgtaccagaaaaagtcaaaactcctatgaagtccagcaaagctgatctgcagggctccgcctcgccgagcaaggtggaagggacacacacacctcgccaaaagaggagcactcccctgaaggagcggcagctctccaagcccctgagtgagaggaccaacagctctgacagtgagcgctctcctgacctagggcacagcacacagattccacgaaaggtggtatacgatcaactgaatcagatcctggtttccgatgcagcgctccctgagaatgtcatcctggtgaacaccacggactggcagggccagtatgtggccgaattgcttcaagaccagaggaagcctgttgtgtgtacctgctcaacagtggaggtccaggccgtgttgtctgccctgctcactaggattcagcgctactgcaactgcaactcatctatgccgaggccagtcaaggtggcagctgtgggcagccagagttacctgagctccatccttcggttttttgtcaagtcccttgccagcaagaccccggactggctgggccacatgcgcttcctcatcgttcccctaggttctcatccagtggccaaatacttgggctcagtagatagtagatatagcagcacctttcttgattctgcttggagagacctgttcagtcgctcagagcctccagtgtcagagccactggatgtggtgggtcgtgtgatgcagtatgtcaatggagctaccacaacgcaccagctgcctgtggctgaagccatgttgacctgcaggcataagttccctgatgaagactcctaccagaagtttatccccttcattggtgttgtgaaagtgggccttgttgaagactcgccctccactgcaggtgatggggacgattcacctgtggtcagccttactgtgccctccacatcaccaccctcaagctcgggcctgagccgagatgccacagctacccctccctcatccccatccatgagcagtgccctcgccatcgtggggagcccaaatagcccttatggggatgtgattggcctccaggtggattactggctgggccaccctggggagcgaaggagagaaggtgataagagggacgccagttcaaagaataccctcaagagtgtcttccgctcagtgcaggtttctcgcctgccccatgcaggggaagcccagctttctggcaccatggcaatgactgtggtcaccaaagagaagaacaagaaagtgcccactatcttcctgagcaagaagccccgggaaaaggaggtggattctaagagccaagtcatcgagggcatcagccgcctcatctgttctgcaaagcagcagcaaaccatgctgagagtgtccattgatggagttgaatggagtgacatcaagttcttccagctggcagctcagtggcccactcatgtcaagcacttcccagtgggactcttcagtggcagcaaacccacctgagacctgcctcccaaccactccctcctggcactgccacccagcccagcctcctttcctagcactggggcttgcctccacttgcccagtcctgaaggacactgccactggggatgcagtcctccctgctcactgcccagccatctctgcccagctcccccctgttccaggcccagagctgggtgatcctgccttctggtgcccataattcctgtaattgaataatctgggccttccttcacctcacccctgcagcgctggtaccctttctagaaatgaaacacctggagttctggtacacagggagacagcccagcatcctacataagctggccacccagctctgcatttctaaggctctgttgcctgttgtactcaccctgccttcctccagcagggctggggcctcctgccattcctcacctgcctcacagtttcccagtagggggaaggaggatggcacctgggcatcctggagtttctgggattgaagggaccttcccagtctcccatgcatgatttcctgacacttcaagtcgcttggatgtcctgtgttttgtgtgtttttagttgtttgggtaacttgtcctgtgcacaggtccttaaggctccttctccctctgcctcccagcctcctacctaacattgctctgtggcttcatgaggtaggagacagcaaacccacccacccacccaccccttcacccctcaacacatacatcatctgtggctctcatccagtcatattgtccccctctcctgtgtcagcttgcctcctggctctgctctgtcatcccacttccttcatggcagggcagcagaatgaggcccttctccaccaggtctccctccagcagcctccttccctctctcagccatgaatgggtcccagacctacctcagcctccttatcagtgtcttcatgagaggctgaggacaagggacagatctggcccagcctccatgccctctgtgtcctatggcacctcagagcttctccgttgcccctcagtgtttcctagcagtgtggcacggaactgcacttggaacctagttttggtgttcttcacatccaaaactcttaagcccctcccgctgcccagcctgtccagagtatctcctgggcctgagaataagtggggtgggaagactggggccatgttgggttttttcattcaataaactggtgatttcttaccaaaaaaaaaaaaaaaa

SEQ ID NO: 1077 - protein, 961 aa, Rattus norvegicus
  ref <308>: DATABASE ACCESSION NUMBER: SWISS-Prot / AAC31815
  ref <309>: DATABASE ENTRY DATE: 2003-02-01
MAERGGAGGGPGGAGGGSSQRGSGVAQSPQQQPPQQPSQPQQPTPPKLAQATSSSSSTSAAAASSSSSSTSTSMAVAVASGSAPPGGPGPGRTPAPVQMNLYATWEVDRSSSSCVPRLFSLTLKKLVMLKEMDKDLNSVVIAVKLQGSKRILRSNEIILPASGLVETELQLTFSLQYPHFLKRDANKLQIMLQRRKRYKNRTILGYKTLAVGLINMAEVMQHPNEGALVLGLHSNVKDVSVPVAEIKIYSLSSQPIDHEGIKSKLSDRSPDIDNYSEEEEESFSSEQEGSDDPLHGQDLFYEDEDLRKVKKTRRKLTSTSAITRQPNIKQKFVALLKRFKVSDEVGFGLEHVSREQIREVEEDLDELYDSLEMYNPSDSGPEMEETESILSTPKPKLKPFFEGMSQSSSQTEIGSLNSKGSLGKDTTSPMELAALEKVKSTWIKNQDDSLTETDTLEITDQDMFGDASTSLVVPEKVKTPMKSSKADLQGSASPSKVEGTHTPRQKRSTPLKERQLSKPLSERTNSSDSERSPDLGHSTQIPRKVVYDQLNQILVSDAALPENVILVNTTDWQGQYVAELLQDQRKPVVCTCSTVEVQAVLSALLTRIQRYCNCNSSMPRPVKVAAVGSQSYLSSILRFFVKSLASKTPDWLGHMRFLIVPLGSHPVAKYLGSVDSRYSSTFLDSAWRDLFSRSEPPVSEPLDVVGRVMQYVNGATTTHQLPVAEAMLTCRHKFPDEDSYQKFIPFIGVVKVGLVEDSPSTAGDGDDSPVVSLTVPSTSPPSSSGLSRDATATPPSSPSMSSALAIVGSPNSPYGDVIGLQVDYWLGHPGERRREGDKRDASSKNTLKSVFRSVQVSRLPHAGEAQLSGTMAMTVVTKEKNKKVPTIFLSKKPREKEVDSKSQVIEGISRLICSAKQQQTMLRVSIDGVEWSDIKFFQLAAQWPTHVKHFPVGLFSGSKPT

SEQ ID NO: 1078 - DNA, 1765 bp, Homo sapiens
  ref <308>: DATABASE ACCESSION NUMBER: EMBL / AL137271
  ref <309>: DATABASE ENTRY DATE: 2000-02-18
gaaaccccgagaaaaggaggtggattctaagagccaggtcattgaaggcatcagccgcctcatctgctcagccaagcagcagcagactatgctgagagtgtccatcgatggggtcgagtggagtgacatcaagttcttccagctggcagcccagtggcccacccatgtcaagcactttccagtgggactcttcagtggcagcaaggccacctgaggccctgtctcccagccactttccctcctggcactgccaccagcctcaccgcctgcgggcagggggaggccagcaggcccgggcccagcaccccttccctggcaccagggtctgcctctcactcgcccaggtcccgaaggacactgccacagggacgccttccctcccctcccctccagcccacccctgcacagcccctcctccttcccgcttttccccttctccctcctgctccaggcccaaggcgtgttggttttgccttctggtgcccatagtcccctggactgagtcccccaggccttccttcacccgacttccaaactcttccttgtggtatcagtttccttctcggaaatgagaaagctggaatcctggtccccagcaggagagcctagtcctcccccagcccctccagccaccagggtgtcctctaggatgcagctgccagatccactcactctgctgcctccagcaggacccaaggccactttcaactcttatggggttctccacctgccccagagcttctcaagggagggtaagggggcaccctgagcccacaggacccctacttcacagctcacaggggcaggaggcagctcccctgcctccaggaccctgttgctatggtgacacagcgtttctaggacagaggggcctcccagtctccccccaccacccgtgcacgacttcctcaccacccccaggttccctgcagatgtcgtgtgtgtcctgagtgtttctttggttctttgcacgccaagtctcttggttgtaccatgtgacacaccctgtgcactggtcgctgtcttcgtggcttccacccttgttaatgatgctcctgcctctgcctcccagcccctcacccagcacagctctgcctggacttggagagatgggaggcagacccccaccaccatacatgctgtctgtggcccctcagacattctgtttcatctcccattcatctccctcctcccaccgtgtcagtttttctgcctttccctgctctgttcttccccctccttaggccccagcctgggcccagacccatcctcccagccaggtttccctccagcaggctccttccctccctgtcacctccctctcaccaacccggggtctgagcccctcattcctgaccgtccgtgttctcaggagtggttgaggacacagggccccagcccagccctctgcaccccccagcccggccatctgcgccccacagcccctttggagcttttctcttgtcctctcactccttcccagaagtttttgcacagaacttcattttgaaagtgtttttctcattctccatacctcccccaagctctcctccagcccttcccagggctcagccctgctgtcctgagcgtctcctgggccagagagaggagatgggggtgggagggactgagttgatgttgggtttttcattcaataaattggtgatttctttaaaaaaaaaaaaaaaaaaaaaaaaaaaaaaaaaaaaaaaaaaaaaaaaaaaaaaaaaaaaaaaaaaaaaaaaaaaaaaaaaaaaaaaaaaaa

SEQ ID NO: 1079 - DNA, 4198 bp, Rattus norvegicus; identical to SEQ ID NO: 1076
  ref <308>: DATABASE ACCESSION NUMBER: EMBL / AF076183
  ref <309>: DATABASE ENTRY DATE: 1998-08-17

SEQ ID NO: 1080 - protein, 961 aa, Rattus norvegicus; identical to SEQ ID NO: 1077
  ref <308>: DATABASE ACCESSION NUMBER: SWISS-Prot / AAC31815
  ref <309>: DATABASE ENTRY DATE: 2003-02-01

SEQ ID NO: 1081 - DNA, 1765 bp, Homo sapiens; identical to SEQ ID NO: 1078
  ref <308>: DATABASE ACCESSION NUMBER: EMBL / AL137271
  ref <309>: DATABASE ENTRY DATE: 2000-02-18

SEQ ID NO: 1082 - DNA, 4521 bp, Rattus norvegicus
  ref <308>: DATABASE ACCESSION NUMBER: EMBL / AF077354
  ref <309>: DATABASE ENTRY DATE: 2000-03-03
cggcgcctcttctgcggccgtggagccggagccggcctgagcggtagaggcccgtctttttcaaggacccaagcatcctcgtggacggtcgtccggcttcgcccgcccagccgcggtgctccatcagcccacgcggcgcgccctctccacgcgccaaccccgtcgggttccgtgtgcagtgtcggcggccggccctgggcccgagcccgagcagtagccggcgccatgtcggtggtgggcatagacctgggctttcagagctgctatgtcgctgtggcccgcgccggcggcattgagacgatcgctaatgagtatagcgaccgctgcacgccggcttgtgtttctttcggtcctaagaatcgttcagttggagcagcagcaaagagccaggtaatttccaatgccaagaacacagttcaagggtttaaaagatttcatgggcgtgcattctcagatccatttgtggaagcagaaaaatctaaccttgcatatgatattgtacagttgcccactggattaacgggcataaaggttacatatatggaagaagagaggaattttaccactgaacaagtgactgccatgctcttgtcaaaactgaaggagacagcagaaagtgttcttaagaagcctgttgtagactgtgttgtttcggttcctagtttctacactgatgcagaacgacggtcagtgatggatgccacacagattgctggtctcaattgcttgcggttaatgaatgaaacaactgcagttgctcttgcttatggaatctataaacaagaccttcctgccttagaagaaaaaccaagaaatgtagtttttgtagatatgggacattctgcctatcaagtttctgtatgtgcatttaatagaggaaaactgaaagttttggccacagcttttgatacaacattgggaggcagaaaatttgatgaggtgttggtaaatcacttctgtgaagaatttggaaagaaatacaagctagacataaaatctaaagttcgtgctttattgcgactctctcaagagtgtgagaaactcaagaaattaatgagtgcgaatgcttcagacctccctttgagtattgaatgctttatgaacgatattgatgtatcgggaaccatgaatagaggcaaatttttggagatgtgtgatgatctcttagcaagagtggagccgccacttcgtagcatcttggaccaatccaagttaaagaaagaagatatttatgcagtggagatagttggtggagccacacggatccctgccgtgaaagagaagatcagcaagttctttggtaaagaactcagcacaacattaaatgcggatgaagcagtcactcgaggctgtgctctgcagtgtgcaatcttatcacctgctttcaaagtcagagaattttctatcactgatgtggtaccatatccaatatctttgaggtggaattctccagctgaagaggggtcaagtgactgtgaagtcttccccaaaaaccatgctgctcctttctccaaagtcctcaccttttatagaaaggaaccgttcactctggaggcctactatagttctcctcaggatttgccctatccagatcctgctatagctcagttttcagttcagaaagtcactccacagtctgatggctccagctcaaaagtgaaagtcaaggtccgggtaaatgtgcatggcattttcagtgtgtccagtgcggccttagtagaggtgcacaagtccgaggagagcgaggagccaatggagactgatcagaatgcaaaggaagaagagaagatgcaggtggaccaggaagaaccacatactgaagagcaacagccacagacaccagcagaaaacaaggcggagtctgaggagatggagacctctcaagctggatcaaaagataaaaagatggaccaaccacctcaagcaaagaaggcaaaagtgaagaccagcaccgtggacctgcccattgagagccagctgctgtggcagctggaccgggaaatgctcggcctgtacacagagaatgagggtaagatgatcatgcaggataaactggagaaggaacggaatgacgccaaaaatgcggtggaagagtatgtgtatgagatgagagacaaacttagtggtgaatatgagaagtttgtgagtgaagatgatcgtaataattttactttgaaattagaggatacagaaaactggctgtatgaagatggagaagatcaaccaaagcaagtttatgtagacaaattggctgagttaagaactttaggtcaacctattaagacacggttccaggaatctgaagaaagaccaaaattatttgaagaattagggaagcaaatccaacagtatatgaaagtgatcagctctttcaaaaacaaggaggaccagtatgaacacttggatgctgctgacatgacaaaggtagagaaaagcaccaatgaggcgatggagtggatgaatagtaagctgaacctgcagaacaaacagagcctgacggcggatccagttgtcaagacaaaagagattgaagctaaaattaaggagctgacaaatatttgcagtcctataatttcaaagcccaaacccaaagtggaaccccctaaggaggaaccaaaacatgctgagcagaatggaccagtggatggccaaggagacaacccaggcacccaagctgctgagcacggtgcagacacagctgtgccttctgatggtgacaagaagcttcctgagatggacattgattgattccaacacttgtttatattaaaacagactattataaagctttaagttgtcaactttgttctgaatatcaactagagcaagcaaatactggagatttcttagtcagtttttaggggatctcggggtggggtatataggtaatatacagagcattttgacttctaaatagttagatccagagatgaagtgcactgttctctcttcattatgatcctgtttaagagcccagctagtctttctgagctcttgcctccctccttgttttaatcatgcttctacaaggtgaagtgtgtttggggaaactgagctctaacaaaagctgtgagagccactaggcaggcttttcctcaaacatgacagaagttcaaattatgcttggaaaggctgagtggagatcaccaccagcattctctgcctgtggggctgtgggactgtggggctggtgcttcctccatttctgagggtctgagaatggcccagcatgcattaacacaggagagcgcagagcgcagcagggcctgctctcattgccctctattcccagccctgtcttcctcttccgtccgcaagcagtataaatgccatgtgccctctgcacttagagtgagccttagcgtatcaaggggctttgacgtggctccccgtacttcctgaaagtattcactgacactgaagcgtcagagtctagtgtaaccttaaggtaggttgtaaataacagttggctgtaggcatggtaagtctgagcagcccatccttagtgtggtgggaaggtctgtaccctgacctgctccacggtagatggtgtatgtaaattagaggtttcgatggaacaggatgagagctcaaggttctttgtttggtattatttgtgttaatgtgtcttgaatctgccaatctgtatgttaaaacagctgacagattgtaaagctattgccctggacaagtctgaaattagtgtaaaagaaaacctcatcgttaactgcagccgctgtcagggtaccatatattcctggaacaagtctatggggaagagatgttctgcagacaaagggacggatgcctatggtagaggtcagagttggttacctgccttagttacaagtgttacgttctgggtctttgtaatcactgatctctgtaacagagcctctgtttattcttgcttgttggaaataagcttaaaccatgcatagttagaattactatgcttctgtctacacaggaagtgctgtagctctcaagtgctctagaggccattggttggagaggaaggaatgcatgcttatgttatgtaagcaactggactcccgctcagtacaggcctggagctccaggccgagtgcatactctgctgctttgagtgctgcaggagtgcccactggcctggctgtgaggctgatagctttttcaagtgcaggctgcaggattaagccaactcttatgcaactgactgtccttaatgatgatctcataaacatttgtgtgtgggggtgggagggtttgggtgtcgggatggggaatgaatttgaagtctaaagttaaagctagaaatcagatgatcagcttctgctctgtctatatagacgattggatttatgtggaggcaggccagatggcaactgatgacttgtgtgcaaacaagcatttatccaggttgcaatatccaaattggtttgttaaaaactctaggtcacattcttacactaagaaaaacagtaaacatgagacaaagtttaggaaaaactaataaaagaaacctgtcttaacttgaaa

SEQ ID NO: 1083 - protein, 999 aa, Rattus norvegicus
  ref <308>: DATABASE ACCESSION NUMBER: SWISS-Prot / Q63617
  ref <309>: DATABASE ENTRY DATE: 2002-06-15
MAATVRRQRPRRLLCWALVAVLLADLLALSDTLAVMSVDLGSESMKVAIVKPGVPMEIVLNKESRRKTPVTVTLKENERFLGDSAAGMAIKNPKATLRYFQHLLGKQADNPHVALYRSRFPEHELNVDPQRQTVRFQISPQLQFSPEEVLGMVLNYSRSLAEDFAEQPIKDAVITVPAFFNQAERRAVLQAARMAGLKVLQLINDNTATALSYGVFRRKDINSTAQNIMFYDMGSGSTVCTIVTYQTVKTKEAGTQPQLQIRGVGFDRTLGGLEMELRLREHLAKLFNEQRKGQKAKDVRENPRAMAKLLREANRLKTVLSANADHMAQIEGLMDDVDFKAKVTRVEFEELCADLFDRVPGPVQQALQSAEMSLDQIEQVILVGGPTRVPKVQEVLLKPVGKEELGKNINADEAAAMGAVYQAAALSKAFKVKPFVVRDAVIYPILVEFTREVEEEPGLRSLKHNKRVLFSRMGPYPQRKVITFNRYSHDFNFHINYGDLGFLGPEDLRVFGSQNLTTVKLKGVGESFKKYPDYESKGIKAHFNLDESGVLSLDRVESVFETLVEDSPEEESTLTKLGNTISSLFGGGTSSDAKENGTDAVQEEEESPAEGSKDEPAEQGELKEEAEAPMEDTSQPPPSEPKGDAAREGETPDEKESGDKSEAQKPNEKGQAGPEGVPPAPEEEKKQKPARKQKMVEEIGVELAVLDLPDLPEDELAHSVQKLEDLTLRDLEKQEREKAANSLEAFIFETQDKLYQPEYQEVSTEEQREEISGKLSATSTWLEDEGFGATTVMLKDKLAELRKLCQGLFFRVEERRKWPERLSALDNLLNHSSIFLKGARLIPEMDQIFTDVEMTTLEKVINDTWTWKNATLAEQAKLPATEKPVLLSKDIEAKMMALDREVQYLLNKAKFTKPRPRPKDKNGTRTEPPLNASAGDQEEKVIPPTGQTEEAKAILEPDKEGLGTEAADSEPLELGGPGAESEQAEQTAGQKRPLKNDEL

SEQ ID NO: 1084 - DNA, 715 bp, Homo sapiens
  ref <308>: DATABASE ACCESSION NUMBER: EMBL / BC002526
  ref <309>: DATABASE ENTRY DATE: 2001-07-13
ggcacgaggggccactgagccggagccggcctgagcagcgctctcggttgcagtacccactggaaggacttaggcgctcgcgtggacaccgcaagcccctcagtagcctcggcccaagaggcctgctttccactcgctagccccgccgggggtccgtgtcctgtctcggtggccggacccgggcccgagcccgagcagtagccggcgccatgtcggtggtgggcatagacctgggcttccagagctgctacgtcgctgtggcccgcgccggcggcatcgagactatcgctaatgagtatagcgaccgctgcacgccggcttgcatttcttttggtcctaagaatcgttcaattggagcagcagctaaaagccaggtaatttctaatgcaaagaacacagtccaaggatttaaaagattccatggccgagcattctctgatccatttgtggaggcagaaaaatctaaccttgcatatgatattgtgcagttgcctacaggattaacaggtataaaggtgacatatatggaggaagagcagaatggaccagtggatggacaaggagacaacccaggcccccaggctgctgagcagggtacagacacagctgtgccttcggattcagacaagaagcttcctgaaatggacattgattgattccaacacttgtttctattaaaacagactattataaaaaaaaaaaaaaaaaaaaaaaa

SEQ ID NO: 1085 - protein, 840 aa, Homo sapiens
  ref <308>: DATABASE ACCESSION NUMBER: SWISS-Prot / P34932
  ref <309>: DATABASE ENTRY DATE: 2000-05-30
MSVVGIDLGFQSCYVAVARAGGIETIANEYSDRCTPACISFGPKNRSIGAAAKSQVISNAKNTVQGFKRFHGRAFSDPFVEAEKSNLAYDIVQLPTGLTGIKVTYMEEERNFTTEQVTAMLLSKLKETAESVLKKPVVDCVVSVPCFYTDAERRSVMDATQIAGLNCLRLMNETTAVALAYGIYKQDLPALEEKPRNVVFVDMGHSAYQVSVCAFNRGKLKVLATAFDTTLGGRKFDEVLVNHFCEEFGKKYKLDIKSKIRALLRLSQECEKLKKLMSANASDLPLSIECFMNDVDVSGTMNRGKFLEMCNDLLARVEPPLRSVLEQTKLKKEDIYAVEIVGGATRIPAVKEKISKFFGKELSTTLNADEAVTRGCALQCAILSPAFKVREFSITDVVPYPISLRWNSPAEEGSSDCEVFSKNHAAPFSKVLTFYRKEPFTLEAYYSSPQDLPYPDPAIAQFSVQKVTPQSDGSSSKVKVKVRVNVHGIFSVSSASLVEVHKSEENEEPMETDQNAKEEEKMQVDQEEPHVEEQQQQTPAENKAESEEMETSQAGSKDKKMDQPPQAKKAKVKTSTVDLPIENQLLWQIDREMLNLYIENEGKMIMQDKLEKERNDAKNAVREYVYEMRDKLSGEYEKFVSEDGRNSFTLKLEDTENWLYEDGEDQPKQVYVDKLAELKNLGQPIKIRFQESEERPKLFEELGKQIQQYMKIISSFKNKEDQYDHLDAADMTKVEKSTNEAMEWMNNKLNLQNKQSLTMDPVVKSKEIEAKIKELTSTCSPIISKPKPKVEPPKEEQKNAEQNGPVDGQGDNPGPQAAEQGTDTAVPSDSDKKLPEMDID

SEQ ID NO: 1086 - DNA, 4521 bp, Rattus norvegicus; identical to SEQ ID NO: 1082
  ref <308>: DATABASE ACCESSION NUMBER: EMBL / AF077354
  ref <309>: DATABASE ENTRY DATE: 2000-03-03

SEQ ID NO: 1087 - protein, 999 aa, Rattus norvegicus; identical to SEQ ID NO: 1083
  ref <308>: DATABASE ACCESSION NUMBER: SWISS-Prot / Q63617
  ref <309>: DATABASE ENTRY DATE: 2002-06-15

SEQ ID NO: 1088 - DNA, 715 bp, Homo sapiens; identical to SEQ ID NO: 1084
  ref <308>: DATABASE ACCESSION NUMBER: EMBL / BC002526
  ref <309>: DATABASE ENTRY DATE: 2001-07-13

SEQ ID NO: 1089 - protein, 840 aa, Homo sapiens; identical to SEQ ID NO: 1085
  ref <308>: DATABASE ACCESSION NUMBER: SWISS-Prot / P34932
  ref <309>: DATABASE ENTRY DATE: 2000-05-30

SEQ ID NO: 1090 - DNA, 4521 bp, Rattus norvegicus; identical to SEQ ID NO: 1082
  ref <308>: DATABASE ACCESSION NUMBER: EMBL / AF077354
  ref <309>: DATABASE ENTRY DATE: 2000-03-03

SEQ ID NO: 1091 - protein, 999 aa, Rattus norvegicus; identical to SEQ ID NO: 1083
  ref <308>: DATABASE ACCESSION NUMBER: SWISS-Prot / Q63617
  ref <309>: DATABASE ENTRY DATE: 2002-06-15

SEQ ID NO: 1092 - DNA, 715 bp, Homo sapiens; identical to SEQ ID NO: 1084
  ref <308>: DATABASE ACCESSION NUMBER: EMBL / BC002526
  ref <309>: DATABASE ENTRY DATE: 2001-07-13

SEQ ID NO: 1093 - protein, 840 aa, Homo sapiens; identical to SEQ ID NO: 1085
  ref <308>: DATABASE ACCESSION NUMBER: SWISS-Prot / P34932
  ref <309>: DATABASE ENTRY DATE: 2000-05-30

SEQ ID NO: 1094 - DNA, 4521 bp, Rattus norvegicus; identical to SEQ ID NO: 1082
  ref <308>: DATABASE ACCESSION NUMBER: EMBL / AF077354
  ref <309>: DATABASE ENTRY DATE: 2000-03-03

SEQ ID NO: 1095 - protein, 999 aa, Rattus norvegicus; identical to SEQ ID NO: 1083
  ref <308>: DATABASE ACCESSION NUMBER: SWISS-Prot / Q63617
  ref <309>: DATABASE ENTRY DATE: 2002-06-15

SEQ ID NO: 1096 - DNA, 715 bp, Homo sapiens; identical to SEQ ID NO: 1084
  ref <308>: DATABASE ACCESSION NUMBER: EMBL / BC002526
  ref <309>: DATABASE ENTRY DATE: 2001-07-13

SEQ ID NO: 1097 - protein, 840 aa, Homo sapiens; identical to SEQ ID NO: 1085
  ref <308>: DATABASE ACCESSION NUMBER: SWISS-Prot / P34932
  ref <309>: DATABASE ENTRY DATE: 2000-05-30

SEQ ID NO: 1098 - DNA, 6779 bp, Rattus norvegicus
  ref <308>: DATABASE ACCESSION NUMBER: EMBL / AF078779
  ref <309>: DATABASE ENTRY DATE: 2000-03-03
cgggcgcgctgcggttacagactgtggttttgtacctgcctcccacagctaacttcaccatgctcaaaagaaagcagagttccagggtggaagcccagccagtaactgactttggtcctgacgaatctctgtcagacaatgctgacatactctggattaataagccatgggtgcactctctgctgcgcatctgtgccatcatcagcgtcatctcagtgtgcatgaacacacctatgaccttcgagcactatcctccccttcagtatgtgaccttcaccctggacactttactgatgtttctctacactgcagagatgatagcaaagatgcacatacggggaattgtcaagggcgatagctcctatgtgaaggaccgctggtgtgtttttgatggattcatggtcttttgcctttgggtttctctcgtgttacaggtgtttgaaatagctgacatagttgatcagatgtcaccttggggcatgctgcggatcccacggccactcattatgatccgggctttcaggatttatttccgattcgaactgccaaggacccgaattacaaacattttaaagcggtcaggagaacaaatatggagtgtctcaatcttcctcctcttcttccttcttctgtatgggattttaggagttcagatgtttggaacatttacctaccactgcgtagtcaatgacacaaagccagggaatgtaacctggaatagcttagctatcccagatacgcactgctcgccagagctagaagaaggctatcagtgccccccaggatttaaatgcatggacctggaagacctgggacttagcaggcaagagctgggctacagtggctttaatgagataggcacgagtatattcacagtctatgaggcttcatctcaggaaggctgggtattcctcatgtacagagcaatcgacagtttcccccgttggcgttcctacttctacttcatcacgctgattttcttccttgcctggcttgtcaagaatgtgttcattgctgtcatcattgagacatttgcagaaatcagagtacaatttcaacaaatgtggggaactcggagcagcacaacttccactgccaccacgcagatgttccatgaagatgctgccggtggctggcagctggtagctgtggatgtcaacaagccccagggacgtgccccagcctgcctacagaaaatgatgcggtcatcagttttccacatgtttatcctgagcatggtgactgtggatgtaatagttgctgccagcaactactacaagggagagaacttcagaaggcagtatgacgagttctaccttgcagaggtggcttttacagttctttttgatctggaagcacttctgaagatatggtgtttggggtttactggctacatcagctcatctctccacaagtttgaactacttctggttattgggacaactctccatgtataccctgatctttatcattctcaatttacctacttccaggttcttcgggtagtccggcttattaagatttccccagcattggaagattttgtgtacaagatatttggtcccgggaaaaaacttggaagcttggtggtgttcactgccagtctcctgatagttatgtccgccatcagtttgcagatgttctgcttcgtcgaagaactggacagattcaccacatttccaagggcatttatgtccatgttccagatcctcacccaggaaggatgggtggatgtgatggatcagactctgaatgctgtggggcatatgtgggctccactggttgccatctatttcatcctctaccatctctttgcaacgctgatcctcctgagtttgtttgttgctgttattttggacaacttagaacttgatgaagatctaaagaagctcaaacaattaaaacaaagtgaagcgaacgcagataccaaagaaaaacttcctttgcgcttgagaatcttcgaaaaattcccaaacagaccgcaaatggtgaaaatctcaaaacttccttcagattttacagttcctaagatcagggaaagcttcatgaagcagttcattgaccgccagcaacaggacacctgctgtctcttcagaattctcccctctacctcttcctcatcctgtgacaaccccaagcggcccacagttgaagacaacaaatacattgatcaaaaactccgcaagtctgttttcagcataagggcaaggaaccttctggaaaaggagaccgcagtcacaaaaatcttaagagcttgcactcgacagcgcatgctgagcggatcattcgaggggcagccagcaaaggagaggtcgatcctcagcgtgcagcatcacatccgccaggagcgcaggtcactcagacatggatccaacagccagaggatcagcaggggcaaatctcttgaaacgttaactcaagatcattccaatacggtgcgctacagaaatgcacaaagagaagacagtgaaataaagatgatccaggagaagaaggagcaagcagagatgaaaaggaaggtgcaagaagaggagctgcgagagaaccacccatactttgacaagcctctcttcatcgtgggtcgagaacacaggttcagaaacttctgccgcgtggtggttcgagcacgcttcaatgcatccaaaacagaccctgtcacgggagctgtgaaaaatacaaagtaccaccaactttatgatttgctgggacttgtcacctacctggactgggtcatgatcactgtaaccatctgctcttgcatttctatgatgttcgaatcccccttccggagagtcatgcatgcacccactttacagatcgctgaatatgtgtttgtgatattcatgagcattgagcttaatctgaagattatggcagatggcttgtttttcactccaactgctgtcatcagggactttggtggcgtcatggacatatttatctatcttgtgagcttgatatttctttgttggatgcctcaaaatgtgcctgctgagtcaggagcccagctcctgatggttcttcggtgcctaagacctcttcggatattcaaactggtgccacaaatgaggaaagttgttcgagaacttttcagtggtttcaaggaaatatttttggtctccattctgttgctgacactaatgcttgtttttgcaagctttggtgttcagctctttgccggaaagctagccaagtgcaatgaccccaacattatcagaagggaagactgtaacggcatcttcagaattaatgtaagtgtgtccaagaacttaaatttaaaactaagacctggagagaaaaaacctggattttgggtgccccgtgtttgggcaaatcctcgtaactttaactttgacaatgtgggaaatgctatgctggcattgtttgaagttctgtccttgaaaggctgggtagaagtgagagatgtcattattcatcgtgtggggccgatccatggaatctatattcatgttttcgtattcctgggttgcatgattggactgactctttttgtcggtgtagttattgctaacttcaatgaaaacaaggggacagccctgctgacggtagatcagagaagatgggaagatctcaagagcagattgaagatcgcacagcctcttcatctcccacctcggccggataatgatggatttagagctaaaatgtatgacataacccagcatccgttttttaaaaggacaattgcgttgctggttctggcccagtctgtgttgctatctgtcaagtgggatgttgaggatcctgtgacagttcctttggcaaccatgtcggtcgtgttcaccttcatctttgtcttagaggttacaatgaagatcatagcaatgtcaccagctggtttctggcaaagcagaagaaaccgatatgatctcttggtgacgtctcttggtgttgtgtgggtggtgctccattttgctctgctgaatgcatacacctacatgatgggagcctgtgtgattgtctttagatttttctccatctgtggaaagcatgtgacattaaagatgctccttttgactgtggttgtcagcatgtacaagagcttctttatcatcgtaggaatgtttctcttgctgctgtgctatgcctttgctggggtggttctgtttggcactgtaaagtatggagagaacattaacaggcatgccaatttttcttcagctggcaaagccattactgtattgttccgaattgtcacaggggaagactggaataagattatgcatgattgtatggttcagcctccattttgtactcctgatgaatttacatattgggcaacagactgtggcaattatgcaggggcacttatgtacttctgctcattctatgtcatcatcgcctacatcatgctgaatctacttgtagccataattgtggagaatttctctttgttttattccactgaagaggaccagcttttgagttacaatgatcttcgccattttcaaatcatatggaatatggtagatgataacgagaggtgtgatcccaccttccgagtgaagttcctgctacggctactgcgtgggaggctagaagtggaccttgataaagacaagctcctgtttaagcacatgtgctatgagatggagaggctgcacaatggtggtgatgtcaccttccatgatgtcttgagcatgctgtcctaccgctctgtagacatcaggaagagcctgcagctagaggaactgctggcaagggagcagctggagtacaccatagaggaggaggtggctaagcagactattcgcatgtggctgaagaagtgcttaaaacgcatccgggctaaacagcagcagtcatgcagcatcatccacagcctgagagagagccagcagcaagagttgagccgattcctgaatcctcccagcattgagaccacccaaccaagcgaagataccaacgccaacagccaggaccacaatacgcaacctgagtcaagcagtcagcagcagctcttgagccctactctgtcagacagaggaggaagtcgacaggatgcagcagatactgggaaaccccaaagaaagattgggcaatggcgtctgccctcagctcccaaaccaataagccattctgtgtcttcggttaacctacggtttggaggaaggacaacaatgaagtctgtggtgtgcaagatgaaccccatgccagacacagcttcctgtggctccgaagttaaaaagtggtggaccagacagctgactgtggagagtgacgagagtggagatgacctcctagatatctagaggggaagcaaagcatagggatttatcgggtgaaaaccactgcctaatctcttgttttatctctgagagagcaaactgtagttgccaaaccctaaatttcacccgagcatggcattttcagaattaacttttgttcatttattggaatggtccctcaaagagtatgaagtttcagattactctcatgtattaaagaaaatctggggcttgggatgtaagtcagtgaaagaccacttgtccaacctatgaaaacccgtgtgtttaaaacccagaaatacaagaaaagaaggaaaatatgtataatgcagtattgataatattagaagctgcatcaatagtagatgtgtattaaatattcatgtattctgtctgtgtaagataagctgtactcacctgcactcctgtattttgttactactcctctcaaagagtgctaagcccatactggcccatattgatagtacaggagttgtagctctagttcacctttttttcccatttccaatagaaatactttccttgggagaaattatttatgattgatctgaaaaggtcaatcatgctaaaatgacagcagcttcaaaactacagattctggatttttaaaaacattccttttctcatattatttaaaaaatatgcctgatgttaaaaaaattagacaatttgattttttatttcaagtactctaattgaactgtggcctgcttccaagaaagttatatatgtaggtcccatgtaaaggaactggctatagatataattggtatataacaaacctgtaggtatattattcatggacttgatgagacaaaaatattttgaaatctttaaaaaccctttaaataactgagtttataaaaaaagaataaaagtgttggagtcaacatagctaaaagtttacacttgagacttattgtggacttcatggcttatccttgctgtatccattttgctatgaatcagcaggaacattatgggttggctttaatacaccattactatgtagattgaaaataatttccctgcttccagaattatctattgaaataataacagaagggtgccaaaacttcactctaaaccccattgggaataccacaacataattatattttcccacacaccaatgctccaggttctctgggaaaagtggaaatataaaattattggaaagtattgatgggccctggctgggcagagtctcccctgagttgtcattatcaattgcatatttgatgatcagattattttaagagattgagtgtgtaaaaattccctgatgcctaggttgctttatgatatccttttgtctatttaaccttcttcaaatagccaaacattgtgtccttcctacacagaagatgtgatataatgtgcccatctactgcttttatgattacttgtgactattagataataggcaattcaagttcatgccgccaaggggcctttttattgggttttatgtttggtcagaatttgatttttggatataaaagccgg

SEQ ID NO: 1099 - protein, 1737 aa, Rattus norvegicus
  ref <308>: DATABASE ACCESSION NUMBER: SWISS-Prot / AAC68885
  ref <309>: DATABASE ENTRY DATE: 2003-02-01
MLKRKQSSRVEAQPVTDFGPDESLSDNADILWINKPWVHSLLRICAIISVISVCMNTPMTFEHYPPLQYVTFTLDTLLMFLYTAEMIAKMHIRGIVKGDSSYVKDRWCVFDGFMVFCLWVSLVLQVFEIADIVDQMSPWGMLRIPRPLIMIRAFRIYFRFELPRTRITNILKRSGEQIWSVSIFLLFFLLLYGILGVQMFGTFTYHCVVNDTKPGNVTWNSLAIPDTHCSPELEEGYQCPPGFKCMDLEDLGLSRQELGYSGFNEIGTSIFTVYEASSQEGWVFLMYRAIDSFPRWRSYFYFITLIFFLAWLVKNVFIAVIIETFAEIRVQFQQMWGTRSSTTSTATTQMFHEDAAGGWQLVAVDVNKPQGRAPACLQKMMRSSVFHMFILSMVTVDVIVAASNYYKGENFRRQYDEFYLAEVAFTVLFDLEALLKIWCLGFTGYISSSLHKFELLLVIGTTLHVYPDLYHSQFTYFQVLRVVRLIKISPALEDFVYKIFGPGKKLGSLVVFTASLLIVMSAISLQMFCFVEELDRFTTFPRAFMSMFQILTQEGWVDVMDQTLNAVGHMWAPLVAIYFILYHLFATLILLSLFVAVILDNLELDEDLKKLKQLKQSEANADTKEKLPLRLRIFEKFPNRPQMVKISKLPSDFTVPKIRESFMKQFIDRQQQDTCCLFRILPSTSSSSCDNPKRPTVEDNKYIDQKLRKSVFSIRARNLLEKETAVTKILRACTRQRMLSGSFEGQPAKERSILSVQHHIRQERRSLRHGSNSQRISRGKSLETLTQDHSNTVRYRNAQREDSEIKMIQEKKEQAEMKRKVQEEELRENHPYFDKPLFIVGREHRFRNFCRVVVRARFNASKTDPVTGAVKNTKYHQLYDLLGLVTYLDWVMITVTICSCISMMFESPFRRVMHAPTLQIAEYVFVIFMSIELNLKIMADGLFFTPTAVIRDFGGVMDIFIYLVSLIFLCWMPQNVPAESGAQLLMVLRCLRPLRIFKLVPQMRKVVRELFSGFKEIFLVSILLLTLMLVFASFGVQLFAGKLAKCNDPNIIRREDCNGIFRINVSVSKNLNLKLRPGEKKPGFWVPRVWANPRNFNFDNVGNAMLALFEVLSLKGWVEVRDVIIHRVGPIHGIYIHVFVFLGCMIGLTLFVGVVIANFNENKGTALLTVDQRRWEDLKSRLKIAQPLHLPPRPDNDGFRAKMYDITQHPFFKRTIALLVLAQSVLLSVKWDVEDPVTVPLATMSVVFTFIFVLEVTMKIIAMSPAGFWQSRRNRYDLLVTSLGVVWVVLHFALLNAYTYMMGACVIVFRFFSICGKHVTLKMLLLTVVVSMYKSFFIIVGMFLLLLCYAFAGVVLFGTVKYGENINRHANFSSAGKAITVLFRIVTGEDWNKIMHDCMVQPPFCTPDEFTYWATDCGNYAGALMYFCSFYVIIAYIMLNLLVAIIVENFSLFYSTEEDQLLSYNDLRHFQIIWNMVDDNERCDPTFRVKFLLRLLRGRLEVDLDKDKLLFKHMCYEMERLHNGGDVTFHDVLSMLSYRSVDIRKSLQLEELLAREQLEYTIEEEVAKQTIRMWLKKCLKRIRAKQQQSCSIIHSLRESQQQELSRFLNPPSIETTQPSEDTNANSQDHNTQPESSSQQQLLSPTLSDRGGSRQDAADTGKPQRKIGQWRLPSAPKPISHSVSSVNLRFGGRTTMKSVVCKMNPMPDTASCGSEVKKWWTRQLTVESDESGDDLLDI

SEQ ID NO: 1100 - DNA, 380 bp, Homo sapiens
  ref <308>: DATABASE ACCESSION NUMBER: EMBL / AW295007
  ref <309>: DATABASE ENTRY DATE: 2000-01-17
tttttttttttttttatcacagagatcattgaagctttattagcctttaaacaccagcaagttgattagagacacagtagcagggggtccccggttcttttcttctttgtctccatgtcgtctttcttaatgtcccagaacaaggctgtggaaaattcctatacattctgactccactagagtgacaatgtgatcttcccaagtagagacaacagcggatgctaatgggtgagctcgtcggtaatggactcttgcttaagattttagtgactgcggtctccttttccagaaggttccttgccctgatgctgaaaacagacttgcgaagtttttggtcgatgtatttgttgtcctcaattgctgaacgtttggagtggtcg

SEQ ID NO: 1101 - protein, 1172 aa, Homo sapiens
  ref <308>: DATABASE ACCESSION NUMBER: SWISS-Prot / CAC40696
  ref <309>: DATABASE ENTRY DATE: 2003-02-01
FMSMFQILTQEGWVDVMDQTLNAVGHMWAPVVAIYFILYHLFATLILLSLFVAVILDNLELDEDLKKLKQLKQSEANADTKEKLPLRLRIFEKFPNRPQMVKISKLPSDFTVPKIRESFMKQFIDRQQQDTCCLLRSLPTTSSSSCDHSKRSAIEDNKYIDQKLRKSVFSIRARNLLEKETAVTKILRACTRQRMLSGSFEGQPAKERSILSVQHHIRQERRSLRHGSNSQRISRGKSLETLTQDHSNTVRYRNAQREDSEIKMIQEKKEQAEMKRKVQEEELRENHPYFDKPLFIVGREHRFRNFCRVVVRARFNASKTDPVTGAVKNTKYHQLYDLLGLVTYLDWVMIIVTICSCISMMFESPFRRVMHAPTLQIAEYVFVIFMSIELNLKIMADGLFFTPTAVIRDFGGVMDIFIYLVSLIFLCWMPQNVPAESGAQLLMVLRCLRPLRIFKLVPQMRKVVRELFSGFKEIFLVSILLLTLMLVFASFGVQLFAGKLAKCNDPNIIRREDCNGIFRINVSVSKNLNLKLRPGEKKPGFWVPRVWANPRNFNFDNVGNAMLALFEVLSLKGWVEVRDVIIHRVGPIHGIYIHVFVFLGCMIGLTLFVGVVIANFNENKGTALLTVDQRRWEDLKSRLKIAQPLHLPPRPDNDGFRAKMYDITQHPFFKRTIALLVLAQSVLLSVKWDVEDPVTVPLATMSVVFTFIFVLEVTMKIIAMSPAGFWQSRRNRYDLLVTSLGVVWVVLHFALLVTLKMLLLTVVVSMYKSFFIIVGMFLLLLCYAFAGVVLFGTVKYGENINRHANFSSAGKAITVLFRIVTGEDWNKIMHDCMVQPPFCTPDEFTYWATDCGNYAGALMYFCSFYVIIAYIMLNLLVAIIVENFSLFYSTEEDQLLSYNDLRHFQIIWNMVDDKREGVIPTFRVKFLLRLLRGRLEVDLDKDKLLFKHMCYEMERLHNGGDVTFHDVLSMLSYRSVDIRKSLQLEELLAREQLEYTIEEEVAKQTIRMWLKKCLKRIRAKQQQSCSIIHSLRESQQQELSRFLNPPSIETTQPSEDTNANSQDNSMQPETSSQQQLLSPTLSDRGGSRQDAADAGKPQRKFGQWRLPSAPKPISHSVSSVNLRFGGRTTMKSVVCKMNPMTDAASCGSEVKKWWTRQLTVESDESGDDLLDI

SEQ ID NO: 1102 - DNA, 6779 bp, Rattus norvegicus; identical to SEQ ID NO: 1098
  ref <308>: DATABASE ACCESSION NUMBER: EMBL / AF078779
  ref <309>: DATABASE ENTRY DATE: 2000-03-03

SEQ ID NO: 1103 - protein, 1737 aa, Rattus norvegicus; identical to SEQ ID NO: 1099
  ref <308>: DATABASE ACCESSION NUMBER: SWISS-Prot / AAC68885
  ref <309>: DATABASE ENTRY DATE: 2003-02-01

SEQ ID NO: 1104 - DNA, 380 bp, Homo sapiens; identical to SEQ ID NO: 1100
  ref <308>: DATABASE ACCESSION NUMBER: EMBL / AW295007
  ref <309>: DATABASE ENTRY DATE: 2000-01-17

SEQ ID NO: 1105 - protein, 1172 aa, Homo sapiens; identical to SEQ ID NO: 1101
  ref <308>: DATABASE ACCESSION NUMBER: SWISS-Prot / CAC40696
  ref <309>: DATABASE ENTRY DATE: 2003-02-01

SEQ ID NO: 1106 - DNA, 6779 bp, Rattus norvegicus; identical to SEQ ID NO: 1098
  ref <308>: DATABASE ACCESSION NUMBER: EMBL / AF078779
  ref <309>: DATABASE ENTRY DATE: 2000-03-03

SEQ ID NO: 1107 - protein, 1737 aa, Rattus norvegicus; identical to SEQ ID NO: 1099
  ref <308>: DATABASE ACCESSION NUMBER: SWISS-Prot / AAC68885
  ref <309>: DATABASE ENTRY DATE: 2003-02-01

SEQ ID NO: 1108 - DNA, 380 bp, Homo sapiens; identical to SEQ ID NO: 1100
  ref <308>: DATABASE ACCESSION NUMBER: EMBL / AW295007
  ref <309>: DATABASE ENTRY DATE: 2000-01-17

SEQ ID NO: 1109 - protein, 1172 aa, Homo sapiens; identical to SEQ ID NO: 1101
  ref <308>: DATABASE ACCESSION NUMBER: SWISS-Prot / CAC40696
  ref <309>: DATABASE ENTRY DATE: 2003-02-01

SEQ ID NO: 1110 - DNA, 6779 bp, Rattus norvegicus; identical to SEQ ID NO: 1098
  ref <308>: DATABASE ACCESSION NUMBER: EMBL / AF078779
  ref <309>: DATABASE ENTRY DATE: 2000-03-03

SEQ ID NO: 1111 - protein, 1737 aa, Rattus norvegicus; identical to SEQ ID NO: 1099
  ref <308>: DATABASE ACCESSION NUMBER: SWISS-Prot / AAC68885
  ref <309>: DATABASE ENTRY DATE: 2003-02-01

SEQ ID NO: 1112 - DNA, 380 bp, Homo sapiens; identical to SEQ ID NO: 1100
  ref <308>: DATABASE ACCESSION NUMBER: EMBL / AW295007
  ref <309>: DATABASE ENTRY DATE: 2000-01-17

SEQ ID NO: 1113 - protein, 1172 aa, Homo sapiens; identical to SEQ ID NO: 1101
  ref <308>: DATABASE ACCESSION NUMBER: SWISS-Prot / CAC40696
  ref <309>: DATABASE ENTRY DATE: 2003-02-01

SEQ ID NO: 1114 - DNA, 6779 bp, Rattus norvegicus; identical to SEQ ID NO: 1098
  ref <308>: DATABASE ACCESSION NUMBER: EMBL / AF078779
  ref <309>: DATABASE ENTRY DATE: 2000-03-03

SEQ ID NO: 1115 - protein, 1737 aa, Rattus norvegicus; identical to SEQ ID NO: 1099
  ref <308>: DATABASE ACCESSION NUMBER: SWISS-Prot / AAC68885
  ref <309>: DATABASE ENTRY DATE: 2003-02-01

SEQ ID NO: 1116 - DNA, 380 bp, Homo sapiens; identical to SEQ ID NO: 1100
  ref <308>: DATABASE ACCESSION NUMBER: EMBL / AW295007
  ref <309>: DATABASE ENTRY DATE: 2000-01-17

SEQ ID NO: 1117 - protein, 1172 aa, Homo sapiens; identical to SEQ ID NO: 1101
  ref <308>: DATABASE ACCESSION NUMBER: SWISS-Prot / CAC40696
  ref <309>: DATABASE ENTRY DATE: 2003-02-01

SEQ ID NO: 1118 - DNA, 6779 bp, Rattus norvegicus; identical to SEQ ID NO: 1098
  ref <308>: DATABASE ACCESSION NUMBER: EMBL / AF078779
  ref <309>: DATABASE ENTRY DATE: 2000-03-03

SEQ ID NO: 1119 - protein, 1737 aa, Rattus norvegicus; identical to SEQ ID NO: 1099
  ref <308>: DATABASE ACCESSION NUMBER: SWISS-Prot / AAC68885
  ref <309>: DATABASE ENTRY DATE: 2003-02-01

SEQ ID NO: 1120 - DNA, 380 bp, Homo sapiens; identical to SEQ ID NO: 1100
  ref <308>: DATABASE ACCESSION NUMBER: EMBL / AW295007
  ref <309>: DATABASE ENTRY DATE: 2000-01-17

SEQ ID NO: 1121 - protein, 1172 aa, Homo sapiens; identical to SEQ ID NO: 1101
  ref <308>: DATABASE ACCESSION NUMBER: SWISS-Prot / CAC40696
  ref <309>: DATABASE ENTRY DATE: 2003-02-01

SEQ ID NO: 1122 - DNA, 519 bp, Rattus norvegicus
  ref <308>: DATABASE ACCESSION NUMBER: EMBL / AF079873
  ref <309>: DATABASE ENTRY DATE: 1998-08-10
ctcattacggagatggttgctctcaacccagactttaaaccacctgcagattacaagcctccagcaacacgtgtgagcgataaagtaatgatcccccaagacgagtatccagaaatcaattttgtgggtctcctaattgggcccagagggaacaccctgaagaacattgagaaggaatgcaacgccaagatcatgatacggggaaagggatcagtaaaagaagggaaagttgggcgtaaagatggtcagatgttgccaggagaagatgaacctcttcatgctctagtcactgccaatacaatggagaatgtcaaaaaggcagtggaacagatcagaaacatcctgaagcagggtattgaaaccccagaggaccagaatgacctaaggaaaatgcagcttcgagagttagctcgcttgaatggcactctacgggaagatgataacaggatcttgagaccctggcagagctcagagacacgaagcattaccaacacgactgtgtgtactaagtgtggaggg

SEQ ID NO: 1123 - protein, 173 aa, Rattus norvegicus
  ref <308>: DATABASE ACCESSION NUMBER: SWISS-Prot / AAC29484
  ref <309>: DATABASE ENTRY DATE: 2003-02-01
LITEMVALNPDFKPPADYKPPATRVSDKVMIPQDEYPEINFVGLLIGPRGNTLKNIEKECNAKIMIRGKGSVKEGKVGRKDGQMLPGEDEPLHALVTANTMENVKKAVEQIRNILKQGIETPEDQNDLRKMQLRELARLNGTLREDDNRILRPWQSSETRSITNTTVCTKCGG

SEQ ID NO: 1124 - DNA, 1930 bp, Rattus norvegicus
  ref <308>: DATABASE ACCESSION NUMBER: EMBL / AF080468
  ref <309>: DATABASE ENTRY DATE: 2000-03-03
aaaaacacagctcagcagatccgggcactggagagggagctgcaagcaggagcagtcaagagtgtggtcagaagcaccgtgagtggaccagcagggccggctttttctaccatggcggcccaaggctatggctattaccgcactgtcatattcacagccatgttcggaggctacagcctttactacttcaaccgcaaaaccttctcttttgtcatgccctccttggtggatgagatcgctctggacaaggacgatttggggctcatcacgagcagccagtcggcagcctacgccatcagcaagtttgtgagcggggtgctgtctgatcagatgagtgcccgttggctcttctcctctgggctgctcctggttggtctggtcaacgtagtcttctcgtggagctctacagtaccggcttttgctgctctctggtttcttaatggtctggcacaggggctaggctggcccccctgtgggaagatcctgaggaagtggtttgagccatcccagtttggtacttggtgggctgtgttgtcaaccagcatgaacctggctggaagcctgggacctatcttggcgacaatccttgctcagagctacagctggcgcagcaccctggccctgtctgggtcactgtgtgtggttgtctccttcttctgtctcctgctcatccacaacgaacctgctgatgttggactccgaaatctggaccctcgcccctccaagggcaaaaagggctcgtcaaaggaggagagcaccctacaggacctgctgctgtccccctatctctgggtgctctccactggctacctcgtggtctttggggtaaagacttgctgtacagactggggccagttcttccttatccaggagagagggcagtcggcccttgtgggtagttcctacatcagtgccctagaggttggaggccttgtaggcagcattgcagctggctatctgtcagacagggctatggcaaaggcagggctgtctgtgtatgggaaccctcgccacagcctgttgctgctcatgatggctggcatggcagcatccatgttcctcttccgggtaacagtgaccagcgactctcccaagatctggatcctggtattgggagctgtatttggtttctcttcttatggtcccattgccttgtttggagtcatagctaatgagagtgcacctcccaacttgtgtggtacctctcatgctattgtggggctcatggccaatgtgggtggatttctggctgggttacccttcagtaccatcgccaagcactatagctggagcacagccttctgggtggcagaagtgatctgtatagccagcacagttgtcttcttcttgcttcgaaatatccgcaccaagatgggccgagtatccaagaaggcagagtgaaaagagcactcactatagagcatccccaactgcaacctcattggcaggacacagaaaggaagagaggctgctctggctagaacagagcctttacatatctgtgtctacactgtctctctggacctccgtggtgctgcaagttaccagtggctaatgaggtcctatgctctatttaaatgatgtttggttttaggctccattggcttctgtttctaccttctagcagacagacaactcctaaattcagggtgtctcctatacccctcttcctctcctgagtccccatctcctagtgaggtggttctatctctgcagctgcagaatattaatggcctgtggtttctgctgtaccccaaggcttcttgttaggggtcaacactgttgccaatacctcagtccctaagggaggagaggaggccaccactctcatcagttacctggggacaaaagggaggaatgtagagagcaaactgtcttgtatagactaataaaactagatttgatactaaaaaaaaaaaaaaaaaaaaaa

SEQ ID NO: 1125 - protein, 429 aa, Rattus norvegicus
  ref <308>: DATABASE ACCESSION NUMBER: SWISS-Prot / AAC79839
  ref <309>: DATABASE ENTRY DATE: 2003-02-01
MAAQGYGYYRTVIFTAMFGGYSLYYFNRKTFSFVMPSLVDEIALDKDDLGLITSSQSAAYAISKFVSGVLSDQMSARWLFSSGLLLVGLVNVVFSWSSTVPAFAALWFLNGLAQGLGWPPCGKILRKWFEPSQFGTWWAVLSTSMNLAGSLGPILATILAQSYSWRSTLALSGSLCVVVSFFCLLLIHNEPADVGLRNLDPRPSKGKKGSSKEESTLQDLLLSPYLWVLSTGYLVVFGVKTCCTDWGQFFLIQERGQSALVGSSYISALEVGGLVGSIAAGYLSDRAMAKAGLSVYGNPRHSLLLLMMAGMAASMFLFRVTVTSDSPKIWILVLGAVFGFSSYGPIALFGVIANESAPPNLCGTSHAIVGLMANVGGFLAGLPFSTIAKHYSWSTAFWVAEVICIASTVVFFLLRNIRTKMGRVSKKAE

SEQ ID NO: 1126 - DNA, 2560 bp, Homo sapiens
  ref <308>: DATABASE ACCESSION NUMBER: Refseq / NM_001467
  ref <309>: DATABASE ENTRY DATE: 2002-11-04
ggcacgaggggccaccgaggcgctgtccctgaccaccagcacgagacccctttctatcgcgccagtcctgtggtctccgcacctctccagctcctgcacccccggcccccgtggttcccagccgcacagtagcgtgtcctgggtagcgtgaggacccacggggctgagcaggtgccacgagcccgccgcctcttcgccgcccgccgcctctcctcctctcccgcccgccgcctggccctcccctaccaggctgagcctctggctgccagaagcgcggggcctccgggagaatacgtgcggtcgcccgctccgcgtgcgcctacgccttctgctccagttgctttcccaattgagcggaaaagccggggcatgttgccggggccctgggcgggacggttgtgccctgcagcccgaagcccgccggggcaccttcccgcccacgagctgcccagtccctctgcttgcggcccctgccaacgtcccacaggacactgggtccccttggagcctccccaggcttaatgattgtccagaaggcggctataaagggagcctgggaggctgggtggaggagggagcagaaaaaacccaactcagcagatctgggaactgtgagagcggcaagcaggaactgtggtcagaggctgtgcgtcttggctggtagggcctgctcttttctaccatggcagcccagggctatggctattatcgcactgtgatcttctcagccatgtttgggggctacagcctgtattacttcaatcgcaagaccttctcctttgtcatgccatcattggtggaagagatccctttggacaaggatgatttggggttcatcaccagcagccagtcggcagcttatgctatcagcaagtttgtcagtggggtgctgtctgaccagatgagtgctcgctggctcttctcttctgggctgctcctggttggcctggtcaacatattctttgcctggagctccacagtacctgtctttgctgccctctggttccttaatggcctggcccaggggctgggctggcccccatgtgggaaggtcctgcggaagtggtttgagccatctcagtttggcacttggtgggccatcctgtcaaccagcatgaacctggctggagggctgggccctatcctggcaaccatccttgcccagagctacagctggcgcagcacgctggccctatctggggcactgtgtgtggttgtctccttcctctgtctcctgctcatccacaatgaacctgctgatgttggactccgcaacctggaccccatgccctctgagggcaagaagggctccttgaaggaggagagcaccctgcaggagctgctgctgtccccttacctgtgggtgctctccactggttaccttgtggtgtttggagtaaagacctgctgtactgactggggccagttcttccttatccaggagaaaggacagtcagcccttgtaggtagctcctacatgagtgccctggaagttgggggccttgtaggcagcatcgcagctggctacctgtcagaccgggccatggcaaaggcgggactgtccaactacgggaaccctcgccatggcctgttgctgttcatgatggctggcatgacagtgtccatgtacctcttccgggtaacagtgaccagtgactcccccaagctctggatcctggtattgggagctgtatttggtttctcctcgtatggccccattgccctgtttggagtcatagccaacgagagtgcccctcccaacttgtgtggcacctcccacgccattgtgggactcatggccaatgtgggcggctttctggctgggctgcccttcagcaccattgccaagcactacagttggagcacagccttctgggtggctgaagtgatttgtgcggccagcacggctgccttcttcctcctacgaaacatccgcaccaagatgggccgagtgtccaagaaggctgagtgaagagagtccaggttccggagcaccatcccacggtggccttccccctgcacgctctgcggggagaaaaggaggggcctgcctggctagccctgaacctttcactttccatttctgcgccttttctgtcacccgggtggcgctggaagttatcagtggctagtgaggtcccagctccctgatcctatgctctatttaaaagataacctttggccttagactccgttagctcctatttcctgccttcagacaaacaggaaacttctgcagtcaggaaggctcctgtacccttcttcttttcctaggccctgtcctgcccgcatcctaccccatccccacctgaagtgaggctatccctgcagctgcagggcactaatgacccttgacttctgctgggtcctaagtcctctcagcagtgggtgactgctgttgccaatacctcagactccagggaaagagaggaggccatcattctcactgtaccactaggcgcagttggatataggtgggaagaaaaggtgacttgttatagaagattaaaactagatttgatactgaaaaaaaaaaaaaaaaaaaaaaaaaaaaaaaaaa

SEQ ID NO: 1127 - protein, 429 aa, Homo sapiens
  ref <308>: DATABASE ACCESSION NUMBER: SWISS-Prot / O43826
  ref <309>: DATABASE ENTRY DATE: 2002-06-15
MAAQGYGYYRTVIFSAMFGGYSLYYFNRKTFSFVMPSLVEEIPLDKDDLGFITSSQSAAYAISKFVSGVLSDQMSARWLFSSGLLLVGLVNIFFAWSSTVPVFAALWFLNGLAQGLGWPPCGKVLRKWFEPSQFGTWWAILSTSMNLAGGLGPILATILAQSYSWRSTLALSGALCVVVSFLCLLLIHNEPADVGLRNLDPMPSEGKKGSLKEESTLQELLLSPYLWVLSTGYLVVFGVKTCCTDWGQFFLIQEKGQSALVGSSYMSALEVGGLVGSIAAGYLSDRAMAKAGLSNYGNPRHGLLLFMMAGMTVSMYLFRVTVTSDSPKLWILVLGAVFGFSSYGPIALFGVIANESAPPNLCGTSHAIVGLMANVGGFLAGLPFSTIAKHYSWSTAFWVAEVICAASTAAFFLLRNIRTKMGRVSKKAE

SEQ ID NO: 1128 - DNA, 1930 bp, Rattus norvegicus; identical to SEQ ID NO: 1124
  ref <308>: DATABASE ACCESSION NUMBER: EMBL / AF080468
  ref <309>: DATABASE ENTRY DATE: 2000-03-03

SEQ ID NO: 1129 - protein, 429 aa, Rattus norvegicus; identical to SEQ ID NO: 1125
  ref <308>: DATABASE ACCESSION NUMBER: SWISS-Prot / AAC79839
  ref <309>: DATABASE ENTRY DATE: 2003-02-01

SEQ ID NO: 1130 - DNA, 2560 bp, Homo sapiens; identical to SEQ ID NO: 1126
  ref <308>: DATABASE ACCESSION NUMBER: Refseq / NM_001467
  ref <309>: DATABASE ENTRY DATE: 2002-11-04

SEQ ID NO: 1131 - protein, 429 aa, Homo sapiens; identical to SEQ ID NO: 1127
  ref <308>: DATABASE ACCESSION NUMBER: SWISS-Prot / O43826
  ref <309>: DATABASE ENTRY DATE: 2002-06-15

SEQ ID NO: 1132 - DNA, 1930 bp, Rattus norvegicus; identical to SEQ ID NO: 1124
  ref <308>: DATABASE ACCESSION NUMBER: EMBL / AF080468
  ref <309>: DATABASE ENTRY DATE: 2000-03-03

SEQ ID NO: 1133 - protein, 429 aa, Rattus norvegicus; identical to SEQ ID NO: 1125
  ref <308>: DATABASE ACCESSION NUMBER: SWISS-Prot / AAC79839
  ref <309>: DATABASE ENTRY DATE: 2003-02-01

SEQ ID NO: 1134 - DNA, 2560 bp, Homo sapiens; identical to SEQ ID NO: 1126
  ref <308>: DATABASE ACCESSION NUMBER: Refseq / NM_001467
  ref <309>: DATABASE ENTRY DATE: 2002-11-04

SEQ ID NO: 1135 - protein, 429 aa, Homo sapiens; identical to SEQ ID NO: 1127
  ref <308>: DATABASE ACCESSION NUMBER: SWISS-Prot / O43826
  ref <309>: DATABASE ENTRY DATE: 2002-06-15

SEQ ID NO: 1136 - DNA, 1930 bp, Rattus norvegicus; identical to SEQ ID NO: 1124
  ref <308>: DATABASE ACCESSION NUMBER: EMBL / AF080468
  ref <309>: DATABASE ENTRY DATE: 2000-03-03

SEQ ID NO: 1137 - protein, 429 aa, Rattus norvegicus; identical to SEQ ID NO: 1125
  ref <308>: DATABASE ACCESSION NUMBER: SWISS-Prot / AAC79839
  ref <309>: DATABASE ENTRY DATE: 2003-02-01

SEQ ID NO: 1138 - DNA, 2560 bp, Homo sapiens; identical to SEQ ID NO: 1126
  ref <308>: DATABASE ACCESSION NUMBER: Refseq / NM_001467
  ref <309>: DATABASE ENTRY DATE: 2002-11-04

SEQ ID NO: 1139 - protein, 429 aa, Homo sapiens; identical to SEQ ID NO: 1127
  ref <308>: DATABASE ACCESSION NUMBER: SWISS-Prot / O43826
  ref <309>: DATABASE ENTRY DATE: 2002-06-15

SEQ ID NO: 1140 - DNA, 1930 bp, Rattus norvegicus; identical to SEQ ID NO: 1124
  ref <308>: DATABASE ACCESSION NUMBER: EMBL / AF080468
  ref <309>: DATABASE ENTRY DATE: 2000-03-03

SEQ ID NO: 1141 - protein, 429 aa, Rattus norvegicus; identical to SEQ ID NO: 1125
  ref <308>: DATABASE ACCESSION NUMBER: SWISS-Prot / AAC79839
  ref <309>: DATABASE ENTRY DATE: 2003-02-01

SEQ ID NO: 1142 - DNA, 2560 bp, Homo sapiens; identical to SEQ ID NO: 1126
  ref <308>: DATABASE ACCESSION NUMBER: Refseq / NM_001467
  ref <309>: DATABASE ENTRY DATE: 2002-11-04

SEQ ID NO: 1143 - protein, 429 aa, Homo sapiens; identical to SEQ ID NO: 1127
  ref <308>: DATABASE ACCESSION NUMBER: SWISS-Prot / O43826
  ref <309>: DATABASE ENTRY DATE: 2002-06-15

SEQ ID NO: 1144 - DNA, 1930 bp, Rattus norvegicus; identical to SEQ ID NO: 1124
  ref <308>: DATABASE ACCESSION NUMBER: EMBL / AF080468
  ref <309>: DATABASE ENTRY DATE: 2000-03-03

SEQ ID NO: 1145 - protein, 429 aa, Rattus norvegicus; identical to SEQ ID NO: 1125
  ref <308>: DATABASE ACCESSION NUMBER: SWISS-Prot / AAC79839
  ref <309>: DATABASE ENTRY DATE: 2003-02-01

SEQ ID NO: 1146 - DNA, 2560 bp, Homo sapiens; identical to SEQ ID NO: 1126
  ref <308>: DATABASE ACCESSION NUMBER: Refseq / NM_001467
  ref <309>: DATABASE ENTRY DATE: 2002-11-04

SEQ ID NO: 1147 - protein, 429 aa, Homo sapiens; identical to SEQ ID NO: 1127
  ref <308>: DATABASE ACCESSION NUMBER: SWISS-Prot / O43826
  ref <309>: DATABASE ENTRY DATE: 2002-06-15

SEQ ID NO: 1148 - DNA, 5564 bp, Rattus norvegicus
  ref <308>: DATABASE ACCESSION NUMBER: EMBL / AF081144
  ref <309>: DATABASE ENTRY DATE: 1998-10-06
ttttaaattttggttggtggcggcagtgctgggccggaggaaagaagggacacggagtcctccctcgctcagccaccccctccccgcttccccctgggccgggctccgggagatgtgccgggcggggggcccggcttcgcggagccgcgggaggagcgcgcacggccgaccccgaagcgccgctggacaggctggtgggccaggccttggtaccctggtgatgcggggcaaggccccccccacagtccgctgagatcaccgtgcccgcccctggccttcgccatggcccgcttggctgcagcactctggagtctctgtgtgacgactgtcctcgtcacctctgctacccaaggcctgagccgggctggactcccatttggattgatgcgccgggagctagcatgcgaaggctaccccattgagctgcggtgcccgggcagtgacgtcatcatggtggagaatgcaaactatgggcgcacagatgacaagatctgcgatgccgacccttttcagatggagaacgtgcagtgctacctgcctgacgccttcaaaatcatgtcacagagatgtaataaccgaacccagtgtgtggtggtggccggctctgacgcctttcctgacccctgtcctggaacctacaagtacctggaggtgcagtacgactgtgtcccttacatcttcgtgtgcccagggacactgcagaaggtgctggagcccacctccacacatgaatcggagcaccagtctggcgcatggtgcaaggacccactgcaggcaggtgaccgtatctacgttatgccctggatcccctaccgcacggacacactgaccgagtatgcttcctgggaggactatgtggctgcacgccacaccaccacgtacagactgcccaaccgtgtagatggcactggctttgtggtatatgatggtgccgtcttctataacaaggaacgtactcgcaacattgtcaaatatgacctgcggacccgcatcaagagcggagaaacagtcataaacacagccaactaccacgacacctcaccttatcgctggggaggcaaaaccgacattgacctggcagtggatgagaacgggctgtgggtcatctatgccaccgaggggaacaacgggcgtctggtggtgagccagctcaacccctacacactgcgtttcgagggcacctgggaaacaggctatgacaagcgctcagcctccaatgccttcatggtgtgtggtgtcctctatgtgctgcgctctgtttatgtggatgacgacagtgaggcagcaggcaaccgcgtggactatgcctttaacaccaatgcaaaccgagaggagcccgtcagtctcgccttccccaacccctaccagtttgtatcttctgttgactacaatccccgggacaaccagctgtatgtgtggaacaactatttcgtggtgcgctacagcctggagtttggacccccagatcccagtgctggcccagccacttccccacctctcagtaccaccaccacagctcggcctacgcccctcaccagcacagcctcacctgcagccaccactccactccgccgggcgcccctcaccacgcacccagtaggtgccatcaaccagctgggacctgacctgcctccagccacagccccagcacccagtacccggcggcctccagcccccaatctgcatgtgtcccctgagctcttctgtgaaccccgagaggtccggcgggtccagtggccagctacccagcagggtatgctggtagagagaccttgccccaagggaactcgaggaattgcctcgttccagtgcctcccagctctggggctctggaatcctcggggccctgacctcagcaactgcacttccccctgggtcaaccaagtcgcccagaagatcaagagtggagagaatgcagccaacattgctagtgagctggcccgccacacgcggggctccatctatgctggggacgtgtcctcatcggtgaagctgatggagcaactgctagatatcctggatgcccagctccaggccctacggcccattgaacgagagtcagctggcaagaactacaataagatgcacaagcgagagagaacctgcaaggactatatcaaggctgtggtggagacagtggacaacctgcttcggccagaggcacttgagtcatggaaagacatgaatgccaccgaacaggtccatacggccaccatgctcctagatgtcttagaggagggtgccttcctgctggccgacaatgtcagagaacctgctcgcttcttggctgccaagcagaatgtggtcctggaggtcactgtcctgagcacagagggtcaagtgcaggagttggtgttcccccaggagtatgccagtgagagctccattcagctgtccgccaacaccatcaagcagaacagccgcaatggtgtggtgaaggttgtcttcattctctacaacaacctgggcctcttcttgtccacggagaatgccacagtgaagctggcaggtgaggcagggaccggtggccctggaggtgcctccctggtggttaactcacaggtcatcgcagcatccatcaataaggagtccagccgtgtcttcctcatggaccctgtcatctttactgtggcccacttggaggccaagaaccacttcaatgcaaactgctccttctggaactactcagagcgctccatgctgggctactggtcaacccagggctgccgactggtggagtccaataagacccataccacatgtgcctgcagccacctcaccaacttcgcagtgctcatggctcaccgagagatctaccaaggccgtattaatgagctgttgctgtcagtcatcacctgggttggcattgtcatctccctggtctgtctggctatctgcatctccaccttctgcttcctgcggggcctgcagaccgaccgcaacaccatccacaagaacctgtgcatcaacctcttccttgcagagctgctcttcctggttggaatagacaaaactcagtatgaggtcgcctgccctatctttgcgggcctgctgcactacttcttcctggccgccttctcctggctgtgcctagagggcgtgcacctctacctcctgctggtcgaggtgttcgagagcgaatattcacgcaccaagtactattacctgggcggctactgcttcccagccctggtggtaggcatcgcagccgccattgactaccgaagctacggcactgagaaggcctgctggctgagggtggataactatttcatctggagcttcattgggcccgtctcctttgttattgtggtgaacctggtgttcctcatggtgaccctgcacaagatgatccgaagctcatccgtgctcaagcctgactccagccgccttgacaacatcaagtcctgggcgctgggtgccattgcactgctcttcctgctgggcctcacctgggctttcggcctcctcttcatcaacaaggagtcagtagtaatggcttacctcttcacaaccttcaacgccttccagggggtcttcatctttgtctttcactgcgccttacagaaaaaggtgcacaaggagtacagcaagtgcctgcgtcactcctactgctgcattcgctccccacctgggggggctcacggctcccttaagacctcagccatgcgaagtaacacccgctactacacagggacccagagccgaatccggaggatgtggaatgacaccgtgaggaagcagacagagtcgtcctttatggcaggggacatcaacagcacccccaccctgaaccgaggtaccatggggaaccacctactgaccaaccctgtgctacagccccgtgggggcactagcccatacaatacactcattgcagagtctgtgggcttcaatccctcctcgcccccagtcttcaactccccaggaagctacagggaacctaagcaccccttgggcggccgggaagcctgtggcatggacacactgccccttaatggcaacttcaacaacagctactccttgcgaagtggtgatttccctccgggggatgggggtcctgagccaccccgaggccgaaacctagcggatgctgcggcctttgagaagatgatcatctcagagctggtgcacaacaaccttcggggggccagtgggggcgccaaaggtcctccaccagagcctcctgtgccacccgtgccaggagtcagtgaggacgaggctggtgggcctgggggtgctgaccgggctgagattgaacttctctacaaggccctggaggagccactgctgctgccccgggcccagtcggtgctgtaccagagtgatctggatgagtcggagagctgtacggcagaggatggggccaccagccggcccctctcctcccctcccggccgggactccctctatgccagcggggccaacctgcgggactcgccctcctacccggacagcagccccgaagggcctaatgaggccctgccccctcccccacctgctccccctgggcccccagaaatctactacacctctcgcccgccggccctggtggctcggaatcccctacagggctactaccaggtgcggcggcccagccatgagggctacctggcagcccccagccttgaggggccagggcccgatggggatgggcaaatgcagttggtcactagtctctgaggggcctcatggaccagaggcctggccagggagggaatccaggaggggctctggtgggagcagagactgatggaggcagtggctggtgggccactctctccaggtgcccctctgcctgtgggccccacagtccccttggggactatgacctgggccccaggtgccagggttagtagacagggtttccaccagccacaagccccagcctctttaggggagtgcattgaggagaagcccccagggccctaggagtgagggagaagctggtaggtgtgaccaacgtccaaagctccctccctttggagggagaaagcaagggataaggcttccctaggtgtacaggggtggccacttttgaggtggccgaagccttgcaggatacaccctatctgctgctcactcttcttcgtccaccagaaaggagcagtgggacagatggacagggtccttccatgctacagttccttgcttcttggagactgggccttacatcctgagagagcccaggcccaggggatggatggggttgtgagggctggtggttaatggtggaactttctctgaagctcctttctcccttgctattggtccctatctcccgagcaagcctaccctaaacccccagagtgcacccaatgaccccctcccttggggtgactcctgatgaagcacaactccccgcagggccccaacccactgcagtggccatatttgggcagttcccagtcctgtgggctgggctatctggggagcagatgtggggtctggggctccctgaggagtgggtcctgggtttggatctttccctagggggtcctcttacccttctcttcctcccctattgctgtaaatatttcaacaaaatggaaaaaaaaaaaaaa

SEQ ID NO: 1149 - protein, 1515 aa, Rattus norvegicus
  ref <308>: DATABASE ACCESSION NUMBER: SWISS-Prot / AAC62650
  ref <309>: DATABASE ENTRY DATE: 2003-02-01
MARLAAALWSLCVTTVLVTSATQGLSRAGLPFGLMRRELACEGYPIELRCPGSDVIMVENANYGRTDDKICDADPFQMENVQCYLPDAFKIMSQRCNNRTQCVVVAGSDAFPDPCPGTYKYLEVQYDCVPYKVEQKVFVCPGTLQKVLEPTSTHESEHQSGAWCKDPLQAGDRIYVMPWIPYRTDTLTEYASWEDYVAARHTTTYRLPNRVDGTGFVVYDGAVFYNKERTRNIVKYDLRTRIKSGETVINTANYHDTSPYRWGGKTDIDLAVDENGLWVIYATEGNNGRLVVSQLNPYTLRFEGTWETGYDKRSASNAFMVCGVLYVLRSVYVDDDSEAAGNRVDYAFNTNANREEPVSLAFPNPYQFVSSVDYNPRDNQLYVWNNYFVVRYSLEFGPPDPSAGPATSPPLSTTTTARPTPLTSTASPAATTPLRRAPLTTHPVGAINQLGPDLPPATAPAPSTRRPPAPNLHVSPELFCEPREVRRVQWPATQQGMLVERPCPKGTRGIASFQCLPALGLWNPRGPDLSNCTSPWVNQVAQKIKSGENAANIASELARHTRGSIYAGDVSSSVKLMEQLLDILDAQLQALRPIERESAGKNYNKMHKRERTCKDYIKAVVETVDNLLRPEALESWKDMNATEQVHTATMLLDVLEEGAFLLADNVREPARFLAAKQNVVLEVTVLSTEGQVQELVFPQEYASESSIQLSANTIKQNSRNGVVKVVFILYNNLGLFLSTENATVKLAGEAGTGGPGGASLVVNSQVIAASINKESSRVFLMDPVIFTVAHLEAKNHFNANCSFWNYSERSMLGYWSTQGCRLVESNKTHTTCACSHLTNFAVLMAHREIYQGRINELLLSVITWVGIVISLVCLAICISTFCFLRGLQTDRNTIHKNLCINLFLAELLFLVGIDKTQYEVACPIFAGLLHYFFLAAFSWLCLEGVHLYLLLVEVFESEYSRTKYYYLGGYCFPALVVGIAAAIDYRSYGTEKACWLRVDNYFIWSFIGPVSFVIVVNLVFLMVTLHKMIRSSSVLKPDSSRLDNIKSWALGAIALLFLLGLTWAFGLLFINKESVVMAYLFTTFNAFQGVFIFVFHCALQKKVHKEYSKCLRHSYCCIRSPPGGAHGSLKTSAMRSNTRYYTGTQVPGQGRHIHQVSLGPRGRSALPESQKDPGGQSGPGDPLTFGLCPSRIRRMWNDTVRKQTESSFMAGDINSTPTLNRGTMGNHLLTNPVLQPRGGTSPYNTLIAESVGFNPSSPPVFNSPGSYREPKHPLGGREACGMDTLPLNGNFNNSYSLRSGDFPPGDGGPEPPRGRNLADAAAFEKMIISELVHNNLRGASGGAKGPPPEPPVPPVPGVSEDEAGGPGGADRAEIELLYKALEEPLLLPRAQSVLYQSDLDESESCTAEDGATSRPLSSPPGRDSLYASGANLRDSPSYPDSSPEGPNEALPPPPPAPPGPPEIYYTSRPPALVARNPLQGYYQVRRPSHEGYLAAPSLEGPGPDGDGQMQLVTSL

SEQ ID NO: 1150 - DNA, 31737 bp, Homo sapiens
  ref <308>: DATABASE ACCESSION NUMBER: EMBL / AL157903
  ref <309>: DATABASE ENTRY DATE: 2002-09-15
gatcttttcccactcataaactttcaaaatcacaaaatcatgatttgttttggttgggtagctactccaacattctttcttcacattcttccgtggcattgaaaacttgccatttcagtcttcatggctccctttggaaacaacttaattatgtgaaattgtcatgtagctttaagcccttctgaagatcataggtcaagctgaaaattaaaggggacccttgctttatagtgtcagttgtaccttttggaaccttggcagaatattgattaaacattttaccaataagtttcagattgatttacatattgtgtaaaatttatcaaaagtaacagtcaacatctgatggaattatgaagttgatgggattatgaaggtaactagaggtacctgcctcttttcctcttaatgaaattagtcataaattaaattgttactgaaacttaaaaccaagataaagctgaaagtgtatccttgagtttttctgaaatgtttctccacttgctttcttcctgatctgagttttctttctttctgtctgtcttgtcttgtcttgtttgtcttgtcttgtcctgtcctgtcctgtcctgtcctgtcctgtcgtgtcttgcctcttcgcttctcttctcttctctttttctttttttttctgagatggagtcttgctctgtaccccaggctagagtacagtggcaccatctcagcttactgcaacctctgcctcctgggttcaagtgattctcctgcttcagcctctctagtagctgtgattataggcacacaccactgtgcccggctaatttttgcatttttattagagattggggtctcaccacattggccaggctggtctcaaacttctggtcttaggtgatccacccacctcagcctcccaatgtgctgggattactggtatgagccatcgaacctgaccttcttttttaagttttaatttgcttgtgctgccagaggaaaaatggctggattgcctgtgtcttaaactcttaacttctataggctgcacactctttctccccaaaatccctgcagcaagtgaccttgtcaaacaaaagtgtggaataatgggaggcagcccagtgatggtgggtcgtttataagtagctgtttgctactgtcagaacaaaggcaaatcagagttgcattaaagggatatgacagagtgaacaactgctggcccacttccctaataatacttgtcttctagtgttggattgaaaactgagtggctggagtagttattcgtatgggtttgggatgaaaaatatataggaaaataaagatctatttctgtcatttaacaaaatacagaatttaggaagcaaaatttgattaaagcagctttataatgcttttgagtgacagaaacattatgagtatgttatgttctattacattgttaatagcattgttcattgttatataggatttttaactgtgatatatttgaatctgtttaatattgcaccatattgtgaccagattcttgatgtacttgtgtaaatttggaacaacaattaaatcttactctttaaaatactagttaagtgtagcactcttcttacatgtccataatggaaaaacacttgccttttatttgtagcttgatatgtagtctgtccttttgttattgtttttggagggggcttagggtttatgtgtgacttaggtgctgctgtgaaatggagagcatcacctatatctggcatttgcatttttgtaatattgttttcaaaatgttccagagaggtacattttcttccaccccgtctctctaatgcacagttaacagtatgtccttcacttgaactttctcccttgtaaatcaattatgcatttgctatagtagttcagctttttaaagtgcataaggagaatactgtataaaaagtgcttgtaaaacaagtctttttctaagagtctagaccttgagaattatgtttttgtttttcaataaatggttaaggtattgtaaaaagttggacattttaccagagttaccatatttgagctaatttttagaatattttttaaagagttaagttatagtgctttccacgcaagactttatatgaaataaatacattaagaatgtagagtttttgatgccttgtcaaaagtggaattaaggttggttttattatatgctttgaatgtgtttctgaaatattttttgaagcggatacttgtaagttaaataccttttatcatttatttttatcataattttatatatactctgtcagggaataatatttaagaatcccaacatttgtttttatggtatatctttacattgtaatctgtagtattttaatttcctataaacctcttaataatactagacaatatgtgaccttttacactcattcatatgtgctataaaattactttttcctttgattctattaaatcctttcagaccactagagaaatccctgatttgtacttaacagaggttttcatgtattaacaagtagagttacctggctatcaataagtacttgtttaactagagtgactaagttaaagacttgtagaagttaggactttctgaagctaataatccaacaccctaatttgtgactcgagggatcagatgcacagtagttcaagacttgatgtttttgttcagggtaaggtagtaatttagtgacagaatccagataactcaaatcctcagactagagaaaaattattaagatttcttgacatttattgttattccctacctttagcttttacacagctaaatctacttgtggaagttcagcttcaaaaagttttagccatagtttcaaagctgttgactgtggttgaggtttattaacaaccttggttttctaatgtagtggaattcaaagtagatcaaattccttccctgagccaggattctctgagtgctcttcttaaccactcctgcccaaccgctcattctacaatattgagccttaactcctgttcctgtctcctggccatcctttttaatagttttgtattaaattgtccatgatcaacaacattttgttttaatagatattctcacttcaaggtggcataaaatagtatatatttctcaggattgactttcccaattaagagtatttgccttcatctctgtgcattaaaatttattgctgcaattgacatgactaaggtggcataacagtgctgtgagcataatctagagctagtctgaataagtctgaatcatagctcttctgttcatgaccttgggccacttaccctttctgtgctttgttttacatatctttaaaatgaggattaaaatattactattaggattaaagtaattataatattattcataaagtactgagaatcttgcctgatatatatagtaagatgctacatcagtgttaaatcatagaaggagccagtaaattgtttcagtattttaatgtgtgtacttgaggttctggagatattccaagaacaacacacattcctagtttgacctgaatgaaccaggaatatttaaatacatagcatttatttttagagccacattttactgaaactaaacctaggaacaatacgtggctttttttggggaggggggaggttgttgtttgctttaagaaccttgctttgttaaaaaaaaagcctaacttgcctttttgggaaggcaagttagacgtagaccttaaaagaaatctagctactgccatttataggtggttatatggataccttacctttagaagttattgagtgtgacttatctgcttaatagcgattaaatccgtttaaaatgtttaccaggtgttaatcataagtcaaggttgacatagccagttaaatcttatttgaaagaaagaaaaatctctgtaaatcatgtttacagattttttaaaaactggctggcaatgtttattataaaaatccataattttccatttgtttgctatattagaatactatgcagttgtaatgaataaacatttatagtttctgctcctaaaaattggactacagtttcgtgagtttagtctcatctggtaagctttccaagagattcagggaagccatagctttccaagtatgcaaatctcttacattcaaagcacttccctcaggcacaagaagactatttcagtggcatgctttgctcttttcccttaacatatctaacatgaggaacatagataggggacagcctatctatgtttgaatagatgttgaagaaattatatgagaagaattgatagaaagttttatttttaattgtttgctttgtaatatatttatttggtgactgtaaaaagtagatttcagaagatttatttatactatcaatgcatgttttaaaattattcgtttgagttgtaaataattaatgaaaaaggcattttatgtggcactgaatcaacctgttagtttcagttgttcaccctggatttctttcatttaatcgtcttcttcttactgcaaaggaggacatttattcattactttgcccaaataatactaacacactagcagatggtcactttccaactggtttgtcttcagaaaagaaattaaaatattatagtgccagagagagatgttgtaatgtgtccctttcaaattaacaggtcattcttttcaactattttgtaactgtaaaatagctcaatgtcacataaaaggctaaaagctagagtaaatggtgtcatgggaaacatgaaataaacacagtgtaatggtttatagtcttgtcttgaacacactaagaatatttcttttctaaaaagacacaaattatatgctacggtagtattttggttttactggattctagtttaattagttcatatcaaaagttagcacttgttttaaaacgtgtatacattctgaaagaagatacttcccccaaaacatttaaaaataccttgaatatattcttaaacaaatatgttagcctagcaaacaatgaaatgaaaaccaaatatgaaaataatgtatcttcttcctttaccccttcaatgaatgatctgtaactctgataaaaagattagtttagagattattgaattattttaatactaggaccagactgaaagtaacattgtgcatttagaaatgcaacatataaatgagtagaattggagccccacatgattgggaaataagctggagaaactgaagtatgcttaaaacacagagtaattagcgagcaagctcaggaaaaaaaaaatctcagaatacttagaagtagtgtttgaggaactagaatcatcacagtttaaattatttgttttgacctttctctgccactgaattgctgtgtatctttgggcagtcacttagatcatttccttgactagaacagtagcaagttggcttagacaactcttaagccctttttttaaagtgttatagctatttggttggtgatgaattacttaacccagaatttaaaaaaaaaaaaaacaacttaaaatgcatttgcctaagtgagccaggtagatttataatgagaaagaaagaagtttttataatattatttattcttcttctgaaaaaaatcaagtgataatagaaacccaaatacaaaataactgaattcgatttgcattcctcctaattactagcactgtgaacaaaaacaggtcgtttaaatatgttgtatgggcttggtgcagtggctcacacctgtaatcctagcactttgggaggccgaggcgggctgatcacttgaggccaggagtcctgaggccaggagtttgagaccagcctggccaatgtggtgaaaccctgtctctattaaaattacaaaaattagccgggcttgttggcacgcacctgtaatccctgctactcaggtggctgaggcatgagaatcacttgaatcctggaggtggaggttgcagtgagccaagatcttgtcactgtgctccaatctaggcgatagagtgagacattgtatctaaataaataaataaataagttgtattttggatcctcaataaataagttgtattttggatcctcatccgaacaatggaaattataatttttctggttatctcactgtgtctaaagcgatgtcctactgtgttgcctttttcaaagagtgatcatttgactattcctataagagcccttattggaatgctttctagcatattatttgcctcagatactccatctgtgtggggagttctttctcaaatagttggacactttctgtctttttaagggtaaaatatatgagacagccttttctaatttgtacagagatgaaaaattaagtcagccttaagttctttcttaactgagagtttttcttagaaagtaattttaagatattgatgcaggttattttcctccttagcttaacaaggttcaggttcttgtctcagtaccaggaagaagtaggcatgcggacacttgaagagtgagtggtgtagattttattaagcgaaaggaaagctctcagcaaagagaggggtcctgaaaccaggttgccgggttctccctttacagttgaattcgagggcttctatatctgcttgatggggctgggttttctatttgtataaggcatgaatttcttctccctcccaccgccccccgccccattccgtccagtgcacacgcgggcccttagtctgagccattccacattgatttatttcccttactgtgcatgtgttaagggacagaatttttcaccacgggcatgtttaggcaagccccctgtgcacaatgacattggtgggttggatgttgtcctgggacccttccctatctgcctaggcatttggctgtctcctgcctctatcaatatctttttgtccttccctctcaaatccctactttaaccagcgaagtggaatatttgtcttaaacattgtggtgttattactcatcccaccccatttcttcctatatttgtttgaaatgccagtatactcatattgcataatataggataaacaggtttatatgtggaagtgtgaaattatatattgttatgaatggtaggggaattggtagatctgggactcaaaatgattgctagaactttatatatatatatttttggtaaggcattaattcactgagtacttcaaatattttattttatttttgagacggagtcttgctctgtcacccaggctggagtgcagtggcgcgatcttggctcactgcaagctccacctcccgggctcacgccattctcctgcctcagcctcccgagtagctgagactacaggagcccgccgccacgcccggctaattttttgtagtttttagtagaaacggggtttcaccatgttagccaggatggtctcgatctcctgacctcgtgatccaccagcctcggcatcccaaagtgctgggattacaggcgtgagccaccaagcctggtcgtacttcaaatattagtcccatgttcatgtttgaaattgtttaatcaaaagttgttacaaatagtactgaaaaaggaaagaaacctgcccttgtgattgttcttgctcatggttatcctctctgttctgtctgttcatcctgccagggtaagctgagatctcccttcctccataatgtattttacagctccagttctcattagtctttactctgagttcctacaccgcttacagtatgcaccacataattgagtatttacttatatatccttccgtgtatggattggtgatgtttcatctgtttctttgcttcccctgtagacctcagactatacaaggtgaagacaatattttgtttaatctttccctaaatgttcctaagaatgtgttagagcacctaagtggtgctcagtgaatactagattgatttgtttttttccttttctccatttcctttcactgagtgtgaaaattgctagaaatcacacaccatcccccctttttttcctgagtctatctttttaatgggcctctcttctttcctggtatgccaagatagatgtactacaaaagtctgtatatagaatttgtacaatttgtttcttgattttaagtatatgaagaaaaacgtggacatagagaaatgatgattcataatatgttctaattagaaatgtgaaagttggttaaacattaaaaaatcagcttggtgttacagatgtgttttttttccctttcttaattgtttgaagtttgcagaatttactgttttctaccgtaactaagagatatgctttctggcagacctattgaagaatttggtttatgccaaatatactactaataatttaaatgtcccacatagttaggatcttttggtattcatcagagtaaaaattaattttatcttaaaaactagagtaaaaaacctttttttaaacagtaaaaaatctgctttctgcaaactgtgtccagataaccagagctgtttagctggataatgaaacagtaaatgtgaaagcaatttgaagaacatacacattaacattatggttagaagagtgagggatggaatgccttttgtatccatgacatatttcaaacagaaaaatatgcaatctgttttcatagttcataagatgctccacaatcccctctcaaccagttctggtagataattaagacctaacacatttattgtatgtaatgaataatttctctaatgcatctagaattcaacagaattgggaaatagccctcaaataattttatgtggggctttattttcttgtggaaccctagttgagaaaggctatgcaatctcttttaacctctatttgaacagaatcttattttgtcacgtatatgtttgaagaccttaacccttctagattatttttacttgacccaattacttagtggttaagaatgtattgcctatacaatacagtccaaatctggttggccctatttgttttctaaagttttaaatgtagctatgttttattgacagcatttttgctacttaattatgtcttttcttgacagctcaaactatctctgtttactcttatttagaatgcagctggcaacagcagttggtttgtgaaacccaggcatataattaacttccccagttaaggtatggtttgtttcattggaagagaaagaattttgggggtatgtttctttagtctgagaagtaatgcagtttattttcagtatggtatattttatgtgacagaacataagcagagaattttttaaaaaattataacattctaacattacttgagcactaaagtgctacaaaaaatactttgttattatttgaaccacgaaaatcagatattagcattcagcgtaaatgtcaaattaacacaggccagtaggaacatttgtgatcatgttcttctcacatctacttgcatggataatgaagctttgactattgctttgatgtagatttttggaggaaatcctcctcctatttccaagacactttgtagttactaattctaagagagtataagcgaatccatttatttaaaataaaataaaaatggggggaaagatatttaagcaataaatttcataccatgagattttttatatcctggttactttaaaacccagtaagctgccctgggttctctcctgatactgcacagaacttttgttttacatcctcgtcttcctattattagttcaactatattgtttttctctttccagcactctatctggatttttgtaattattactgtcttcctattactagttcaactatattgtttttctctttctagcactctatctggatttttgtaattattactgtcttcctttatcagttttaaaagttaagatatgtggtatttttgagatcagaattgtagccattatattgatgtgctgcagatattaagagaaaaagtccttagttgccagctttttgtatactcaagtgttatggattcttaagaataaatgtttctttgttttcatatgaaattgtcttttttttttttttaggatacatgtcttactttgtcacccagtctagagtgcagtggtttggttcccttcagccttgatctcctgggctcaagtgatcctcccccctcagcccccagaatagccgggactttaggcatgtgcgacaactcccaactaacttttgtactttttgtagagacggggttttgccacattacccaggctggtcttgaactcctgagctcaagctttgtaatcccaaagtactggaattacaggcacgagccaccgcgcccatcccaaactgccttcctttttgcccagcccatgagaacaacctgtgctagtgaatgatttttaaagaatcttgctacttttttctgcctgggattatgtgttgactgaatatagtttcctaagagatactgttgatttttttaaactaaacgtctaccagactttctgctctgttgttccaaaattggacaatttcctgcctggtattttatttttaagttgaaaatgggaaaattgctaatgatgttgaaagcaaaaatggtattgaatgctttctgactaaacatatattgaacaaagcaaaacactatgtatctgctctttcatataacattcggaaactcttgtgacataatcagggctattttctgtataagatggggaggtaggcttataaatatgctacgtaagtgaccagctctagaggaacctgatacgaatgtgaccccatactgagtttaagtaaataaaacagaaataatgaatatatagaatcatgacccttcctgctgatgaagaaaatcattttgatttttgatatagagtgatagaatgaaaactatattggtaatattgcttatattatatagtagttgaagtgagtagagataaattcataattgagtgatctgtaaaagagtgttccagaataacatatggcaaaatgaactgaaggaggacttttgaaaacaaatagaattatgttggaaaacaagtgtctttaatggattagttaaggaagtaaaaataattaatataaagcaagggaaacagtgtatggagttagagacataaaattgccaatttatttattgattttgttttataatagttattatttgaaaaacgaccaatacgaataaatagaagtaaggaggggaaagtgaaggaaaactgtttttagctggtatcatctatttggcaatgtctttactgttatgcttataatacttgatttataaatgttaactgtaacatattcatgtaaatatttgtgtttattttatatatgactcttttaacctgatgtttcatctctattttcagaggaatttaaaaaaaatgtttaactttagacattagcgattactggttcagaaacaagtcttctaatgataaattaattcattagtaaaaacttcccataaacacagctgctaaggcctgccaaattggcaccttggttccacgtcttatccagggcttgacaagaatatactactgcttacttagttaattactgctcacagatagaaaaggaaaggcctttaattcagcatttgtatcgtcgcatggccctgttcagtcaagctgagtgcatgttacatgattgcctgagaggaacagaaaagctagtttctcagtctctaaccagaatgcatgataaggcttggtgtcaaaaagggcaagatggggatcacagcaattatggcagaggcaaagtagttactttgacaaccagattgaggattcattgcgatttattatttactacttgaaaatctcactctgatttaattaagggttgagatttccatgaagtctgtcttttctaaatttgagcaccctgttactgttgtttatgtgtgcactgaaataatctcaaactgatgttactccaaaactgtgacgaattaggcttaacatgtagttttttgaaaatttagacaggtcagataacagttaactgaaattaactggatcttatattgggcgatggtaatcaatgcttactagtaacttagtaacattgactccctgggtatcttcaaagcagcctggttgtaataagtgaattttatcttttttgttgaaagcagctttaaataatttatacctgatttgtatttcagtgtatcattttagatatacacgttatttctttgcagttacttaatggtacacttttttgggtggggagacaaagtcttgcttttgtcaccaggctggagtgcagtggtgcgatctcagctcactgcaatctctgcctcccaggttcaagcgattcccctgcctcagcctcccaagtacctgggactacaggcatgcaccaccacacccggctaattttttgtgttttagtagagacagggtttcaccatgttggccaggaaagtttcgatctcctgacctcgtgatctgcccgtctcggcttcccaaagtgctgggattacaggcatgagccaccatgcccagctggtacaccttttatattgcccaaattatagtctataaaatgtgattgtaatcagataattcttggccagaaaacgaaagttcaccttcttagagtgagttaaccattaggtaattttgtattttatgtttttttcttcccaagtattcctgaaatgctttttacctttgcagatgtaactcagttgactacttattcagcattaattaataataaaatatgataggcttttcaacctatgatttttatttaaacaaaacctttcaaataaaaataattttaaacctgtatttgatttctatttaaaatggagtgttttcatatactcttttaaattaaaatagtgtctgcttagctcgtttacattctttctgtcagaatgtctgcctcaggattctatatataattaatgtaagaaaaacaagagggtaatcccttggtagaaaactggtaatggattaaaagaccatagctctgaaattccagtaatgtgacacattttctctgaaagatgcacttaggcccgatatctagagatattaaaaagtgccccctattttaattagctaaagatagacattcctaatatattttgttgtatgtttaatatggaatattataagtaaattcatacactgatactaaatacgatttgagaagaattactgctttggtgagaagagagctttgagtgtcacttgaagcttcaaatttcttactgaaccaattgataaaatgtacaaaatgtgtattgagaatgtgcagaacagccacccaggtagtttgatcagtgtctttctacatagtgcctaacatgaactagtttaagaaacttgaggaatccacataactatccttggttccaattttttaattaaaaagtttagactagagcagtgcttttcaaattgtgatttccaacccattatcagtttgtaagcacagtatttagtgggttacaatcatcacttatgaaagagagcaaatatcagagcacagtttatataatgagtattatttcatgaaatttgcattaattatatgttcatatcttaagggtacattgttttgatataacatgtcatacttaaggaatgcagtaaaaatatataaaaggaaacaccgggctgcatgatcctaaaaatctctcccagttccaacattcccgagtgaaattttaaacatgtagctcttccttaagtagcattatatcattatgttatttcaatagaatttgtcacatgcagatgcattttgggagaaaaagaggagaaaggtgcaagacttgatattctgagagactaatacctatataaattgtaattattcctaattgctatgtgtgataatttaggcctgcacaaaattgctgagagcatatcaaacaaatgattagttctcattgtcaggcccagaaaatacctcgtgactaatattagagtacatcctttaaagatgagtatgatttcattcatttgggatagagaattcagggaaagagtctggatactttggctgtggctagacagtcaagcggccttctatgccatacttaggcatttggaatttatcttaaaagaccagggaaagctgtcaaacccattcagcctgctaggattagctctccttttagaacgatgaaagtagtaatgtgattgttgaactcaagtagagaaaaattcaaggtatggagacaataagttacaagaatttcagaaggtcagctataaacgtagaaactcctcttttgataaagagtgaaatacaactctttatcaaaagcttgacagtgctcatacaacatacgaattgagtttcactttagtattttggaaatactggaacagctttcagtacctttgcaaaatgcccaagtaaatgtatgtgaaatgttgaaagacttaaatgagtccggcatataggaaaaccttgttttattgagctttgtagatattgcattgtttttttattttatttatttatttttttgagatggagtcttgctctgtaacccaggctggagcgcagtggtgcaatctcgctcactgcaagctctgcctcctgggttcacgccattctcccgcctcagcctcccgagtagctaggactacaggcgcccgccaccgcgcccggctaattttgtttttgtatttttagtagagacggggtttcaccttggcaccttagtagacccaggatgttctcgatctcctgacctcgtgatctgccccccttggcctcccaaagtgctgggattacaagtgtgaaccactgcgcccggcctgctttttttataaattgaaggtttatggaaaccttgtttcccacaagtcttatcagcaccatttttccagcagtatgtgctcacttcatgtgtctgtgtcacattttgttaattcccacaatatttcaagtttttctattatatctgttatggtgatctgtaatcagtgatctttgatattattataactatttgatgtgtattattgtaattggagtgccatgaatcatgcccattccagacgatgaacttaaggaatattaggttttctgactgctccaccaactggcccttccctgtctctccccctctcatcaggcctccctattccctgagacacaaaaattttgaaattaaccaattaataatcctacaacggcctatatatgttcaagtgaaatgaaaagttgcacatttcttcatattaaatcaaaagatagaaatgattaagcttagtgaggaaggcatatcaaaagcttagacagaacgaaatctcggcctcttgtgccagttagccaagtcgtgaatgcaaggaaaaagttcttgaagtaaattaaaagtgctacttcagtgaacacatagatgataagaaagtgaaacagcttttgttgcttatatggagaaagttttagtggtctggagagaagatcaaaccagtctcaagattctcttaagccaaagcataatccagagcaaggccccaactgtcttcaattctatgaacgctgagaggtgaggaagatgtggaggaaagtttacagttaccagaggttagctcatggggctgaaggaaagaagccattgttcccataacatagaagtgggaggtaaagcagcaagtgttgatatagaagctgcagcaagttatgcagaagatctagctaagatcattgatggaggtggctacactaaacaacagattttaaatatagacaaaacagccttctgttggaagaagatgccctctagactcttcatagctgaagagaagtcagtgtctggcttcagagtttcaaaggacagactgtcttgttaggggctaatgcagctggtgactttaagttgaagctaatattcatttaccatttcaaaaatccttgggccattaggaattatgttaagtctgaggaatacagatgtacccacccttctctttgcctttttatcaagactcagtgtacaaggattgtatgtgtgggtcacctcggtctcctctgctttaatgctcctcatctctggcaataaattacttctctttgaaaaacttaacatttattaatgtgaattttgggatcttatgcacataatttatacgagcactaacttgtcatcctgtctctgaattgaatcttttgatagtttcctgatatagtttatgctgtgtcttctgttagaggaggctttaaaaggagggagctcttgatccctataggagaagcagagcagatagaagggcattccaagtggggagaatactgtgaagaacgctacaaagacaggaattcacataccagattttatatagtgaatatttaagactcaattccatagtgtaaacagattaactttgttatttaaataaattatatggaaaaaattaattttggaattttctactatagcagcttggtgccacaggtaccatttgtttcttttatagaaaatttatttttggaaaaacagttcatccatctacctttcagcatgtcaaggttaactcaacagccaagtgccagccgtgggagatactgggaagaaacttggactaagttgggggtcggggagaatttggaacaaacagcaagaaggtaattaagagttgggagaggtggggattaggaaaaatgtatgcaatatataggaatattttgcttgagcaaaatatctcttattgaatcaatgtgttggggcacacatcacgcaggggaaatgtatcttagctgtgataagggaactgtggtgtagggtgcagagatacacggcagtctttgaaaaaactggcccatctccatgttcacctaggtctacagtctggtagctctgaaccagtaagattatagaaatcttgatatcttctctttggttctcagggtgagaaattgtatatttttagattgttcccacaaaggggacagaatttctgttattctcctgggccgagtgcctttttgttcatctactcaccttaacccaagtcccgtttcttggtacctcagggttggcagccatcttcattagctctcttattactgaacctagttggtttagatgaactggtcactgttagtccaaaaagggtttccagttcttgtttttgttttttatttccccccatgcatgtatatagaagtataattttagtcttttacatacttttctgggaacccattcccaaatcactaaatattattatagtattatttctaatatttatttttactgtatttatattatttaacgttatattgttttttattctattacattgttttatgatgttttgcatcatattccattttgtcaatatagttttaaaatacttctttactttggaccttcagtttgtctcaacatttttattcataaattttatctaaatcttagtcaagttttttggttattgttagagtatgttgttcttgcaaatgggatttggtaaagctcttctcagaaagactgtaccgcctcataatttcagaaatatatgatgctgtctgttttaaaacagccatacaaacaaatccttggtaatttgataggagaaaatgtcaccatattttaaatttttgatgcctttttgtccttgccaattaaattgagcattacatgtttatttcctacttaaatttatttcattttccctttccatttcttacctactttgaaattgatactctttatttgtaagcacttttatgtagagtatttaaccttgagttactcgtttagacagctgatctttttttgctccactacacggcttttcaatatagaatgcttcagtttgaggtagatcgatttatctgtcttttggtggtttttatttcatgaatccgaatttattgctattttgagatcagatttacccatattttcttgttagtattattgttattctaacactgaaattattaacgcatttatgtttggaggtcttttgtaactagaacttagtcctttgcagaacataataagtgtggctaataagtgtgtgtgtgtgtgtgtgtgtgtatgtgtgtgtggttttatttcagagttgctttattttaatttatgatgaatttcagtttctattagagtagtgcttttaggttgagatacatttttttatccatcaatctttgtaccaacactgtgaattaatttaatatcatgactgcttttcaaatgaagagattggggactgatatttgaagtgatttatccaatgtcacagagctctttaagggatagaacaaggattccaagccaagtcagttaactccttgtccggaattacttttcactgtaaaatagttacccattttagaattaaacacttcagatttaagtagtttgatctcaataatatctgtacagattaaattaatatcttagggggaagtaatacttaagaggagcatttaaaaaatgtagttattgacctaattatttccccacccaccacactccctgtaggattttcataagcagagaattatattctaagattgtgttcttatttcattagcactgtgataagccataagaattgtgttttactatctttaatctgttctactccatatcaaaacattcattgacaagaggagattgtagtctattcactgattttgtccaaaccagttggaatagtggtcagcaactgtcttccataaatggctagatggtaaattttttagactttgtaggccaaatttaagggtgttgtatagatatttatataatgagagaaatgaatatccaacacatttattgacaattttcagatcttattacttgacactgacaatttcatacatttttatgtgtcatgaaatattgttcttttgattttgtttgaacattaaaaaatgtaaatggaccatgggaacactagtagtccaacccttatttagaagggactgttgtgggtatctggtagatcagatttgaattccatttgtaaaacatttgagtatttactttataataatattaaatataaattaacatcacagttttctgaggaaactgaagttcatttgtaaagaaacttcttcaagttttgccaagtcagtaaatggcagaactagaattcaaaaccttatctatttttcagtgcctgggttctttcatgtgttcattgttacatcttctgtgccaggcatggagataggcacagtgcatactggcatgaattagatgagttcctgcttctacatagtccttagtcatgatgctgcacagatttgggaaatgtaattttctaaaacctgcctgtcattataaatcagattcatctacacttactctcattttctgataaaaagtatttgcttgtttttgtgacttatcaatcctgtcttgtatttttctttttttcttgaatagtacaggaacttttttatctggtaacattcagcttcttaaggatgaaattaaaactatttgaggttgtaaggggaataaacatttaaagtaccaaggaaggggctattagagtagtgcaccagggcatggcaacaatggctctcaagcaggattcctatgagccttttttcctgcaactccttgtaatttgtcagaatctgtgtatccagaagttggaactgctctgtttcctctgcattgttggtacctgtagggaacaagtatgaaagactacaatgggctgtagtgtgtaggggcagagcttataccattggttctgctaccgtgctgttccttagttcccttgatgttcagcttgcagttaaatacaagaaaggatataattttaactctgcagaaaagtagtattacttcttttttaaggtaacattttgtaactttacaatgttaaaataaactccctgctttcccctttccccaaatgttgtgttgacaagattggaaaatagtttgtgttctttaataaaaaccttatcatttcattaaaaattgaacaaacctcaatagcaaacacaaaaatggtaacactgaaaccaaccacgaaatcaaagtcattacattgtcatttaaggaatgactttataaccttcatacgaattttgggaattggtttctgtccaactcatagtatcacagttaatagactacttctgtaagtcagctctttgcttcaggaagagcttttacaactggatggactttctgtagtttctggaagtggtagagttgtctccaacttgtattgttagtttcttttggttattccagcattgtctaaaggaggaattcaaatgtgttaaggacacagatacataatgaatgaagcaataaattagtgctattttctgtttggtggtgttttttttaaattattttcagtttgcatctattgtgttttgaggtagagttcacagagtgggttccttgctgcattttgttttatttattcttctattttgcaatttttaattggtccaagagcattcattgagaaaagtaatagcacaatagtcacagcattcactagagtatttttgtttcttttgtgtgtatcatattacccacttgattagttgttcccacaagctctgtatatcttttggaaatctatctttatatctgtgagataaaaataatcttcagttattaaaaaagagtcatctgtgttagtagtgacaatgtatattttagaaatttcatgtatgtagcatcattgagaatcaaatatgaaacattgtttaaaggaaaaagagtagaaattaaaaaaaaactttgattgtataagttattttttgagatgagaaattatttcaatatgttttttttttctctagaaacctgttggaaaatgccttgttactccagcagaaaagcatgtctattattaccaatagaattagtgtgttcagaaaaagaaaaggcttaatttacagccttttgaagttttagggaaaattccttttttaaagcatgcaggaggaaagacatgacatcacagccttaagtgggtaaaaggttacatggctgatactttttaagtgattgaattattagcatgggtaataatttgtggaaggtgaagaggtgccactagtttcagtgtgttaatcttccccacttaaagtgagaaataaatacctcataagaatatatatggggatatagtgtctttcctttctaagacacttgcttgagtcagcagtggttgcgtgtggtcacctttggattagtcttcggattcagagaaatgagtgggtggtttcagtgcagtttcaatgttgttaacccaaataagttctagagttggtattaattggcccccttatagaaacctttgaggaggaagctgttgttacacaggtaactttatacctttagagtttattgttgcctagtaaaaattaatatggaaatataataaaaattggtagggaactctttcattcatctacattgtggtcactcatgtgattcaatttaaatgtatcttttttttttttttttttttttgagatggagtttcactcttgttgcccaggctggagtgcagtggtgcagtctcggctcactacaacctccgccacctgggttcaagcgtttctcctgcctcagcctcctgagtaactgggattataggtgcccacagctagctaatttttttgtatttttagtagagacggggtttcaccatgttggccaggctggtctcaaactcctgacctcaggtgatccacctgcctcggcctcccaaagtgctgggattacaggcgtgagccaccgccccagacctgaaagtacctttttaaaaaggaaattttggttaagagttttttttgtgttagtgctttaaaaaaattgcttatatttaaatacaacaacgtattaactaaaaagacttaaaatccaaatttttactctgtttgatctgggaaacctgcctgggaaatacttaaaatgaagtctccaccctaatgagttttagcatcagtgacaaaaaaggagtggaaacctttacctagcaatgttggagtgactcactggatatgggaacaaatagctcatttctgcatttttgcttcttatttaattatttttaagaataaatacatactcaggctggatggaggtgggagtgaattaatgaaatttctaataacaaaaggatagtaaaaattataagagattacattaaataacatagagttggaaataaattatacctgcggagatgatgaaattgtcgtttacttattctgtaattgtttgctagtttctttgttgacagtgaatacattatacagagttacttaagaattttaatttgctaggacaatgcgaatgacttcagatattaaatttttgttagaaacttattgatgttaaactggttttaactagttataaaaaaaaataataattgtaaagagtatttcctgtttccctgtgagggtgggagggggacggagactctggaatgattttgaactctagcaggtcgtcagtcatttaagagcatattttcatagttgagtcccactgattaggggactctgatgaaaatgtcatctttgtcctgtttgtattctttatctcttgatatctggatttttgaaaaaacattttctgatgatgttcatgtcttaaatttataaactcaaaactttaatatatatataaaagttaaaactgtggtctttttgtttcttttcctcttaaaacaacttttatgttcttgagtatgtttaacatcttctggtacataagaattatagtaataaataaagcataaagtaaaataaagtaaaaataaaatgcctactgtgtccctgaataactaatattcagtttttgttgaaaagctcagagtccagtaaggaggtaatataagtacaaagacccttagaatgtgttacctgctctgatagaggagctcataattgttcattcattcatatatccatttatttaacatctttattttgtcactccataaagaacaccgtaaattggtcctttcctacgttttggcattatagtagtgaaccagataaatgacacttgtcctgaaggaggtctcatcccccatgtttgttactcaggaacagggattattgtatttttgttcctagtatcccaagtgtctagaagagtgctaggcacatagtagttactcagtagatgttaattggaggaaacaaaacaaatgacccaaacctaagctcaggttctcctttccctgttttcaagacctggtgtcttgaactgggttttgaagagtaattgttgcctaacagaaaaatgagtggaacatcctgtgcggaggagatagtttaaacagaggcactgaataattgggtaatattgaagctcagtgtgaaagtcactttttttttttaagtaaatcggaattaaagtattctgcctttgtgaacttagaagttgtaactatatactgagactaatagcatctctttgtggcatatattatttttaatagatgtgcttatcaggaatttttttaagttaagtattaaacataatattttataactgaaatatgttttcatggtacttgtgaattattaattagtggtagataatttagaagtttttaggtaggagaaattaatttctttctagtaaggaatttaaccccacagtgtttttgactcataatgtgtactttctttttaaaatgtcaaaaggcttttcagaagtagtagtatttgaaactatcagctaatggttttctaaaagtatatttttaccttagagcatctagagtgtccagaattttgtgactcttagcaagtccccaagttgaaaatttttaccttgtagcttgcataattggatttaaatatgtattttcattatgcatgtatttgttagaaaatattggtgtatttcttagtgtaacactattttgtatttaagttgattttacttaagatttcaaataaactgttaacattcttcttagaaaaaatttttttgaagtacttcattatttaaaatatttccaaaataatcaacagcttatttagctgggcatggtggcatgagcctgcagtcctaactactctggggtgaggaagaggctgatttcgagcccatatgcttgagcctagaagcttggggctgcagtgaactatgattgtaccactgcactccagctggacaacagagtgagactctctccctaaagcagacaaacaaaaaaacagcttctaaaccaaaatgacacataaaactaaggcatatcacttatttggactgagttgatgattgtgtagttatatgatcttaaattgttggaacactttcttttgcaacagtttcatatttctgtaagcatttgttgggtatttcatgctcaccccacttatatacaaattacaacattttctaggccagtgtgcttattctggaaaatgacattgcattcttttattttctgaattatttgcataagaacaatttcaaaggtgacagtagtaggtcttttttactttccacgtgtcgtagtttaggtttgtaacataatacagacaggtgaaaggaattacgtataagtaagcacaaaaaagtagatgttttagggtttgattgataaaggcatttctaaagtggatctaattaagtaattaaaacaaaaggatcttctacaaatttacacgaaataggtttttaacattctgccttgtggtataaaaaagccttattacgcatccttgattttaaaaattgtgcttagttggctccatgaatatgcagagatgagtgaaaaagttggactatcagtgacaacttatcttttaggtttacttttaacactattttcatctaagttaagatgaaattgaaataagctttctggatgcttctaaatttcacttcagcctggttgaaatcatgtcccctcctccttaagtatttttctcatttccattttaggaagaaattttgctaacatatataaacaggagtaataaagagatttcatatgccagcactggtaatagactatggcttgagttaatgtttcagcacggcgtagagtcacagcctcactctcatagaggtccctgataatcaaaaagcatggtgcttcctgggaccctcaaacagcatgagcagtagcaaacatgacagtatttagttcaaagtaattaagaaaaacagtacaagaaaagttgaattctttatagtacagcgtagtaagaacacttttatgggaatgtgtgattttacagaaatgttttaaggaacagagttaatggagactttgttagaaaagcaaatgttcctcaacaagcacttaaagtttatcacaacaaaatgtactgtttgttgtcagagcagcatattttcttgcagaaatgcttataagtgatgccaaatttaatgatagaatttcaattctggtcttacaaattcccatccggtagcagtgcatctgtttattaggaattacccctgaatgtgaatgatttcagtcttaagttgctgcacctgttgccgggaggtatttattccgatcagtagcctaaagcagagagagttatatcttgacattttatagcttggggggaaaaactgtcttttcaaaatcatttgttcagagaggagaaaatggagcaaaacagttcattttactctaagcaccgctatttggtggtattcacatttgcacagcacaaagctgcaatattgattttttgctcacagagcctcccaccagttctctcttcaattgtcagggttgcaagatggattagattacattttgctggttgggatgcttatttttttgttgttgttgaaatagaaatagactgaaaatacggcttggaatgaatatcacagtaatagtgtggttaaaaggctttaatttgaggatttctttatgttgattatgttcaccaagccatttccctgaccatcagacacagtttcctttcctgttccttttcttccccaagactagtagcagccagcataccataacgatgttctttacaactctgtccccaaacctgctgctgatggccatcatcgtttggagaggcattaaagtaacatttaagaacatgaacccaggagctgaattactgggtttgaaatcttaatttcatttttattggatataactgtagaaaacttaatctttctctgcctcaacttcctcctctgtaaaatgttgataataatgttacctatcttgtatggttgttttgaggattcataatcaggaaatatttatacagtccttagagggacttctgagggtggcaaattccctctaaaacaagtgtaaaattagaattgtcaacaacaaccattttgggagctggaaagtaaccaaacaacaaacggggaaacattatttatgaaaatctactagaacttctagcagatgtttaaagccttctagcatcgggctgctccttatcccccgcaatccctccatctcttactccttaactatgtcattgtggaagtttcatcagggcaagattggccttcaaaaccagtggctttactgccatgaagagctgacatgatttggagtagagagtggaaactcatgcccagcagtgttgtcaatgaaagtaaacactgtagggaaaaaaaaaaatggggaaaacctgtagctctgctatcctttggttgtagttccagttgggatgactggaaaccattctgaaacttaacagggaaatcttggaaatgaagaaaccataaactttctgtgcattcttaactaactgggaagctaaacacatgtacagaggagacatgagaggacttggcagcaagtaaataactgagtctgacttgtaaactacttgaacttttaatactctttctaacatacaatcacatcagcaaagagtggagacttaataatgggcctatggtttttgtgcaaagtctctgcccagtcattggctgaccactaagccatgcagacagaggtgatatctaggagccgaggctaaaaaataaaaataagaattcaagcgaattaaaataaaacagtgagcaaaggtataagcagccacacactgtgagggcagagattctgcatattaaatacagctgaggtattaaaaagaaaccacgacagcagcagcaattctcaggggaaagaaatctgaaaccggagttgctaatggtgtattatttaaaatgtatagttttcaacaacaaaacatttataagatacataaagaaacagaaaagttgatccataaaatagaaattgcctcagatgtggacccagtgttagatttagcatataaggattttaaaccagctattacaaatacgttcaaaaatcaaagtaaaactatcttggagaattaagaggaaatatgatgacaatgacaacaaatacgtagtcagagaaaaaaaaactatttttcaaaggccttagagacattctttgcacatcttagttattataccagtgtgctataagtaaattaatattttgttgtacaaattacagatagtgtagcttcatctgacccagagattgtgattcagtaggtctgggatagagcttcaagatttgtctttataaaaagtttactaggtgattctgatgtaaccatatttgggaatcaattatgtagacttggcaaaggattaaaacatatatatatatatttttttttttgatgatttcttcccgtgagtcagtattctagatcattaatgtgatacaaataaaggaataaataaatgttttcaggaatgggtttttatgtcttttataagatttatttagtgaaaatgttgggttttaaaagttgatactaattgcaataattttattaaaggcttttcaaagttcctttaaagtagcattgttggtggaagaggttgagctatatcccttgaagttttcaggaaaatagtgtaaaatggtcaaagaaggcacaacaatttatatttttcttaaaaatgtgtgtaaactttttattttccatcagttgttttgccaagattaaggacatgcccgtgccacagcctcaggagctcctgacaacatgtgcccaaggcggttgggctacagcttggttttatacattttagggagacataagtcagaaatcagtacatgagtgatgttcattggttcagtttggaaaggtaagacaacccaaagggtagagttaggattccaggtaataggtagattcaaagatttcccgattggcaactggttgaaggggtttgtctattaataaagacccgaatcaatagaagaaagtgtctgggttaagataggggttgtgaggaccagggttcttattatgcagatgaagcctctaggtagcaggtattaagagagaatagattggaaatatttcttaccatatttaaagaggcagttctggccaaacgtggtggctcacacctgtaatcccagcattttaggaggccaaagtgggcagatcacctgaggtcaggagtttgagaccagcctggccaacatggcgaaacctcatctctactaaaaatacaaaaattagccggtcatggtggtgcgcacctgtggtcccatctactggggaggctgaagtggaagaatcacttgaacctggtgggtggaggttgcagtgagccaaaattgcaccactgcactcctgcactccagcctgggtgacagagcaagactccatctcagaaaacaaagggtggggggcagttctgtcagtcttaaggtctctgttttaatgttaaggatagtcagactgtgtcagaattccaatgaaaggaaagtacaatgaggcatgtctgaccacccattcccatcatggccacaactagagaacttttccataattgattcatgtttattttctcttttccactaagtcattgattaaaatagttaacctaggaagatgttttcctgtgatttgtgtgaactctgcttagtttgtcacatggacttttgaaaattattttgacagtacctcacaatctatatggatgtgcacagcacatccatgttaacaatgttgttatatttatattttaagaaaacagagcaagttgtttattaattatcgatcacttgaaatgttggaatagcatgtgtacttgattaaaaggagcttgcctgtttagacttacagattgaggaaattttataagactttgaaatggctttaattcttcagaaaaggttttaattaaaacccagagaagtaaaatgactttgcccaaagtcacaagactgacccatatactcatacttcagtgttcagtgctctttccatgtgtacctacagtatagcatttgctgtctttatatttatggtacacatgtttacatttctacaaatatgattttcactactattcatgtagttttgtgaacctttacaataattatttcttgtcagttttactaatatattctttggtgattttcagattgtatgaagacttataaaataaatcttgttattttatcagcaaaatggcttgagtagtcagagttgatcagagaagggttctggagtctaagctccctgcatgggttagaatctaacgtgtggtaagattgagaccctaaatttactactatttgatgccttagtttcatactctgtaaaattggtactataacagcaactattccattgtttattttttatgttgttgaacataaaacaaagtgatccatataaagcatttaagccagtgccagcacatagtaattgctttgcaagtaatacttatttctctcttcatatttgttttttaaagaatatatatatattcattatatatatatatacattatatatacacattatatatatacacattatatatacacattatatatatacacattatatatatatacacattttatatacacacacacacacacacacacacacacacacacatatttggttggaaatacagactttagataagagaaatgtataaatatgtaacccatctgtcttatgacaattccagtgatacatatataataataaattgacaatttaaatatttttttggtgggggagatggcatataattttcattgataagtagtttgccttgtttttaatgttcaccatttgttttcactaccaaaggaaatagacattacaaaggaaagcacattgcaatttatgttgtgttaatcactagtttaattcaacaatttggttccacatttataagaattatgtatcatgtgctattgtaggcattgagattataactaagagccttactacagtctagcagggtagatatatatatatactaaaagtgaatatgcactgtatcacatgttaataagcacattagtaaagattaatatatctgcatatataaagtttaatcaaaacaggtaagagaaagaatttagaaaagaacattaatgatttaaatcaaaatacattgtaggattaaataaagtggtatttgctattaagaactcttagtgcaatttctgttgctataggaaaatactcagactgggtaatttataaagaaaagagttttatttagcttatggttctggggttctggggtcgaaggtgggcagccacatctggtgagggcctcatgctgcttcctagaatggttgaaaagtggaaggacaagggaatgcaaaaaactaattaattcctttgagaactaacccagtcttaaaacaaaaactttggggctgggcacagtggctcatgcctgtaaccacagcactttgggaagcggaggtgggcggatcacgaggtcaagggttcgagaccagcctggccaacatggtgaaaccttgtctctactaagaatacaaaattagtctggcgtgatggcacatgcctgtaatcctagctactcaggaggctgaggcaggagaattgcttgaaccggcgaggcagaggttgcagtgagccaagactctgtctcggggtgggggcagggggaaagaaagagttataaagacccagtcacctgttaaaggcacgacctcccagtatggccacactgaggactaagcctctacttgagtttgatgggaacaagccatattcgaacgatagcaagtaccatgatctcttttctccagtagattctgtattggcaatctactaaattattaaagtgcactgatctttcttttctttttccttactatacttttttttttttttgagatgggagtttggctctttttgcccaagctagagtgcagtggtgccatcttggctcactgcaacccccgcctcccaggttcaaatgattctcctgccccagcctccctagtaactgggattacaggcatgcgccaccacacccggctagttttgtatttttagtagagatggggtttcaccatgttagccaggctggtcctgaatcccctgacgtcaggtgatccacccgcctcagcctcccaaagtgctgggattacaagcgtgaaccacagcgctagaccttactgtacttttctggatgactgtgaccaaagctttaagactgccatccctgaattatcaaaacggtaacacactcaactatgccaattcccaaataggtttcaaaagcagaggaaaattcacttagaatgataactctaatcctgcaaactaacaacaacaacagttaaagggcttgggttttaaaaaccacagtgcttcataatcagttctatgttttgacaaaatagtaagaattgcgagtgtggctccaagccagtcttttaataatgtgttccaatattcctagcattttctaataatagatttattctgttttattatagaattgtaattgcaaattgcctctgtatttaaaataggttgcatttcaaaattttatttgatgtcgtttgtttgaattttcacata

SEQ ID NO: 1151 - protein, 1318 aa, Homo sapiens
FSRAALPFGLVRRELSCEGYSIDLRCPGSDVIMIESANYGRTDDKICDADPFQMENTDCYLPDAFKIMTQRCNNRTQCIVVTGSDVFPDPCPGTYKYLEVQYECVPYIFVCPGTLKAIVDSPCIYEAEQKAGAWCKDPLQAADKIYFMPWTPYRTDTLIEYASLEDFQNSRQTTTYKLPNRVDGTGFVVYDGAVFFNKERTRNIVKFDLRTRIKSGEAIINYANYHDTSPYRWGGKTDIDLAVDENGLWVIYATEQNNGMIVISQLNPYTLRFEATWETVYDKRAASNAFMICGVLYVVRSVYQDNESETGKNSIDYIYNTRLNRGEYVDVPFPNQYQYIAAVDYNPRDNQLYVWNNNFILRYSLEFGPPDPAQVPTTAVTITSSAELFKTIISTTSTTSQKGPMSTTVAGSQEGSKGTKPPPAVSTTKIPPITNIFPLPERFCEALDSKGIKWPQTQRGMMVERPCPKGTRGTASYLCMISTGTWNPKGPDLSNCTSHWVNQLAQKIRSGENAASLANELAKHTKGPVFAGDVSSSVRLMEQLVDILDAQLQELKPSEKDSAGRSYNKAIVDTVDNLLRPEALESWKHMNSSEQAHTATMLLDTLEEGAFVLADNLLEPTRVSMPTENIVLEVAVLSTEGQIQDFKFPLGIKGAGSSIQLSANTVKQNSRNGLAKLVFIIYRSLGQFLSTENATIKLGADFIGRNSTIAVNSHVISVSINKESSRVYLTDPVLFTLPHIDPDNYFNANCSFWNYSERTMMGYWSTQGCKLVDTNKTRTTCACSHLTNFAILMAHREIAYKDGVHELLLIACPIFAGLLHFFFLAAFAWMCLEGVQLYLMLVEVFESEYSRKKYYYVAGYLFPATVVGVSAAIDYKSYGTEKACWLHVDNYFIWSFIGPVTFIILLNIIFLVITLCKMVKHSNTLKPDSSRLENIKSWVLGAFALLCLLGLTWSFGLLFINEETIVMAYLFTIFNAFQGVFIFIFHCALQKKVRKEYGKCFRHSYCCGGLPTESPHSSVKASTTRTSARYSSGTQSRIRRMWNDTVRKQSESSFISGDINSTSTLNQGHSLNNARDTSAMDTLPLNGNFNNSYSLHKGDYNDSVQVVDCGLSLNDTAFEKMIISELVHNNLRGSSKTHNLELTLPVKPVIGGSSSEDDAIVADASSLMHSDNPGLELHHKELEAPLIPQRTHSLLYQPQKKVKSEGTDSYVSQLTAEAEDHLQSPNRDSLYTSMPNLRDSPYPESSPDMEEDLSPSRRSENEDIYYKSMPNLGAGHQLQMCYQISRGNSDGYIIPINKEGCIPEGDVREGQMQLVTSL

SEQ ID NO: 1152 - DNA, 5564 bp, Rattus norvegicus; identical to SEQ ID NO: 1148
  ref <308>: DATABASE ACCESSION NUMBER: EMBL / AF081144
  ref <309>: DATABASE ENTRY DATE: 1998-10-06

SEQ ID NO: 1153 - protein, 1515 aa, Rattus norvegicus; identical to SEQ ID NO: 1149
  ref <308>: DATABASE ACCESSION NUMBER: SWISS-Prot / AAC62650
  ref <309>: DATABASE ENTRY DATE: 2003-02-01

SEQ ID NO: 1154 - DNA, 3624 bp, Rattus norvegicus
  ref <308>: DATABASE ACCESSION NUMBER: EMBL / AF081196
  ref <309>: DATABASE ENTRY DATE: 2000-03-03
gcgcctgggtcggctcgccgggctccgagagtggccggctccgggctgcgagggccggcggcggccgagggatgcgccgctcccggccgagccgatcccaccgctccaggtgagacggctccaggggcgcagagagccgcggccatgggaaccctgggcaaggcgagagaggctccgcggaaaccttgccatggctccagagctggccccaaaggaagactagaggccaaatcaaccaacagtcctctccctgcccagcccagcttggcccagatcacccagttccgaatgatggtgtccctgggacatctggccaaaggagccagcctggatgatcttattgacagctgcattcaatctttcgatgcagatggaaacctgtgtcgaagtaaccagctgttacaagtcatgctaaccatgcaccgaatcatcatctcctcggccgagctgctgcaaaaactcatgaatctatataaggacgccctggaaaagaattctccaggaatttgcttgaagatctgctattttgtcaggtattggataacagaattctggatcatgttcaaaatggatgccagcttgaccagcaccatggaagagtttcaggacctggtgaaagccaatggtgaggagtcccactgccacctcatcgacacgacacaaattaattctcgagactggtccaggaaactgactcagaggataaaatcaaataccagcaagaagcggaaagtgtccctgctgtttgaccatcttgaacctgaagaactgtctgaacacctcacctaccttgagttcaagtccttccgacggatatctttctctgattatcagaattaccttgtaaacagctgcgtaaaggagaaccccaccatggagcggtccattgccctgtgcaatggcatctcccagtgggtacaactgatggttctcagccgtcccaccccacagctccgggcagaggtcttcatcaagttcatccatgtggctcagaagctccaccagctacagaacttcaacacgctaatggctgtgatcgggggactgtgtcacagctccatctccaggctcaaggagacaagttcacatgtcccacatgagatcaataaggttctgggtgagatgactgaactgctgtcctcctgcagaaactatgacaactacaggcgagcctatggtgagtgcacccacttcaaaatccccatactgggtgtgcacctcaaggacctcatatccctatatgaagccatgcctgactacctggaagacgggaaggtgaatgtccaaaagctcctggccctttacaatcacatcaatgagttggtccagctgcaggacgtggccccaccattggatgccaacaaggacctggtgcacctgctgacgttatccctggatctatactacaccgaagatgaaatctatgagctttcctacgcccgtgaaccaaggaaccacagggccccgccactgacaccttcgaagccaccagttgtagtggactgggcctctggagtgtctcccaaacctgacccgaagaccatcagcaaacacgtccaaaggatggtggattctgtctttaagaactatgatctcgaccaggatggatatatctctcaggaggagtttgaaaagattgctgcgagctttccattttccttctgtgtgatggacaaagatagggagggcctcatcagcagagacgagatcacagcctacttcatgagggccagctccatctattccaagctgggcctaggctttccacacaactttcaagagaccacttacctgaagcccaccttctgtgacaactgtgctggctttctctggggtgtgatcaagcaaggctatcgctgtaaagactgtgggatgaactgccacaaacagtgcaaagacctggtagtgtttgagtgcaagaaacgatccaagagcccggcggtatccacagaaaacatcagctctgtggtgccaatgtccactctttgtccactgggaaccaaagatctgctccatgcacccgaagaaggatctttcattttccagaatggagaggttgtggaccacagtgaggagagcaaggataggaccatcatgctcttgggcgtatcctcacagaaaatttcagttcggctgaagaggactgttgcccacaagaccacccagacagaatcatttccttgggttggcggcgagatgccccctggtcactttgtgctgacttctccaagaaagtcagcacaaggggctctttatgtgcacagtccagcatctccgtgccccagcccagcactggtccggaagcgggcattcgtcaagtgggagaacaaagagtcccttatcaaaccaaaaccagagcttcacctcaggctccggacctaccaagaactggaacaggaggtaaataccctgagggcagataacgatgctctgaagatccagctgaagtatgcacagaaacaaatagaatccctgcagcttggcaaaagcaatcacgtcttagcacagatggaccacggtgatggtacttaatccagaaattcaaggaacagaatctgcagacgggtttactgggatctcacttcaaaactgattgcagaggttcagcaactttagactgattgacttttaaagggcagagatagccactgttattggtgtccttggttttttccctaactgtctttaatgtgagtcgtgggttttcagtcagttgagtaaaagggaagaaaagttccagcatgtaaaacactgagcagtcatattctaaccttttctttcttttactgaaaccaataccaaacatgtgctaaaataagagtatagtttcctgacagtgtctcaggcagcctgctttactgattcgcacttagataaagagcccctggtgaatcaatttgctgccttccccagggtttctgcaaactgggagttactttgttctacccgaaaacctgctcataatggaaacaataccctaaaagtggtgactttgacatgcctgcattgtttgtgaagctgatccctaccttattcactacctcagatctcaagagcctctttccctgtcctttacttgccccctatttcctcccttgcttgtaggcacatcagcatatctacctagaagtgacctcctagagatgtagcctgtgtttaaatccagagcttcttaattgaacttgacattgtctgattgcaggccaacttatagctctaggtcttagtcattatgaaatacaaaataaaactacccataatcatcaattaccatgtcatacacagaactcattatctaagtcaaacgacgtaaacacgcctgtccagatagtctttctttagtggatagaattaacaatctgtgaccttttaaaagacatggtctgtgaacagtgtttagttcttcacgttctagtctctctctctctctctctctctctctctctctctctctctctctctctcaagtaaactatcgtaaggtcctcttttgaactgaatctgtgcttaaaattgtcttcacttttattatctacaaataagctatgggaggcgatggctttaacagctgacagcatttacctatgtgtagaatatgtgtatatagtatcaggcatgcatgga

SEQ ID NO: 1155 - protein, 795 aa, Rattus norvegicus
  ref <308>: DATABASE ACCESSION NUMBER: SWISS-Prot / AAC79700
  ref <309>: DATABASE ENTRY DATE: 2003-02-01
MGTLGKAREAPRKPCHGSRAGPKGRLEAKSTNSPLPAQPSLAQITQFRMMVSLGHLAKGASLDDLIDSCIQSFDADGNLCRSNQLLQVMLTMHRIIISSAELLQKLMNLYKDALEKNSPGICLKICYFVRYWITEFWIMFKMDASLTSTMEEFQDLVKANGEESHCHLIDTTQINSRDWSRKLTQRIKSNTSKKRKVSLLFDHLEPEELSEHLTYLEFKSFRRISFSDYQNYLVNSCVKENPTMERSIALCNGISQWVQLMVLSRPTPQLRAEVFIKFIHVAQKLHQLQNFNTLMAVIGGLCHSSISRLKETSSHVPHEINKVLGEMTELLSSCRNYDNYRRAYGECTHFKIPILGVHLKDLISLYEAMPDYLEDGKVNVQKLLALYNHINELVQLQDVAPPLDANKDLVHLLTLSLDLYYTEDEIYELSYAREPRNHRAPPLTPSKPPVVVDWASGVSPKPDPKTISKHVQRMVDSVFKNYDLDQDGYISQEEFEKIAASFPFSFCVMDKDREGLISRDEITAYFMRASSIYSKLGLGFPHNFQETTYLKPTFCDNCAGFLWGVIKQGYRCKDCGMNCHKQCKDLVVFECKKRSKSPAVSTENISSVVPMSTLCPLGTKDLLHAPEEGSFIFQNGEVVDHSEESKDRTIMLLGVSSQKISVRLKRTVAHKTTQTESFPWVGGEMPPGHFVLTSPRKSAQGALYVHSPASPCPSPALVRKRAFVKWENKESLIKPKPELHLRLRTYQELEQEVNTLRADNDALKIQLKYAQKQIESLQLGKSNHVLAQMDHGDGT

SEQ ID NO: 1156 - DNA, 2139 bp, Homo sapiens
  ref <308>: DATABASE ACCESSION NUMBER: EMBL / AF131853
  ref <309>: DATABASE ENTRY DATE: 1999-03-15
tgtgagttgtccacgaggatacatgcataagtatgagaatatataccccttcctcagcaattagcacagagaattgaattaagcagtacaaaggttttcagttttaggtttacctgattaccccttactatactcaaatgcatcccaatacttctgtactcttaaatcaactgacaacctttaagcatatgctcttttgctaggtcttgaagaggaggcacaactgccttcatatgagtccagtgtgtgttgtcaaaatgtaacttttgaattgttctaaagccacagtaagagaagtaagtggttcaagtttcgtgcctttacatttccaccattgtgctttcctctccctttaccccacatacaaaactgagccaggcaatgcctagtttttgtgtgctgaacacagctgtacttacatccaccatcctctggacgtgtttgctaatggtttttggatcaggtttgggagacactccagaagcccagtccactactactggtggctttgaaggtgttagtggctaaaatgaaatatttagagaaatcctcatgactacaatgcaatattataacctatagctctttcttttcccactacctgacggttacatttatggacaatcttcaattatgttcagtggcaaggagcagagaacccacaggcaattgaaatctctactaataattttggctaacaaggcattgtgcttacggtttccagagtgctcttcacatacattatctgcagctacagataatttgaaattctcaatctgcctgagttgcaattccctctccattaaaccctttgtcagagctatcaacaaagagtaaagtggatcatttatgtttcctctctattctccagtcacattttgcagtagaaatgtgaataaggaaaagcttagctaaaaggcaggaaggcacaagaaaaatcatcggaagcctggacaagctcttttctaaatacagtcatgcatcacttaatgactgggatatgttctgagaaatgtgtcatgaggtgattttgtcattgtatgagcaccacagtgtgtacttacacaaacctagatggtatagcctgctacacacctaggctatttggtatagcctactgctcctaggctacatacctatacagcaggttattatactcagtactgtaggcaattgtaatgatggtatttgtgtatcttaacatatctaaacatagaaaaggtaaaaatatggtatagaaatttttttttaatgttacacctgtatagggcacttaaccatgaatagagctttcaagattagaaattactgtggcaagtcgtgagtggtgagtgaatgtggaggcctaacattactgtatactcctatatactttataaatactgtacacttagactacactaagtttcttaaattttttcttcaatgataaattaccttattttactgtaaaagcttttaatttttttaacttttactcttttgttatgacacttagcttaaagcacacattgtatagcttatagctgtaccagttatttcctttatagccatattctataaacttttttctattttaaaaatgtttaattttttaaatctttgttataaactaaggtacaattacactcattggcctatgtctatatagagtcaagatcatcaatatcactgtcttccactccacatcttgtcctattggaaggtctttaggggcaataacatgcatggagctgtcaccttctggaggacttgcctgaggctgttttacagttaatttttctaagtagaaggaatgcactctaaaataatgataaaaagtattgtatagtaagtgcataaaccggtaatacttactatcaagtattatgtactgtacgtaagtgtataacctagactttttacagctcagtaggtttgtttacaccagtataatcacagacatagtaatgtgttgtgctacaatgttacaattgttctgtcactaggcagtagtaatttttctgctccattataatcttaagggaccactgtggtatatgaggtctatcactgaccaaaatgtcattatgtggtgcatgactgtatttgaaactcagcccaaattaaaatctctctgaaaaaaaaaaaaaaaaaaaa

SEQ ID NO: 1157 - protein, 797 aa, Homo sapiens
  ref <308>: DATABASE ACCESSION NUMBER: SWISS-Prot / AAC79699
  ref <309>: DATABASE ENTRY DATE: 2003-02-01
MGTLGKAREAPRKPSHGCRAASKARLEAKPANSPFPSHPSLAHITQFRMMVSLGHLAKGASLDDLIDSCIQSFDADGNLCRSNQLLQVMLTMHRIVISSAELLQKVITLYKDALAKNSPGLCLKICYFVRYWITEFWVMFKMDASLTDTMEEFQELVKAKGEELHCRLIDTTQINARDWSRKLTQRIKSNTSKKRKVSLLFDHLEPEELSEHLTYLEFKSFRRISFSDYQNYLVNSCVKENPTMERSIALCNGISQWVQLMVLSRPTPQLRAEVFIKFIQVAQKLHQLQNFNTLMAVIGGLCHSSISRLKETSSHVPHEINKVLGEMTELLSSSRNYDNYRRAYGECTDFKIPILGVHLKDLISLYEAMPDYLGDGKVNVHKLLALYNHISELVQLQEVAPPLEANKDLVHLLTLSLDLYYTEDEIYELSYAREPRNHRAPPLTPSKPPVVVDWASGVSPKPDPKTISKHVQRMVDSVFKNYDHDQDGYISQEEFEKIAASFPFSFCVMDKDREGLISRDEITAYFMRASSIYSKLGLGFPHNFQETTYLKPTFCDNCAGFLWGVIKQGYRCKDCGMNCHKQCKDLVVFECKKRAKNPVAPTENNTSVGPVSNLCSLGAKDLLHAPEEGPFTFPNGEAVEHGEESKDRTIMLMGVSSQKISLRLKRAVAHKATQTESQPWIGSEGPSGPFVLSSPRKTAQDTLYVLPSPTSPCPSPVLVRKRAFVKWENKDSLIKSKEELRHLRLPTYQELEQEINTLKADNDALKIQLKYAQKKIESLQLEKSNHVLAQMEQGDCS

SEQ ID NO: 1158 - DNA, 1893 bp, Rattus norvegicus
  ref <308>: DATABASE ACCESSION NUMBER: EMBL / AF081365
  ref <309>: DATABASE ENTRY DATE: 2001-10-04
caatcacacaactccactcgagttagccattgaaagccaatgcaagtaaatgtcattccaaagcttaagattcattaaggtgggcctaaaagaagacagctgctgtgcagacaacgtcgaacaagcaccacttgcttgctttgcccagcatgggcgcttcggaacggagtgtgttcagagtgctgatcagggcactgacagaaaggatgttcaaacacctccgaagatggtttatcactcacatatttgggcgttcccggcaacgggcaaggctggtctctaaagaaggaagatgtaacatcgagtttggcaatgtggatgcacagtcaaggtttatattctttgtggacatctggacaactgtgctggacctgaaatggagagactcaagtgaccataggttacggattcaggtttgtgacagaacagtgcgccactgccattttcctgcttatcttccagtctattcttggagtgatcatcaattccttcatgtgtggtgccattttagccaagatctctagacccaaaaaacgtgctaaaaccattacgttcagcaagaatgcggtgatcagcaagcgtggcgggaagctctgcctcctcatccgagtggccaatcttaggaagagccttctgattggcagccacatatatggcaagcttctaaagacaaccatcactcctgaaggcgagaccatcattttggatcagaccaacatcaactttgtcgtcgacgctggcaatgaaaatttgttcttcatatccccactgacgatctaccacattattgaccacaacagccctttcttccacatggcagcagaaactctttcccaacaggactttgagctggtggtctttttagatggcacagtggaatccaccagtgcaacctgccaggtccgcacgtcatacgtcccagaggaggtgctttggggctaccgtttcgttcctattgtgtccaagaccaaggaagggaaataccgagttgattttcataacttcggtaagacagtggaagtggagacccctcactgtgccatgtgcctctataatgagaaagatgccagggccaggatgaagagaggctatgacaaccctaactttgtcttgtcagaagttgatgaaacggacgacacccagatgtagcagtggcttttccacctacaaaaagcctcccaaggacctaagggttgactgtgttcagaagcatctgacgggggtctgaaagcaggatgagaacatgcgaaatctgctagcacagtcacccctgaaccccagggctatggttctacaagacacatagctctataaggctgcatacggtgcatgcatgtgaatgaaactgtggaagccaaaggggcccacttggatcctcactatgactgtgtaagctcatatcgtgttgatggaaacaaagtcattcaaggacaaaacttaggagctttagaaagcttcaggaactagccacatttcctgtttgattctatggatgagaaagatgccatttttatcttaaagtagacttctatcaatggaaaatctgccctctgcgctgggaagtgagccagccaatcagtgacaataagagactgtcatacaaagaatcagtaaagactctaaccttctcaagctctggtgtttgaagcctttgtctgagtctgggtccatgcttcagaaggggtaaggtgacatccactgactgtacctctctgaacccaaggtacagaagaacaggaagccccaatcaacttcataatcaacccagatgctgcagcccatacagaatttggcctgaatgatttcctgtggagcattaaatggaggccaagtccactctttagatattaaatgaatattcttttgcaaaggaaaaaaaaaaaaaaaaaaaaa

SEQ ID NO: 1159 - protein, 391 aa, Rattus norvegicus
  ref <308>: DATABASE ACCESSION NUMBER: SWISS-Prot / P35560
  ref <309>: DATABASE ENTRY DATE: 2002-06-15
MGASERSVFRVLIRALTERMFKHLRRWFITHIFGRSRQRARLVSKEGRCNIEFGNVDAQSRFIFFVDIWTTVLDLKWRYKMTVFITAFLGSWFLFGLLWYVVAYVHKDLPEFYPPDNRTPCVENINGMTSAFLFSLETQVTIGYGFRFVTEQCATAIFLLIFQSILGVIINSFMCGAILAKISRPKKRAKTITFSKNAVISKRGGKLCLLIRVANLRKSLLIGSHIYGKLLKTTITPEGETIILDQTNINFVVDAGNENLFFISPLTIYHIIDHNSPFFHMAAETLSQQDFELVVFLDGTVESTSATCQVRTSYVPEEVLWGYRFVPIVSKTKEGKYRVDFHNFGKTVEVETPHCAMCLYNEKDARARMKRGYDNPNFVLSEVDETDDTQM

SEQ ID NO: 1160 - DNA, 2227 bp, Homo sapiens
  ref <308>: DATABASE ACCESSION NUMBER: Refseq / NM_000220
  ref <309>: DATABASE ENTRY DATE: 2002-11-03
gaggcactaaagaaaaagtggcagtaatgtaatccgcttgttttgccaagccactaaaaataccttggtaaatattagctaatgtgcagccctttgcttgctattaagatttactgatttcaatagaaaggaacctaaaaactgagcatattatataacccagacaccagggacaatctctaatcacctaagagttcataaaatacatattggctctgtctgtggttagattaaatgccattatctaaaaaaagtaggatctgtgcaataataggtctgccatgtgaatgacagttttggttagtggatgaatttatcctgtatcattgcattctctaagaataatccctctcactctgaacaaataaatcaatagcattggctaacccagtgcatgtaaaaaacaccttcagtaaatgccaggttttcccgaataataaagacttccaacaataaagacttcttttaagtctgtttcttacataactgttgtatggagagattaacatggtatcttgtttcttcctggtgtgatcttacttttgtcttgtaaatatgtacttatgtctgtatgttcacctgtatctttgtgaacccttggaaaactcagtatttcagtgggtttcagagaataggccgggagattgatgataagtaagtgtttccggccagttgttattaggcacaacttttaggagaaacaagtgagcgatagagcgtggccaaggagaggaaggcaatgctggaacccaatccacgcctgctgcccagagaccttagctgatggcttgtcatgtcttagcatgttggtattcaagccatgtgatgttggaaagaaaaaatacctattcagcttggggcttggtctgagaacaaccaattgccttggtttaaatcacacgactccactatcaaattaagtgtttccaagtttacacaaattagcgtcagtccactgactgtcgcctacaataaattaggctgagtctaaaagaaatcagtctgcatagaaagaccaacaaccagcaccacttccttgctttttccagccatgaatgcttccagtcggaatgtgtttgacacgttgatcagggtgttgacagaaagtatgttcaaacatcttcggaaatgggtcgtcactcgcttttttgggcattctcggcaaagagcaaggctagtctccaaagatggaaggtgcaacatagaatttggcaatgtggaggcacagtcaaggtttatattctttgtggacatctggacaacggtacttgacctcaagtggagatacaaaatgaccattttcatcacagccttcttggggagttggtttttctttggtctcctgtggtatgcagtagcgtacattcacaaagacctcccggaattccatccttctgccaatcacactccctgtgtggagaatattaatggcttgacctcagcttttctgttttctctggagactcaagtgaccattggatatggattcaggtgtgtgacagaacagtgtgccactgccatttttctgcttatctttcagtctatacttggagttataatcaattctttcatgtgtggggccatcttagccaagatctccaggcccaaaaaacgtgccaagaccattacgttcagcaagaacgcagtgatcagcaaacggggagggaagctttgcctcctaatccgagtggctaatctcaggaagagccttcttattggcagtcacatttatggaaagcttctgaagaccacagtcactcctgaaggagagaccattattttggaccagatcaatatcaactttgtagttgacgctgggaatgaaaatttattcttcatctccccattgacaatttaccatgtcattgatcacaacagccctttcttccacatggcagcggagacccttctccagcaggactttgaattagtggtgtttttagatggcacagtggagtccaccagtgctacctgccaagtccggacatcctatgtcccagaggaggtgctttggggctaccgttttgctcccatagtatccaagacaaaggaagggaaataccgagtggatttccataactttagcaagacagtggaagtggagacccctcactgtgccatgtgcctttataatgagaaagatgttagagccaggatgaagagaggctatgacaaccccaacttcatcttgtcagaagtcaatgaaacagatgacaccaaaatgtaa

SEQ ID NO: 1161 - protein, 391 aa, Homo sapiens
  ref <308>: DATABASE ACCESSION NUMBER: SWISS-Prot / P48048
  ref <309>: DATABASE ENTRY DATE: 2001-10-16
MNASSRNVFDTLIRVLTESMFKHLRKWVVTRFFGHSRQRARLVSKDGRCNIEFGNVEAQSRFIFFVDIWTTVLDLKWRYKMTIFITAFLGSWFFFGLLWYAVAYIHKDLPEFHPSANHTPCVENINGLTSAFLFSLETQVTIGYGFRCVTEQCATAIFLLIFQSILGVIINSFMCGAILAKISRPKKRAKTITFSKNAVISKRGGKLCLLIRVANLRKSLLIGSHIYGKLLKTTVTPEGETIILDQININFVVDAGNENLFFISPLTIYHVIDHNSPFFHMAAETLLQQDFELVVFLDGTVESTSATCQVRTSYVPEEVLWGYRFAPIVSKTKEGKYRVDFHNFSKTVEVETPHCAMCLYNEKDVRARMKRGYDNPNFILSEVNETDDTKM

SEQ ID NO: 1162 - DNA, 2473 bp, Rattus norvegicus
  ref <308>: DATABASE ACCESSION NUMBER: EMBL / AF083330
  ref <309>: DATABASE ENTRY DATE: 2001-10-24
cgcccaagctgcagagcggcccacctggaaggacagagctgcaagatggccagtaagaccaaggccagcgaggccctgaaggtggtggcccggtgccgccccctcagtaggaaggaggaggctgctggtcatgagcagattctgaccatggacgtgaaactgggccaggtgactctgcgaaacccccgcgcggcacccggggagctgcccaagaccttcacttttgatgctgtgtatgacgctagctccaagcaggccgacctgtatgatgaaacggtgaggcccctgatagactcggtgcttcagggtttcaatggcaccgtatttgcctatggccagactggcactggcaagacctacaccatgcaggggacctgggtggagccagagctccgcggggttatccccaatgcctttgagcacatcttcacccacatttcccgctcccagaaccagcagtacctggttcgtgcctcctacttggagatctaccaggaggagattcgagacctgctatccaaggagccaggcaaaaggctagaactgaaggagaatcctgaaacaggggtctacatcaaggacctctcttcctttgtcaccaagaatgtcaaggagattgaacacgtgatgaacctggggaaccaagcccgggcagtaggcagcacccacatgaatgaggtcagctcccggtcccatgccatctttgttatcacagtggagtgcagtgagcgtggctccgatggacaggaccatatccgagtaggcaagctcaacctggtagacctggccggcagtgagaggcagaacaaggcaggtcccaacacacctggagggccagccacacagtcaacagctggtggtggcggcggaggtggcggcactagtggttctggcagtagtggagagaggcctaaggaagcttctaaaatcaatctttcactgtccgccctgggcaatgtgattgctgctttggctggcaacaggagcacccacatcccctaccgggactccaagctgacccggctgctccaagactcattggggggcaatgccaagaccatcatggtggccacactgggtccagcttctcatagctacgacgacgagagcctctccaccctgcgctttgcgaaccgagccaagaacatcaagaacaaaccgcgggtgaacgaggaccccaaggacacgctgcttagggaattccaggaagagatcgcccgcttgaaggcccagcttgagaagaaggggatgctgggaaagcgacctcggagaaagagcagtcgcagaaagaaggccgtgtctgctccggccggctatccagagggggccgtaattgaggcttgggtggctgaagaggaagatgataacaacaataatcaccgcccaccccagcccaccctggaggccgctttggagaaaaacatggagaattacctgcaggaacagaaagagcggctggaggaggagaaggcggccatccaggatgaccgcagcctcgtgagtgaggagaagcagaagcttctagaagagaaggagaagatgctggaggatctgaagcgggagcagcaggccacagagctgcttgcagccaagtacaaggccatggaaagcaagctactcattggggggcggaacatcatggatcacaccaacgaacaacagaagatgttggaactgaagcgacaggagattgcagaacagaaacggcgtgaacgggaaatgcagcaggagatcgtgctccgagatgaagagaccatggagctacgtggtacctactcgtccctgcagcaggaggtggaagttaaaaccaagaaactcaagaagctctatgccaagctacaggcggtgaaggcagagatccaggaccaacatgaggagtacatccgcgtgcggcaggacctggaggaggcgcagaatgagcagacccgggaactcaagctcaagtacctcatcattgagaacttcatcccccctgaggagaagaacaagatcatgaaccggcttttcctggactgtgaggaggagcagtggaagttccagcccctggtgccagctggagtgaataacagccaaatgaagaagcgtccaacttctgcagtgggctacaagagacctatcagccagtatgctcgggttgccatggcaatggggtcccatcccagatacagggctgaaaatataatgtttttggaactggatgtatccccgccggccatctttgagatggaattttctcatgaccaagaacaagatccacgagtactacacatggagaggctcatgcggttggacagctttctggagagaccttccacgtctaaagtgcgaaagtcgagatcctggtgccagagtcctcagcggcctccaccaccctccacagttcatgcctccatggcctctgctcctctgcaccctgcaacagtggtagaccatgactgacaccttagtcaggctgccatcacaaagactctag

SEQ ID NO: 1163 - protein, 796 aa, Rattus norvegicus
  ref <308>: DATABASE ACCESSION NUMBER: SWISS-Prot / O55165
  ref <309>: DATABASE ENTRY DATE: 2001-10-16
MASKTKASEALKVVARCRPLSRKEEAAGHEQILTMDVKLGQVTLRNPRAAPGELPKTFTFDAVYDASSKQADLYDETVRPLIDSVLQGFNGTVFAYGQTGTGKTYTMQGTWVEPELRGVIPNAFEHIFTHISRSQNQQYLVRASYLEIYQEEIRDLLSKEPGKRLELKENPETGVYIKDLSSFVTKNVKEIEHVMNLGNQARAVGSTHMNEVSSRSHAIFVITVECSERGSDGQDHIRVGKLNLVDLAGSERQNKAGPNTPGGPATQSTAGGGGGGGGTSGSGSSGERPKEASKINLSLSALGNVIAALAGNRSTHIPYRDSKLTRLLQDSLGGNAKTIMVATLGPASHSYDESLSTLRFANRAKNIKNKPRVNEDPKDTLLREFQEEIARLKAQLEKKGMLGKRPRRKSSRRKKAVSAPAGYPEGAVIEAWVAEEEDDNNNNHRPPQPTLEAALEKNMENYLQEQKERLEEEKAAIQDDRSLVSEEKQKLLEEKEKMLEDLKREQQATELLAAKYKAMESKLLIGGRNIMDHTNEQQKMLELKRQEIAEQKRREREMQQEMLLRDEETMELRGTYSSLQQEVEVKTKKLKKLYAKLQAVKAEIQDQHEEYIRVRQDLEEAQNEQTRELKLKYLIIENFIPPEEKNKIMNRLFLDCEEEQWKFQPLVPAGVNNSQMKKRPTSAVGYKRPISQYARVAMAMGSHPRYRAENIMFLELDVSPPAIFEMEFSHDQEQDPRVLHMERLMRLDSFLERPSTSKVRKSRSWCQSPQRPPPPSTVHASMASAPLHPATVVDHD

SEQ ID NO: 1164 - DNA, 7420 bp, Rattus norvegicus
  ref <308>: DATABASE ACCESSION NUMBER: EMBL / AF084186
  ref <309>: DATABASE ENTRY DATE: 1998-09-03
atggatccaagtggggtcaaagtgctggaaacagccgaggacatccaggagagacgacagcaggttctggatcggtaccaccgcttcaaggagctctctaccttgcggcggcagaaactggaggattcctatcgcttccagttttttcagagagatgctgaggagctggagaagtggattcaggagaagcttcaagttgcctctgatgagaactacaaagaccccaccaacttgcagggaaagctccagaaacaccaagcctttgaagctgaagtacaggccaactcaggagccattgtgaagctggatgagacaggaaacttgatgatttctgaagggcactttgcatctgagaccatccggacacgtttaatggagctgcaccgccagtgggagttgcttttggagaagatgcgggagaaaggaatcaaactgctgcaggcacagaagctggtgcagtatttgcgggagtgtgaggatgtaatggactggatcaatgacaaggaagcaattgtgacgtctgaggagctgggccaggatttggagcatgtagaggtactacagaagaagtttgaagagtttcaaactgatctggctgctcatgaagaaagagttaatgaagtaaaccagtttgctgccaaacttatccaggagcagcacccggaagaggagctgatcaagaccaagcaggaggaggtgaatgcagcttggcagcgactgaaaggcctggctcttcaaaggcaggggaagctctttggtgctgccgaggttcagcgctttaacagggatgtagatgagaccattggttggattaaggagaaagagcagttaatggcctctgatgactttggcagagacttagcaagtgttcaagctctgcttcggaagcatgagggtctggagagagatcttgctgctctagaggacaaggtgaaagccctgtgtgccgaggctgaccgcctgcaacagtcacaccctctgagtgccaaccagatccaggtgaagcgagaggaactaattaccaactgggagcagatccgaactctggccgcagagagacatgcacggcttgatgactcatacaggcttcagcgctttcttgctgacttccgtgacctcacgagctgggtgactgaaatgaaagccctcatcaatgcagacgagcttgccaatgacgtggctggtgctgaggccctgctggacaggcatcaagagcacaagggtgaaatcgatgctcatgaagatagctttaagtctgcagatgagtctgggcaggccctactcgctgctggtcactatgcctcagatgaagtgagggagaagctgagcatcctctctgaggagagagctgccctgctggagctgtgggagcttcggaggcagcagtatgagcagtgcatggacttgcagctcttctaccgagacactgagcaggtggacaactggatgagcaaacaggaggcattcctgctaaatgaagatttgggtgactccttagacagtgtggaagctcttttgaagaagcatgaggactttgagaaatctctcagtgcccaggaagaaaaaatcacagcacttgatgagtttgcaaccaagcttattcagaacaaccactacgcaatggaagatgtagccactcgacgagatgctctcctgagccgccgcaatgccctccatgagcgagccatgcatcgccgggcacagctggccgattccttccacctgcagcagttcttccgcgattccgatgagctcaaaagttgggtcaatgagaagatgaaaacggccactgatgaagcttacaaagatccgtccaacctgcaagggaaagtccaaaagcaccaggcttttgaggctgagctctcagccaaccagagccgtattgatgccctagagaaagctgggcaaaaactaatagatgtgaaccactatgccaaggaagaagtagcagctcggatgaatgaggtcatcagtttgtggaagaaacttctagaggccacagaactgaaaggagtcaagctccgagaagccaaccagcagcaacaatttaatcgcaatgttgaggacattgagttgtggctgtatgaagttgaaggtcacttggcttcagatgattatggtaaagacctcactaatgtccagaacctccagaagaagcatgctctgctagaggcagatgttgctgctcaccaggatcgaattgacggcatcacaattcaggcccgccagttccaagatgctggccatttcgatgccgaaaacattaaaaagaagcaagaggcccttgtagctcgctatgaggctctcaaggaacccatggtggcccggaagcagaagctggcagattctcttcgtctgcagcagctcttccgagatgtggaggatgaggaaacctggattcgagaaaaggagcctattgctgcgtccactaacagaggcaaagatcttattggagtccagaatctgctaaagaagcaccaagctttacaggcagaaattgctggccatgaacctcgcatcaaagcagtgacacaaaagggcaatgccatggtggaggaaggccattttgctgctgaggatgtgaaggccaaactgagtgagctcaaccagaagtgggaggcactgaaagccaaagcctcccagcggaggcaggatctggaggactcactacaggcccagcagtactttgccgacgccaatgaagctgagtcctggatgcgggagaaggagcccattgtgggcagtaccgactatgggaaggatgaagactctgctgaggctctgctcaagaagcatgaagctttgatgtccgatctcagtgcctacggcagcagcattcaagctttgcgagagcaggctcagtcatgccggcaacaagtggcccccatggatgatgagactggcaaggagctggtcttggctctctatgactatcaagagaagagccctcgtgaggtcaccatgaagaaaggggatatcctcaccttgctcaacagcacaaacaaggactggtggaaagtggaagtgaatgaccgtcagggttttgtgccagctgcgtatgtgaagaagctggaccccgcccagtcagcctcaagggagaacctcctggaagaacagggcagcattgctctgcggcaggggcagatcgacaaccagacacgcataactaaggaggccggcagtgtatctctgcgtatgaaacaggtggaagaactgtatcagtctctgctggagctgggtgagaagagaaaaggcatgttggagaagagttgcaagaagttcatgttgttccgggaagcgaacgagctacagcagtggatcaacgagaaggaagctgctctaacgagtgaagaggttggcgctgacttggagcaggtcgaggtgctgcagaagaagttcgatgacttccagaaggatctgaaagccaatgagtcccggctgaaggacattaacaaagtggccgaggacctggagtctgaaggtctcatggcggaagaagtgcaggccgtgcagcagcaggaggtgtatggtatgatgcccagggatgaagcagattccaagaccgcctccccatggaagtctgctcgactgatggtccacacagtggccaccttcaactccatcaaggagctgaatgagcgctggcggtccctgcaacagctggctgaggaacgtagccagctcctgggcagtgcacacgaagtacagaggttccacagggatgcggatgaaaccaaagaatggattgaggagaagaaccaggctctgaacacagacaactatggccatgatctagctagcgtccaggccctgcagcgcaaacacgaaggcttcgagagggaccttgcagctcttggtgacaaggtgaattcccttggggaaacagcccagaggctgatccagtcccaccctgaatctgcagaggacttaaaggaaaagtgcacagagttaaaccaggcctggaccagcctagggaagcgtgcagaccagcgcaaggccaaactgggtgactcccatgacctgcagcgcttccttagcgatttccgggacctcatgtcttggatcaatggaatacgagggttggtatcttcagatgaactggccaaggatgtcactggagctgaggctttgctggagcgacaccaggaacaccggacagaaattgatgccagggctggcactttccaggcatttgagcagtttgggcagcagctgttggctcatgggcactatgccagcccagagatcaaggagaaacttgatattcttgaccaggagcgcacagacctggagaaggcctgggttcagcgcagaatgatgctggaccactgcctggagttgcagctgttccatcgagactgtgagcaagcagagaactggatggctgcccgggaagccttcctaaacacagaagacaaaggagactcgctggacagtgtggaggctctgatcaaaaaacatgaagacttcgacaaagctatcaatgtccaggaggagaagatagctgccctgcaggcctttgccgaccagctcattgctgtggaccactatgccaagggagacattgcaaaccgacgcaatgaggtcctggacaggtggcgccgcctaaaagcccagatgattgagaaaaggtcaaagctcggagaatctcaaacacttcagcagttcagccgggatgtagatgagattgaagcctggatcagtgagaagttacaaacagccagcgatgagtcatacaaggaccccaccaacatccagagcaagcaccagaagcaccaagcctttgaggcagaactgcacgccaatgctgaccgaatccgtggagttattgacatgggcaactccctcattgagcgtggggcctgtgctggcagtgaggatgctgtcaaggcccgcctggctgcccttgcagaccagtggcagttcctggtgcagaagtcagctgagaagagccagaagctgaaagaggccaataagcagcagaacttcaacaccgggatcaaagactttgacttctggctttctgaggtggaggctctcctggcatctgaagactacggcaaagacctggcttccgtgaacaacctgctcaaaaagcatcagctgctggaggcagacatatcggcccacgaggatcgtctgaaggacctgaacagccaggctgacagcctgatgactagcagtgccttcgacacctcccaagtgaaagagaagcgggacaccatcaatggacgctttcagaagatcaagagcatggcaacctcccgaagagcaaaactgagcgagtcccatcgcctgcaccagtttttccgagacatggatgacgaggagtcctggatcaaggagaagaagttgttagtgagctctgaggactatggcagagacctcactggtgttcaaaatctgaggaagaaacacaagcggctagaagccgaactggccgcacacgaaccagccattcagggtgtcctggacacggggaagaagctgtctgatgacaacaccatcgggcaggaggagatccagcagcgtctcgcacagtttgtggagcactggaaggaactgaaacagctagcagctgcacggggccagcggctggaggagtccttggagtatcagcagtttgtggccaacgtggaggaggaggaggcttggatcaatgagaagatgaccctggtggccagcgaagactacggggacactcttgctgccatccagggcttactgaagaaacatgaagcttttgagacagacttcactgtccacaaggatcgagtgaatgatgtctgtactaatggacaagacctcattaagaagaacaatcaccatgaggagaacatctcttcaaagatgaagggtctgaatggtaaagtgtctgacctggagaaagcagcagctcagaggaaagcgaagctggatgagaactcggccttccttcagttcaattggaaggctgacgtggtggagtcctggattggtgaaaaggagaacagcttgaaaacagatgattatggccgagatctgtcttctgtccaaactctgctcaccaagcaggagacatttgatgctggcctgcaggccttccagcaggagggcattgccaatatcactgccctcaaagaccagctgctagctgccaagcacattcagtcgaaggccatcgaggcccgacatgcctccctcatgaagaggtggacccagctgttggccaattcagctacccgcaagaagaagttgctagaggcccagagtcatttccgaaaggtagaagacctcttcctgacctttgccaaaaaggcatcggctttcaacagctggtttgagaatgcagaagaggacctcacagacccagtgcgctgcaactctctggaagaaatcaaagccctccgagaggctcatgatgccttccgctcatcgctcagctctgcgcaggccgacttcaaccagctagccgagctggaccgtcagatcaagagtttccgagtggcctccaatccctacacctggttcaccatggaggccctggaagagacgtggaggaacctacagaagatcattaaggagcgagaactggagctgcagaaggaacagcggcggcaggaggagaatgacaagctacgccaagagtttgcccagcatgccaacgcgttccaccagtggatccaggaaacaagaacgtatctcctcgacgggtcctgcatggtcgaagagtcgggaactctggaatctcagcttgaagctaccaaacgcaagcaccaggagattcgggccatgagaagtcagctgaagaagattgaggacctgggggctgccatggaggaagccctcatcctggacaacaagtacactgagcacagcactgtgggcctggcccagcagtgggaccagttagaccagctgggcatgcgcatgcagcacaacctggagcagcagatccaggccaggaacacaacaggagtcactgaggaggccctcaaggagttcagcatgatgttcaaacacttcgacaaggacaagtctggccggctgaatcatcaagagttcaaatcctgccttcgttctctgggttacgacctgccaatggttgaggaaggagagcctgatcctgagtttgaggccatactggacactgttgatcccaacagggacggccacgtctccctgcaagagtacatggctttcatgatcagccgtgaaaccgagaatgtcaagtccagtgaagagatcgagagtgctttccgggccctcagctccgagggcaagccttatgtgaccaaggaggagctctaccagaacctgacccgggaacaagctgactactgtgtctcccacatgaagccctatgtggatggcaagggccgcgaacttccaactgccttcgactacgtggagttcacccgctctctctttgtgaattgat

SEQ ID NO: 1165 - protein, 2472 aa, Rattus norvegicus
  ref <308>: DATABASE ACCESSION NUMBER: SWISS-Prot / P16086
  ref <309>: DATABASE ENTRY DATE: 2002-06-15
MDPSGVKVLETAEDIQERRQQVLDRYHRFKELSTLRRQKLEDSYRFQFFQRDAEELEKWIQEKLQVASDENYKDPTNLQGKLQKHQAFEAEVQANSGAIVKLDETGNLMISEGHFASETIRTRLMELHRQWELLLEKMREKGIKLLQAQKLVQYLRECEDVMDWINDKEAIVTSEELGQDLEHVEVLQKKFEEFQTDLAAHEERVNEVNQFAAKLIQEQHPEEELIKTKQEEVNAAWQRLKGLALQRQGKLFGAAEVQRFNRDVDETIGWIKEKEQLMASDDFGRDLASVQALLRKHEGLERDLAALEDKVKALCAEADRLQQSHPLSANQIQVKREELITNWEQIRTLAAERHARLDDSYRLQRFLADFRDLTSWVTEMKALINADELANDVAGAEALLDRHQEHKGEIDAHEDSFKSADESGQALLAAGHYASDEVREKLSILSEERAALLELWELRRQQYEQCMDLQLFYRDTEQVDNWMSKQEAFLLNEDLGDSLDSVEALLKKHEDFEKSLSAQEEKITALDEFATKLIQNNHYAMEDVATRRDALLSRRNALHERAMHRRAQLADSFHLQQFFRDSDELKSWVNEKMKTATDEAYKDPSNLQGKVQKHQAFEAELSANQSRIDALEKAGQKLIDVNHYAKEEVAARMNEVISLWKKLLEATELKGVKLREANQQQQFNRNVEDIELWLYEVEGHLASDDYGKDLTNVQNLQKKHALLEADVAAHQDRIDGITIQARQFQDAGHFDAENIKKKQEALVARYEALKEPMVARKQKLADSLRLQQLFRDVEDEETWIREKEPIAASTNRGKDLIGVQNLLKKHQALQAEIAGHEPRIKAVTQKGNAMVEEGHFAAEDVKAKLSELNQKWEALKAKASQRRQDLEDSLQAQQYFADANEAESWMREKEPIVGSTDYGKDEDSAEALLKKHEALMSDLSAYGSSIQALREQAQSCRQQVAPMDDETGKELVLALYDYQEKSPREVTMKKGDILTLLNSTNKDWWKVEVNDRQGFVPAAYVKKLDPAQSASRENLLEEQGSIALRQGQIDNQTRITKEAGSVSLRMKQVEELYQSLLELGEKRKGMLEKSCKKFMLFREANELQQWINEKEAALTSEEVGADLEQVEVLQKKFDDFQKDLKANESRLKDINKVAEDLESEGLMAEEVQAVQQQEVYGMMPRDEADSKTASPWKSARLMVHTVATFNSIKELNERWRSLQQLAEERSQLLGSAHEVQRFHRDADETKEWIEEKNQALNTDNYGHDLASVQALQRKHEGFERDLAALGDKVNSLGETAQRLIQSHPESAEDLKEKCTELNQAWTSLGKRADQRKAKLGDSHDLQRFLSDFRDLMSWINGIRGLVSSDELAKDVTGAEALLERHQEHRTEIDARAGTFQAFEQFGQQLLAHGHYASPEIKEKLDILDQERTDLEKAWVQRRMMLDHCLELQLFHRDCEQAENWMAAREAFLNTEDKGDSLDSVEALIKKHEDFDKAINVQEEKIAALQAFADQLIAVDHYAKGDIANRRNEVLDRWRRLKAQMIEKRSKLGESQTLQQFSRDVDEIEAWISEKLQTASDESYKDPTNIQSKHQKHQAFEAELHANADRIRGVIDMGNSLIERGACAGSEDAVKARLAALADQWQFLVQKSAEKSQKLKEANKQQNFNTGIKDFDFWLSEVEALLASEDYGKDLASVNNLLKKHQLLEADISAHEDRLKDLNSQADSLMTSSAFDTSQVKEKRDTINGRFQKIKSMATSRRAKLSESHRLHQFFRDMDDEESWIKEKKLLVSSEDYGRDLTGVQNLRKKHKRLEAELAAHEPAIQGVLDTGKKLSDDNTIGQEEIQQRLAQFVEHWKELKQLAAARGQRLEESLEYQQFVANVEEEEAWINEKMTLVASEDYGDTLAAIQGLLKKHEAFETDFTVHKDRVNDVCTNGQDLIKKNNHHEENISSKMKGLNGKVSDLEKAAAQRKAKLDENSAFLQFNWKADVVESWIGEKENSLKTDDYGRDLSSVQTLLTKQETFDAGLQAFQQEGIANITALKDQLLAAKHIQSKAIEARHASLMKRWTQLLANSATRKKKLLEAQSHFRKVEDLFLTFAKKASAFNSWFENAEEDLTDPVRCNSLEEIKALREAHDAFRSSLSSAQADFNQLAELDRQIKSFRVASNPYTWFTMEALEETWRNLQKIIKERELELQKEQRRQEENDKLRQEFAQHANAFHQWIQETRTYLLDGSCMVEESGTLESQLEATKRKHQEIRAMRSQLKKIEDLGAAMEEALILDNKYTEHSTVGLAQQWDQLDQLGMRMQHNLEQQIQARNTTGVTEEALKEFSMMFKHFDKDKSGRLNHQEFKSCLRSLGYDLPMVEEGEPDPEFEAILDTVDPNRDGHVSLQEYMAFMISRETENVKSSEEIESAFRALSSEGKPYVTKEELYQNLTREQADYCVSHMKPYVDGKGRELPTAFDYVEFTRSLFVN

SEQ ID NO: 1166 - DNA, 4734 bp, Homo sapiens
  ref <308>: DATABASE ACCESSION NUMBER: EMBL / AL110273
  ref <309>: DATABASE ENTRY DATE: 2000-02-18
gagatatccttaccttactcaacagcaccaacaaggattggtggaaggtggaagtgaacgatcgtcagggttttgtgccggctgcgtacgtgaagaaattggaccccgcccagtcagcctcccgggagaatctcctggaggagcaaggcagcatagcactgcggcaggagcagattgacaatcaatatcattctctgctggaactgggtgagaagcgtaaaggcatgttggagaagagttgcaagaagtttatgttgttccgtgaagcgaatgaactacagcaatggatcaatgagaaggaagccgctctgacaagtgaggaggtgggagcagacttggagcaggttgaggtgctccagaagaagtttgatgacttccagaaggacctgaaggccaatgagtcacggttgaaggacattaacaaggtagctgaagacctggagtctgaaggtcttatggcagaggaggtgcaggctgtgcaacaacaggaagtgtatggcatgatgcccagggatgaaactgattccaagacagcctccccgtggaagtctgctcgtctgatggttcacaccgtggccacctttaattccatcaaggagctgaatgagcgctggcggtccctacagcagctggccgaggaacggagccagctcttgggcagcgcccatgaagtacagaggttccacagagatgctgatgaaaccaaagaatggattgaagagaagaatcaagctctaaacacagacaattatggacatgatctcgccagtgtccaggccctgcaacgcaagcatgagggcttcgagagggaccttgcggctctcggtgacaaggtaaactcccttggtgaaacagcagagcgcctgatccagtcccatcccgagtcagcagaagacctgcaggaaaagtgcacagagttaaaccaggcctggagcagcctggggaaacgtgcagatcagcgcaaggcaaagttgggtgactcccacgacctgcagcgcttccttagcgatttccgggacctcatgtcttggatcaatggaatacgggggttggtgtcctcagatgagctagccaaggatgtcaccggagctgaggcattgctggagcgacaccagggacaccggacagaaatcgatgccagggctggcactttccaggcatttgagcagtttggacagcagctgttggctcacggacactatgccagccctgagatcaagcagaaacttgatattcttgaccaggagcgtgcagacctggagaaggcctgggttcagcgcaggatgatgctggatcagtgccttgaactgcagctgttccatcgggactgtgagcaagctgagaactggatggctgcccgggaggccttcttgaataccgaagacaaaggagactcactggacagcgtagaggctctgatcaaaaaacatgaagactttgacaaagcgattaacgtccaggaagagaagattgctgctctgcaggcctttgccgaccagctcatcgctgccggccattatgccaagggagacatttctagccggcgcaatgaggtcttggacaggtggcgacgtctgaaagcccagatgattgagaaaaggtcaaagctaggagaatctcaaaccctccaacagttcagccgggatgtggatgagattgaggcttggatcagtgaaaaattgcaaacagcgagtgatgagtcgtacaaggatcccaccaacatccagagcaagcaccagaagcaccaggcttttgaagcagagctgcatgccaacgctgaccggatccgtggggttatcgacatgggcaactccctcattgaacgtggagcctgtgccggcagtgaggatgctgtcaaggcccgcctggctgccttagctgaccagtggcagttcttggtgcaaaagtcagcggaaaagagccagaaactgaaagaagccaacaagcagcagaacttcaacacagggatcaaggactttgacttctggctgtctgaggtggaggccctgctggcatccgaagattatggcaaagacctggcttctgtgaacaacctgctgaaaaagcatcaactgctggaagcagatatatctgcccatgaggatcgcctgaaggacctgaacagccaggcagacagcctgatgaccagcagtgccttcgacacctcccaagtaaaggacaagagggacaccatcaacgggcgcttccagaagatcaagagcatggcggcctcccggcgagccaagctgaatgaatcccatcgcctgcaccagttcttccgggacatggatgacgaggagtcctggatcaaggagaagaagctgctggtgggctcagaggactacggccgggacctaactggcgtgcagaacctgaggaagaagcacaagcggctggaagcagaactggctgcgcatgagccggctattcagggtgtcctggacactggcaagaagctgtccgatgacaacaccatcgggaaagaggagatccagcagcggctggcgcagtttgtggagcactggaaagagctgaagcagctggcagctgcccggggtcagcggctggaagagtccttggaatatcagcagtttgtagccaatgtggaagaggaagaagcctggatcaatgagaaaatgaccctggtggccagcgaagattatggcgacactcttgccgccatccagggcttactgaagaaacatgaagcttttgagacagacttcaccgtccacaaggatcgcgtgaatgatgtctgcaccaatggacaagacctcattaagaagaacaatcaccatgaggagaacatctcttcaaagatgaagggcctgaacgggaaagtgtcagacctggagaaagctgcagcccagagaaaggcgaagctggatgagaactcggccttccttcagttcaactggaaggcggacgtggtggagtcctggatcggtgaaaaggagaacagcttgaagacagatgattatggccgagacctgtcttctgtgcagacgctcctcaccaaacaggaaacttttgacgctgggctgcaggccttccagcaggaaggcattgccaacatcactgccctcaaagatcagcttctcgccgccaaacacgttcagtccaaggccatcgaggcccggcacgcctccctcatgaagaggtggagccagcttctggccaactcagccgcccgcaagaagaagcttctggaggctcagagtcacttccgcaaggtggaggacctcttcctgaccttcgccaaaaaggcttctgccttcaacagctggtttgaaaatgcagaggaggacttaacagaccccgtgcgctgcaactccttggaagaaatcaaagctttgcgcgaggcccacgacgccttccgctcctccctcagctctgcccaggctgacttcaaccagctggccgagctggaccgccagatcaagagcttccgcgtagcctccaacccctacacctggtttaccatggaggccctggaggagacctggaggaacctacagaaaatcatcaaggagagggagctggagctgcagaaggagcagcggcggcaggaggagaacgacaagctgcgccaggagtttgcccagcacgccaacgccttccaccagtggatccaagagaccaggacatacctcctcgatgggtcctgtatggtggaagagtcggggaccctcgaatcccagcttgaagctaccaaacgcaagcaccaggaaatccgagccatgagaagtcagctcaaaaagatcgaggacctgggggccgccatggaggaggccctcatcctggacaacaagtacacggagcacagcaccgtgggcctcgcccagcagtgggaccagctggaccagctgggcatgcgcatgcagcacaacctggagcagcagatccaggccaggaacacaacaggtgtgactgaggaggccctcaaagaattcagcatgatgtttaaacactttgactaggacaagtctggcaggctgaaccatcaggagttcaaatcttgcctgcgctccctgggctatgacctgcccatggtggaggaaggggaacctgaccctgagttcgaggcaatcctggacacggtggatccgaacagagatggccatgtctccttgcaagaatacatggctttcatgatcagccgcgaaactgagaacgtcaagtccagcgaggagattgagagcgccttccgggccctctgctcagagggaaagccttacgtgaccaaggaggagctctaccagaacctgacccgggaacaagccgactactgcgtctcccacatgaagccctacgtggacggcaagggccgcgagctccccaccgcgttcgactacgtggagttcacccgctcgcttttcgtgaactgagccactccctgggtcacccacccctcgctgcttgccctgcgtcgccttgctgcatgtccgctcctctgtgtgctctcactttccactgtaaccttaagcctgcttagcttggaataagacttaggagaatatggtgcttcactaacccgcttccggtccagtcacaatcatcatgtcactgtggggacccagatctgtgtcttgaagcagctgccctcattccgacttcagaaaatcgaagcagctggctcctccccttgttctctctcccaccctcccccaaatctgttttcatgtaaaagacaaataaatgatgacttcccccaaaaaaaaaaaaaaaaaaaac

SEQ ID NO: 1167 - protein, 2472 aa, Homo sapiens
  ref <308>: DATABASE ACCESSION NUMBER: SWISS-Prot / Q13813
  ref <309>: DATABASE ENTRY DATE: 2002-06-15
MDPSGVKVLETAEDIQERRQQVLDRYHRFKELSTLRRQKLEDSYRFQFFQRDAEELEKWIQEKLQIASDENYKDPTNLQGKLQKHQAFEAEVQANSGAIVKLDETGNLMISEGHFASETIRTRLMELHRQWELLLEKMREKGIKLLQAQNLVQYLRECEDVMDWINDKEAIVTSEELGQDLEHVEVLQKKFEEFQTDMAAHEERVNEVNQFAAKLIQEQHPEEELIKTKQDEVNAAWQRLKGLALQRQGKLFGAAEVQRFNRDVDETISWIKEKEQLMASDDFGRDLASVQALLRKHEGLERDLAALEDKVKALCAEADRLQQSHPLSATQIQVKREELITNWEQIRTLAAERHARLNDSYRLQRFLADFRDLTSWVTEMKALINADELASDVAGAEALLDRHQEHKGEIDAHEDSFKSADESGQALLAAGHYASDEVREKLTVLSEERAALLELWELRRQQYEQCMDLQLFYRDTEQVDNWMSKQEAFLLNEDLGDFLDSVEALLKKHEDFEKSLSAQEEKITALDEFATKLIQNNHYAMEDVATRRDALLSRRNALHERAMRRRAQLADSFHLQQFFRDSDELKSWVNEKMKTATDEAYKDPSNLQGKVQKHQAFEAELSANQSRIDALEKAGQKLIDVNHYAKDEVAARMNEVISLWKKLLEATELKGIKLREANQQQQFNRNVEDIELWLYEVEGHLASDDYGKDLTNVQNLQKKHALLEADVAAHQDRIDGVTIQARQFQDAGHFDAENIKKKQEALVARYEALKEPMVARKQKLADSLRLQQLFRDVEDEETWIREKEPIAASTNRGKDLIGVQNLLKKHQALQAEIAGHEPRIKAVTQKGNAMVEEGHFAAEDVKAKLHELNQKWEALKAKASQRRQDLEDSLQAQQYFADANEAESWMREKEPIVGSTDYGKDEDSAEALLKKHEALMSDLSAYGSSIQALREQAQSCRQQVAPTDDETGKELVLALYDYQEKSPREVTMKKGDILTLLNSTNKDWWKVEVNDRQGFVPAAYVKKLDPAQSASRENLLEEQGSIALRQEQIDNQTRITKEAGSVSLRMKQVEELYHSLLELGEKRKGMLEKSCKKFMLFREANELQQWINEKEAALTSEEVGADLEQVEVLQKKFDDFQKDLKANESRLKDINKVAEDLESEGLMAEEVQAVQQQEVYGMMPRDETDSKTASPWKSARLMVHTVATFNSIKELNERWRSLQQLAEERSQLLGSAHEVQRFHRDADETKEWIEEKNQALNTDNYGHDLASVQALQRKHEGFERDLAALGDKVNSLGETAERLTQSHPESAEDLQEKCTELNQAWSSLGKRADQRKAKLGDSHDLQRFLSDFRDLMSWINGIRGLVSSDELAKDVTGAEALLERHQEHRTEIDARAGTFQAFEQFGQQLLAHGHYASPEIKQKLDILDQERADLEKAWVQRRMMLDQCLELQLFHRDCEQAENWMAAREAFLNTEDKGDSLDSVEALIKKHEDFDKAINVQEEKIAALQAFADQLIAAGHYAKGDISSRRNEVLDRWRRLKAQMIEKRSKLGESQTLQQFSRDVDEIEAWISEKLQTASDESYKDPTNIQSKHQKHQAFEAELHANADRIRGVIDMGNSLIERGACAGNEDAVKARLAALADQWQFLVQKSAEKSQKLKEANKQQNFNTGIKDIAFWLSEVEALLASEDYGKDLASVNNLLKKHQLLEADISAHEDRLKDLNSQADSLMTSSAFDTSQVKDKRDTINGRFQKIKSMAASRRAKLNESHRLHQFFRDMDDEESWIKEKKLLVGSEDYGRDLTGVQNLRKKHKRLEAELAAHEPAIQGVLDTGKKLSDDNTIGKEEIQQRLAQFVEHWKELKQLAAARGQRLEESLEYQQFVANVEEEEAWINEKMTLVASEDYGDTLAAIQGLLKKHEAFETAFTVHKDRVNDVCTNGQDLIKKNNHHEENISSKMKGLNGKVSDLEKAAAQRKANVDENSAFLQFNWKADVVESWIGEKENSLKTDDYGRDLSSVQTLLTKQETFDAGLQAFQQEGIANITALKDQLLAAKHVQSKAIEARHASLMKRWSQLLANSAARKKKLLEAQSHFRKVEDLFLTFAKKASAFNSWFENAEEDLTDPVRCNSLEEIKALREAHDAFRSSLSSAQADFNQLAELDRQIKSFRVASNPYTWFTMEALEETWRNLQKIIKERELELQKEQRRQEENDKLRQEFAQHANAFHQWIQETRTYLLDGSCMVEESGTLESQLEATKRKHQEIRAMRSQLKKIEDLGAAMEEALILDNKYTEHSTVGLAQQWDQLDQLGMRMQHNLEQQIQARNTTGVTEEALKEFSMMFKHFDKDKSGRLNHQDGKSCLRSLGYDLPMVEEGEPDPEFEAILDTVDPNRDGHVSLQEYMAFMISRETENVKSSEEIESAFRALSSEGKPYVTKEELYQNLTREQADYCVSHMKPIVDGKGRELPTAFDYVEFTRSLFVN

SEQ ID NO: 1168 - DNA, 3312 bp, Rattus norvegicus
  ref <308>: DATABASE ACCESSION NUMBER: EMBL / AF084205
  ref <309>: DATABASE ENTRY DATE: 1998-11-05
tctgcagtatggtagattattatttatgcatttatgccagtgtggcttcattcatacagatgaaccaagctttgggatagcagtataaaattagaatcagacagctgactgctcagcaggatgccatcaactaacagagcaggcagtctaaaggaccctgaaatcgcagagctcttcttcaaagaagatccggaaaaactcttcacagatctcagagaaatcggccatgggagctttggagcagtttattttgcacgagatgtgcgtactaatgaagtggtggccatcaagaaaatgtcttatagtggaaagcagtctactgagaaatggcaggatattattaaggaagtcaagtttctacaaagaataaaacatcccaacagtatagaatacaaaggctgctatttacgtgaacacacagcatggcttgtaatggaatattgtttaggatctgcttcggatttactagaagttcataaaaagccattacaagaagtggaaatagcagcaattacacatggtgctctccagggattagcttatttacattctcataccatgatccatagagatatcaaagcaggaaatatccttctgacagaaccaggccaagtgaaacttgctgactttggatctgcttccatggcctcccctgccaattcttttgtgggaacaccatattggatggccccagaagtaattttagccatggatgaaggacaatatgatggcaaagttgatgtatggtctcttggaataacatgtattgaattagccgagaggaagcctcctttatttaatatgaatgcaatgagtgccttatatcacatagcccaaaatgaatcccctacactacagtctaatgaatggtctgattattttcgaaactttgtagattcttgcctccagaaaatccctcaagatcgccctacatcagaggaacttttaaagcacatgtttgttcttcgagagcgccctgaaacagtgttaatagatcttattcaaaggacaaaggatgcagtaagagagctggacaatctacaatatcgaaagatgaagaaactccttttccaggaggcacataatggaccagcagtagaagcacaggaagaagaggaggagcaagatcatggtggtggccggacaggaacagtaaatagtgttggaagcaatcagtctatccccagtatgtctatcagtgccagtagccaaagcagcagtgttaatagtcttccagatgcatcggatgacaagagtgagctagacatgatggagggagaccatacagtgatgtctaacagttctgtcatccacttaaaacctgaggaggaaaattaccaagaagaaggagatcctagaacaagagcatcagctccacagtctccacctcaagtgtctcgtcacaaatcacattatcgtaatagagaacactttgcaactatacgaacagcatcactggttacaagacagatgcaagaacatgagcaggactctgaacttagagaacagatgtctggttataagcggatgaggcgacagcatcagaagcagctgatgactctggaaaataaactgaaggcagaaatggacgaacatcggctcagattagacaaagatcttgaaactcagcgcaacaatttcgctgcagaaatggagaaacttattaagaaacaccaagcttctatggaaaaagaggctaaagtgatggccaacgaggagaaaaaattccaacaacacattcaggctcaacagaagaaagaactgaatagctttttggagtctcaaaaaagagaatataaacttcgaaaagagcagcttaaggaggagctgaatgaaaaccagagcacacctaaaaaagaaaagcaggaatggctttcaaagcagaaggagaatattcaacattttcaggcagaagaagaagctaatcttcttcgacgtcaaaggcagtatctagagctagaatgtcgtcgcttcaaaagaagaatgttacttggtcggcataacttggaacaggaccttgtcagggaggagttaaacaaaaggcagactcagaaggacttagaacatgcaatgttactgcgacagcatgaatccatgcaagaactggagtttcgccacctcaacactattcagaagatgcgctgtgagttgatcagactgcaacatcaaactgagcttactaaccagctggaatacaataagagaagggaacgggaactaagacggaaacatgtcatggaagttcgacagcagcctaagagtttgaagtctaaagaactccaaataaaaaagcagtttcaggatacctgcaaaattcaaaccagacagtacaaagcattaaggaatcacctactggagactacaccaaagagtgagcacaaagctgttctgaaaagactcaaggaggaacagactcggaagttagccatcttggctgagcagtatgatcatagcattaatgaaatgctctccacacaagctctgcgtttggatgaagcacaggaagcagaatgccaggttttgaagatgcagctacagcaggaactggagctgttgaatgcatatcagagcaaaatcaagatgcaggctgaggcccaacatgatcgagagcttcgagagctggaacaaagggtctcccttcggagagcactcttagaacagaagattgaagaagagatgttggctttgcagaatgaacgcacagaacgaatacgtagcctgctcgagcgccaggccagagaaattgaagcttttgactctgaaagcatgagattaggttttagtaacatggtcctttctaatctctcccctgaggcattcagccacagctacccaggagcttctagctggtctcacaatcctactgggggttcaggacctcactggggtcatcccatgggtggcacaccacaagcttggggtcatccgatgcaaggcggaccccaaccatggggtcacccctcagggccaatgcaaggggtacctcgaggtagcagtataggagtccgcaatagcccccaggctctgaggcggacagcttctgggggacggacggaacagggcatgagcagaagcacgagtgtcacttcacaaatatccaatgggtcacacatgtcttacacataataattgaaagtggcaattccgctggagctgtctgccaaaagaaactgcctacagacatcagcacagcagcctcctcacttgggtactaccgggtggaagctgtgcatatggtatattttattcgtctttgtaaagcgttatgttttgtgtttactaattgggatgtcatagtatttggctgccggg

SEQ ID NO: 1169 - protein, 1001 aa, Rattus norvegicus
  ref <308>: DATABASE ACCESSION NUMBER: SWISS-Prot / AAC71014
  ref <309>: DATABASE ENTRY DATE: 2003-02-01
MPSTNRAGSLKDPEIAELFFKEDPEKLFTDLREIGHGSFGAVYFARDVRTNEVVAIKKMSYSGKQSTEKWQDIIKEVKFLQRIKHPNSIEYKGCYLREHTAWLVMEYCLGSASDLLEVHKKPLQEVEIAAITHGALQGLAYLHSHTMIHRDIKAGNILLTEPGQVKLADFGSASMASPANSFVGTPYWMAPEVILAMDEGQYDGKVDVWSLGITCIELAERKPPLFNMNAMSALYHIAQNESPTLQSNEWSDYFRNFVDSCLQKIPQDRPTSEELLKHMFVLRERPETVLIDLIQRTKDAVRELDNLQYRKMKKLLFQEAHNGPAVEAQEEEEEQDHGGGRTGTVNSVGSNQSIPSMSISASSQSSSVNSLPDASDDKSELDMMEGDHTVMSNSSVIHLKPEEENYQEEGDPRTRASAPQSPPQVSRHKSHYRNREHFATIRTASLVTRQMQEHEQDSELREQMSGYKRMRRQHQKQLMTLENKLKAEMDEHRLRLDKDLETQRNNFAAEMEKLIKKHQASMEKEAKVMANEEKKFQQHIQAQQKKELNSFLESQKREYKLRKEQLKEELNENQSTPKKEKQEWLSKQKENIQHFQAEEEANLLRRQRQYLELECRRFKRRMLLGRHNLEQDLVREELNKRQTQKDLEHAMLLRQHESMQELEFRHLNTIQKMRCELIRLQHQTELTNQLEYNKRRERELRRKHVMEVRQQPKSLKSKELQIKKQFQDTCKIQTRQYKALRNHLLETTPKSEHKAVLKRLKEEQTRKLAILAEQYDHSINEMLSTQALRLDEAQEAECQVLKMQLQQELELLNAYQSKIKMQAEAQHDRELRELEQRVSLRRALLEQKIEEEMLALQNERTERIRSLLERQAREIEAFDSESMRLGFSNMVLSNLSPEAFSHSYPGASSWSHNPTGGSGPHWGHPMGGTPQAWGHPMQGGPQPWGHPSGPMQGVPRGSSIGVRNSPQALRRTASGGRTEQGMSRSTSVTSQISNGSHMSYT

SEQ ID NO: 1170 - DNA, 4620 bp, Homo sapiens
  ref <308>: DATABASE ACCESSION NUMBER: EMBL / AB037782
  ref <309>: DATABASE ENTRY DATE: 2000-03-14
gagccgtgattgtgccactacactccagccctgacctcttacaccgaagcagtcctcatacgtcagcctcccaaagtgctgggattacagatgaaccaaggatcgggatagcagtataaaattagaatcaagacagctgactgctcagcaggatgccatcaactaacagagcaggcagcctgaaggaccctgaaattgcagagctcttcttcaaagaagatccagagaagctcttcacagatctcagagaaattggccatggaagctttggagcagtgtattttgcacgagatgtgcgtaccaatgaagtggtggccatcaagaaaatgtcttatagtggaaagcagtctactgagaaatggcaggatattattaaggaagtcaagtttctacaaagaataaaacatcccaacagtatagaatacaaaggctgttatttacgtgaacacacagcatggcttgtaatggaatattgtttaggatctgcttcggatttactagaagttcacaaaaagccattacaagaagtggaaatagcagcaattacacatggtgctcttcagggattagcctacttacattctcatactatgattcatagagatatcaaagcaggaaatatccttctgacagaaccaggccaggtgaaacttgctgactttggctctgcttccatggcatcacctgccaattcctttgtgggaacgccgtattggatggccccagaagtaattttagccatggatgaaggacaatatgatggcaaagtagatgtgtggtctcttggaataacatgtattgaactagcggaaaggaagcctcctttatttaatatgaatgcaatgagtgccttatatcacatagcccaaaatgaatcccctacactacagtctaatgaatggtctgattattttcgcaactttgtagattcttgcctccagaaaatccctcaagatcgacctacatcagaggaacttttaaagcacatatttgttcttcgggagcgccctgaaaccgtgttaatagatctcattcagaggacaaaggatgcagtaagagagctggacaatctgcagtatcgaaagatgaagaaactccttttccaggaggcacataatggaccagcagtagaagcacaggaagaagaagaggaacaagatcatggtgttggccggacaggaacagttaatagtgttggaagtaatcaatccattcccagcatgtccatcagtgccagcagccaaagcagtagtgttaacagtcttccagatgtctcagatgacaagagtgagctagacatgatggagggagaccacacagtgatgtctaacagttctgttatccatttaaaaccagaggaagaaaattacagagaagagggagatcctagaacaagagcatcagatccacaatctccaccccaagtatctcgtcacaaatcacactatcgtaatcgagaacactttgctactatacggacagcatcactggttacgaggcaaatgcaagaacatgagcaggactctgagcttagagaacaaatgtctggctataagcgaatgaggcgacaacatcaaaagcaactgatgactctggaaaacaagctaaaggctgagatggatgaacatcgcctcagattagacaaagatcttgaaactcagcgtaacaattttgctgcagaaatggagaaacttatcaagaaacaccaggctgctatggagaaagaggctaaagtgatgtccaatgaagagaaaaaatttcagcaacatattcaggcccaacagaagaaagaactgaatagttttctcgagtcccagaaaagagagtataaacttcgaaaagagcagcttaaagaggagctaaatgaaaaccagagtacccccaaaaaagaaaaacaggagtggctttcaaagcagaaggagaatatacagcatttccaagcagaagaagaagctaaccttcttcgacgtcaaagacaatacctagagctggaatgccgtcgcttcaagagaagaatgttacttgggcgtcataacttagagcaggaccttgtcagggaggagttaaacaaaagacagactcagaaggacttagagcatgccatgctactccgacagcatgaatctatgcaagaactggagttccgccacctcaacacaattcagaagatgcgctgtgagttgatcagattacagcatcaaactgagctcactaaccagctggaatataataagcgaagagaacgagaactaagacgaaagcatgtcatggaagttcgacaacagcctaagagtttgaagtctaaagaactccaaataaaaaagcagtttcaggatacctgcaaaatccaaaccagacagtacaaagcattaagaaatcacctgctggagactacaccaaagagtgagcacaaagctgttctgaaacggctcaaggaggaacagacccggaaattagctatcttggctgagcagtatgatcacagcattaatgaaatgctctccacacaagccctgcgtttggatgaagcacaggaagcagagtgccaggttttgaagatgcagctgcagcaggaactggagctgttgaatgcgtatcagagcaaaatcaagatgcaagctgaggcacaacatgatcgagagcttcgcgagcttgaacagagggtctccctccggagggcactcttagaacaaaagattgaagaagagatgttggctttgcagaatgagcgcacagaacgaatacgaagcctgttggaacgtcaagccagagagattgaagcttttgactctgaaagcatgagactaggttttagtaatatggtcctttctaatctctcccctgaggcattcagccacagctacccgggagcttctggttggtcacacaaccctactgggggtccaggacctcactggggtcatcccatgggtggcccaccacaagcttggggccatccaatgcaaggtggaccccagccatggggtcacccttcagggccaatgcaaggggtacctcgaggtagcagtatgggagtccgcaatagcccccaggctctgaggcggacagcttctgggggacggacagagcagggcatgagcagaagcacgagtgtcacttcacaaatatccaatgggtcacacatgtcttatacataacttaataattgagagtggcaattccgctggagctgtctgccaaaagaaactgcctacagacatcatcacagcagcctcctcacttgggtactacagtgtggaagctgagtgcatatggtatattttattcatttttgtaaagcgttctgttttgtgtttactaattgggatgtcatagtacttggctgccgggtttgtttgtttttggggaaattttgaaaagtggagttgatattaaaaataaatgtgtatgtgtgtacatatatatacacacacatacacatatattatgcatgtggtgaaaagaattggctagataggggatttttctgaacactgcaaaaatagaacgtagcaaaatggcttcagttatcacttttgggtgtctgtatcctaagaagtttctgaaaagatctaaagcctttttatcccatatcccaaattcttatgagccactcacagcaggcagcatatgttgaaataagttattactggtacacacctgcattgcctcaccagtgtatttatttgttattaaattgatctgacttctcagcctcatttggactaaaaaaagaaagcagaaatccatgaacacattgcttctcggccttttggctaagatcaagtgtagaaatccatgaacactaaaggacttcattgattttttcagagagtagaaaacaacttagtttttcttttttcctgaatgcgtcataggcttgtgagtgatttttgtccattcaattgtgccttctttgtattatgataagatgggggtacttaaggagatcacaagttgtgtgaggattgcattaacaaacctatgagccttcaatggggaagaccagaagggtgagaggggccctgaaagttcatatggtgggtatgtcccgcagcagagtgaggagatgaagcttacgtgtcctgacgttttgttgcttatactgtgatatctcatcctagctaagctctataatgcccgagaccccaaacagtacttttactttgtttgtacaaaaacaaagacatatagccaatacaaatcaaatgccggaggtgtttgatgccatatttgcaaattgccatctattgaaattctcgtcacactacatagacataattgttatctccttttggcttatgtgattttctgtttacaagtagaatagccaattatttaaatgtttagttgccacagtgaaccaggagtcactgagccaatgactttaccagctgctgactaatcttcatcaccactgtagattttgctgcatgtgcaggtcctctatttttaattgctgttttcgttgctgcagtactttacaaacttctagttcgttgagacttagtgaccatttggcatcaagttaacatcacacaataggaaacaccacttccacaagtctcaagcctcagtgctaaagtactactgaaaaggaactaggaagtttggccaatt

SEQ ID NO: 1171 - protein, 1001 aa, Homo sapiens
  ref <308>: DATABASE ACCESSION NUMBER: Refseq / XP_030845
  ref <309>: DATABASE ENTRY DATE: 2002-08-01
MPSTNRAGSLKDPEIAELFFKEDPEKLFTDLREIGHGSFGAVYFARDVRTNEVVAIKKMSYSGKQSTEKWQDIIKEVKFLQRIKHPNSIEYKGCYLREHTAWLVMEYCLGSASDLLEVHKKPLQEVEIAAITHGALQGLAYLHSHTMIHRDIKAGNILLTEPGQVKLADFGSASMASPANSFVGTPYWMAPEVILAMDEGQYDGKVDVWSLGITCIELAERKPPLFNMNAMSALYHIAQNESPTLQSNEWSDYFRNFVDSCLQKIPQDRPTSEELLKHIFVLRERPETVLIDLIQRTKDAVRELDNLQYRKMKKLLFQEAHNGPAVEAQEEEEEQDHGVGRTGTVNSVGSNQSIPSMSISASSQSSSVNSLPDVSDDKSELDMMEGDHTVMSNSSVIHLKPEEENYREEGDPRTRASDPQSPPQVSRHKSHYRNREHFATIRTASLVTRQMQEHEQDSELREQMSGYKRMRRQHQKQLMTLENKLKAEMDEHRLRLDKDLETQRNNFAAEMEKLIKKHQAAMEKEAKVMSNEEKKFQQHIQAQQKKELNSFLESQKREYKLRKEQLKEELNENQSTPKKEKQEWLSKQKENIQHFQAEEEANLLRRQRQYLELECRRFKRRMLLGRHNLEQDLVREELNKRQTQKDLEHAMLLRQHESMQELEFRHLNTIQKMRCELIRLQHQTELTNQLEYNKRRERELRRKHVMEVRQQPKSLKSKELQIKKQFQDTCKIQTRQYKALRNHLLETTPKSEHKAVLKRLKEEQTRKLAILAEQYDHSINEMLSTQALRLDEAQEAECQVLKMQLQQELELLNAYQSKIKMQAEAQHDRELRELEQRVSLRRALLEQKIEEEMLALQNERTERIRSLLERQAREIEAFDSESMRLGFSNMVLSNLSPEAFSHSYPGASGWSHNPTGGPGPHWGHPMGGPPQAWGHPMQGGPQPWGHPSGPMQGVPRGSSMGVRNSPQALRRTASGGRTEQGMSRSTSVTSQISNGSHMSYT

SEQ ID NO: 1172 - DNA, 3236 bp, Rattus norvegicus
  misc_feature (1)..(3236): n=a, c, g or t
  ref <308>: DATABASE ACCESSION NUMBER: EMBL / AF085693
  ref <309>: DATABASE ENTRY DATE: 2000-03-03
gcccgcgccccccacgctggcccagagggctgcggccgcttcgccgctgaggatgtcccggaaggggccgcgagcggaggtgtgtgcggactgcagcgcccctgaccctggctgggcatctatcagcagaggtgtgctggtttgtgacgagtgctgcagtgtgcaccggagcctgggacgacacatctccattgtcaaacaccttcgccacagcgcctggcctcctacgctgctacagatggtgcacacgcttgccagcaacggggccaactctatctgggagcattccctgctggaccctgcacaagtgcaaagtggccggcgcaaagccaacccccaagacaaagtccaccccatcaagtcagagttcatcagggcaaagtaccagatgctggcgtttgtgcacaagcttccctgccgtgatgatgatggggtcaccgccaaagacctcagcaagcaactgcactcgagtgtgcgaacaggcaacctggagacctgtctgcgcctgctttccctgggtgcccaggccaacttcttccacccagaaaagggcactacacctctacacgtggctgccaaggcagggcagacactgcaggctgagctgctagtagtgtatggggctgacccaggctcccctgatgtcaatggccgcacacccattgactatgccaggcaggcggggcaccatgaactggcagaaaggctagttgagtgccagtatgagctcactgaccggttggccttctacctctgtggacggaagcctgatcacaagaatgggcattacatcataccacagatggctgacagatctcggcaaaagtgcatgtctcagagtttggatctgtctgaattggccaaagctgccaagaagaagctacaagcactcagcaaccggctctttgaggagctcgccatggatgtgtatgacgaagtggaccggagagaaaatgatgcagtgtggctagctacccagaatcatagcaccctggtgacagaacgcagtgctgtgcccttcctgccagtcaaccctgaatactcagccactcggaatcagggacgacagaaattggctcgttttaatgcccgagagtttgccaccttgatcatcgacatcctcagtgaggccaaacggaggcagcagggcaagagtctgagcagccccacagacaacctcgagctgtctgcacggaaccaaagtgacctggacgaccagcacgactacgatagtgtggcttctgacgaagacacagaccaggagcccttgcccagtgctggcgccacgcggaacaatcgtgccaggagcatggactcctcagatctgtcggatggggctgtgacgctgcaggagtacctggagctgaagaaggctctggctacctccgaggccaaagtgcagcagctcatgaaagtcaacagcagtctgagtgacgagcttcggaagctgcagagggagatccacaaactgcaggcagagaacctgcagctccggcagccaccaggaccagtgcctgtaccctcacttcccagtgaacgggcagaacacacactcatgggccctggtggaagtacccatcgcagggaccgccaggccttctctatgtatgagccaggctccgccctgaagccctttggaggtgcacctggggatgagctcgccacacggctccagcctttccacagcacagagctggaagatgatgccatctattcagtacatgtccctgctggcctttaccggatccggaagggggtgtctgcctcttctgtgaccttcactccctcctccccactgctgtcaagctcccaagaaggaagtcgccatgcgagcaagctttcacgccacggcagtggcgcagagagtgactatgagaacacacagagtggagagcctctgctgggacttgaagggaagcgattcctagagctgagcaaggaggatgagctgcacgctgagctggagagcttagatggagacccagaccccgggctccccagcacagaagatgtcatcctaaagacagagcaggtcaccaagaacattcaggagctattgcgggcagcccaggagttcaaacatgacagctttgtgccctgttcagaaaagatccatttggctgtgactgagatggcctctctcttcccaaagaggccagccctggagcctgtgcgcagttcactgcggctgctcaacgccagcgcctaccggctgcagagtgaatgccggaagacagtgcctccagaacctggcgcccctgtggacttccagctactgactcagcaggtgatccagtgcgcctatgacatcgccaaggctgccaagcagctggtcaccatcaccacccgagagaagaaacagtgaccactttccctgcccttacccacaccctgggacctcactggccatgggagctgggccactccagacactaacccacccccaacagagccactggcacaagtgcccttagtgccaccattctcctctggcatccaggtgccctggtgtccacacccccttaagccccaaggatgggaatgtgaggtgacaggaccatctgtcccccacattccacgcccctccctctgtacatagcatccctgccctgctgatacgcaggagcctcaaggagtccctcccagctcttcacctgccttccagggccccctcagcaaagggtgggacagggacactccaagtggggcagccccgcctactgcaccctatccccatgagccagttcagccctggggggtcgagcagaggcaccccctcctttgtgcattatctntgggtgtntntgccccgtagccagcagcccccccgctgctctttcatgacaaatggcccctgccagagcacaggccccaacttgtgtgccagggtccccagcagcaaacactggaacgtctttctctcccctaccccttaattttaactttgtggtaactgagtgtccctgcgttcttacaactgagtgtgtgagcggcagtgccgtgccagagacctggtccacctggagctctgaggggcaggggaaccagagtagtgggaccagcattggaagtcagcttccctctacccaacctgggacggggactgtcagggtcaccagctgtggtccagttgctacccctacttgtatccctatcctataaacttaaaaggaaaaccacttccctccatctctccccatcccctgtgggaagtgtgctgaccaggcagaggacag

SEQ ID NO: 1173 - protein, 770 aa, Rattus norvegicus
  ref <308>: DATABASE ACCESSION NUMBER: SWISS-Prot / Q9Z272
  ref <309>: DATABASE ENTRY DATE: 2002-06-15
MSRKGPRAEVCADCSAPDPGWASISRGVLVCDECCSVHRSLGRHISIVKHLRHSAWPPTLLQMVHTLASNGANSIWEHSLLDPAQVQSGRRKANPQDKVHPIKSEFIRAKYQMLAFVHKLPCRDDDGVTAKDLSKQLHSSVRTGNLETCLRLLSLGAQANFFHPEKGTTPLHVAAKAGQTLQAELLVVYGADPGSPDVNGRTPIDYARQAGHHELAERLVECQYELTDRLAFYLCGRKPDHKNGHYIIPQMADRSRQKCMSQSLDLSELAKAAKKKLQALSNRLFEELAMDVYDEVDRRENDAVWLATQNHSTLVTERSAVPFLPVNPEYSATRNQGRQKLARFNAREFATLIIDILSEAKRRQQGKSLSSPTDNLELSARNQSDLDDQHDYDSVASDEDTDQEPLPSAGATRNNRARSMDSSDLSDGAVTLQEYLELKKALATSEAKVQQLMKVNSSLSDELRKLQREIHKLQAENLQLRQPPGPVPVPSLPSERAEHTLMGPGGSTHRRDRQAFSMYEPGSALKPFGGAPGDELATRLQPFHSTELEDDAIYSVHVPAGLYRIRKGVSASSVTFTPSSPLLSSSQEGSRHASKLSRHGSGAESDYENTQSGEPLLGLEGKRFLELSKEDELHAELESLDGDPDPGLPSTEDVILKTEQVTKNIQELLRAAQEFKHDSFVPCSEKIHLAVTEMASLFPKRPALEPVRSSLRLLNASAYRLQSECRKTVPPEPGAPVDFQLLTQQVIQCAYDIAKAAKQLVTITTREKKQ

SEQ ID NO: 1174 - DNA, 497 bp, Homo sapiens
  ref <308>: DATABASE ACCESSION NUMBER: EMBL / BG984848
  ref <309>: DATABASE ENTRY DATE: 2001-06-14
aagactctcgaggatccccaccgagatggcctccctcttcccaaaggtacaggtttcaaagagaggaccaggagtgggagggcctcgagctgggtcaggcgtggagaatcccatctgatcgctacctgggtggagacacagacaaactgggccctgatctcagctggcggcttaaagtccaaggtccagcctcactcctgccccctccagaggccagccctggagccagtgcggagctcactgcggctgctcaacgccagcgcctaccggctgcagagtgagtgccggaagacagtgcccccagagcccggcgccccagtggacttccagctgccgactcagcaggtgatccagtgcgcctatgacatcgccaaggctgccaagcagctggtcaccatcaccacccgagagaagaagcagtgacctctctccccacaccctcacctgcaccctaggacctcactggccataggagctgggccactccagtctctggg

SEQ ID NO: 1175 - protein, 761 aa, Homo sapiens
  ref <308>: DATABASE ACCESSION NUMBER: Refseq / NP_054749
  ref <309>: DATABASE ENTRY DATE: 2000-11-02
MSRKGPRAEVCADCSAPDPGWASISRGVLVCDECCSVHRSLGRHISIVKHLRHSAWPPTLLQMVHTLASNGANSIWEHSLLDPAQVQSGRRKANPQDKVHPIKSEFIRAKYQMLAFVHKLSCRDDDGVTAKDLSKQLHSSVRTGNLETCLRLLSLGAQANFFHPEKGTTPLHVAAKAGQTLQAELLVVYGADPGSPDVNGRTPIDYARQAGHHELAERLVECQYELTDRLAFYLCGRKPDHKNGHYIIPQMADSLDLSELAKAAKKKLQALSNRLFEELAMDVYDEVDRRENDAVWLATQNHSTLVTERSAVPFLPVNPEYSATRNQGRQKLARFNAREFATLIIDILSEAKRRQQGKSLSSPTDNLELSLRSQSDLDDQHDYDSVASDEDTDQEPLRSTGATRSNRARSMDSSDLSDGAVTLQEYLELKKALATSEAKVQQLMKVNSSLSDELRRLQREIHKLQAENLQLRQPPGPVPTPPLPSERAEHTPMAPGGSTHRRDRQAFSMYEPGSALKPFGGPPGDELTTRLQPFHSTELEDDAIYSVHVPAGLYRIRKGVSASAVPFTPSSPLLSCSQEGSRHTSKLSRHGSGADSDYENTQSGDPLLGLEGKRFLELGKEEDFHPELESLDGDLDPGLPSTEDVILKTEQVTKNIQELLRAAQEFKHDSFVPCSEKIHLAVTEMASLFPKRPALEPVRSSLRLLNASAYRLQSECRKTVPPEPGAPVDFQLLTQQVIQCAYDIAKAAKQLVTITTREKKQ

SEQ ID NO: 1176 - DNA, 3236 bp, Rattus norvegicus; identical to SEQ ID NO: 1172
  misc_feature (1)..(3236): n=a, c, g or t
  ref <308>: DATABASE ACCESSION NUMBER: EMBL / AF085693
  ref <309>: DATABASE ENTRY DATE: 2000-03-03

SEQ ID NO: 1177 - protein, 770 aa, Rattus norvegicus; identical to SEQ ID NO: 1173
  ref <308>: DATABASE ACCESSION NUMBER: SWISS-Prot / Q9Z272
  ref <309>: DATABASE ENTRY DATE: 2002-06-15

SEQ ID NO: 1178 - DNA, 497 bp, Homo sapiens; identical to SEQ ID NO: 1174
  ref <308>: DATABASE ACCESSION NUMBER: EMBL / BG984848
  ref <309>: DATABASE ENTRY DATE: 2001-06-14

SEQ ID NO: 1179 - protein, 761 aa, Homo sapiens; identical to SEQ ID NO: 1175
  ref <308>: DATABASE ACCESSION NUMBER: Refseq / NP_054749
  ref <309>: DATABASE ENTRY DATE: 2000-11-02

SEQ ID NO: 1180 - DNA, 2335 bp, Rattus norvegicus
  ref <308>: DATABASE ACCESSION NUMBER: EMBL / AF086624
  ref <309>: DATABASE ENTRY DATE: 1998-10-28
gtccccaagctccaccagcccttggtgaaccgacagggagcgtccggctttcccagcaccactttgccagactcaaaacagccacaccgcaaagtgagcctcgggcggaaggaggcggagctacaggcggccccgcctccgcggagggatacgtgtctccgcggtccaaaaccccggggcgaggcggccggggcgtgtgagccgctcggccagctgccgtctacgggcttccgcgcggccaccgggcaactgcgccgcgcggctgccccactgagcgctcggcctcggggccgtgggatccgccgcgctgtctgcggtcaggaagaccgccctcccgcgtccgtgccggacgggtcagaggcggcgccgcacgcgaggccacccgcgatgctgctgtccaagttcggctccctggcgcacctctgcgggcctggcggcgtggaccacctcccagtgaagatcctacagccagccaaggcggacaaggagagcttcgagaaggtgtaccaggtgggcgccgtgctcggcagcggcggcttcggcacggtctacgcgggcagccgcatcgccgacggactcccggtggctgtgaagcacgtggtgaaggagcgggtgaccgagtggggcagtctcggcggaatggccgtgcccctggaggtggtgctgctgcgcaaggtgggcgcggcgggcggcgcgcgcggcgtcatccgcctgctggactggttcgagcggcccgacggcttcctgctggtgctggagcgacccgagccggcacaggacctcttcgacttcatcactgaacgcggcgccctggacgagcctctggctcgtcgcttcttcgcgcaggtgctcgccgctgtgcggcactgccacaattgtggggtcgtgcaccgcgacatcaaggacgagaacctgctggtggacttgcgctcgggcgagctgaagctcatcgacttcggctcgggcgcggtgctcaaggacacggtctacactgactttgatggcacccgtgtgtacagccccccagagtggatccggtatcatcgatatcacgggcggtctgccactgtgtggtctctgggtgtactgctctacgacatggtgtgtggggacattccctttgagcaggatgaggagatcttgcgcggcaggctctttttccggaggagggtctccccagagtgccagcagcttattgagtggtgtctctccctgcggccctcagagaggccctcgctggaccaaattgctgcccatccctggatgctggggacagagggcagcgttccagagaactgtgaccttcggctctgtgccctggatactgatgacggagccagtaccacttccagcagtgagagcttgtgaggaggaggaggggcctggactccacactgggggcctgggctcagcctagccagccctctcccagaatgaacattttctgcctgggatgtctcctgcaaaagcagtgacctctgacccctggtgacctttgctctcggcaccgggcctgtttcctttgctttgagtgcctttttgaacgctgctccacagggcctgggttttcttgagctcttctgtccaaagatggctgcgggctaagcaaggtcccgcctgccctgggtggatacttgaacccgagaccctaccctgctgctccatcttgcggcagccttcctgaccaagtgtgtttgacatggagcgccctgtggtgcccacctccaaccctccagtctcctggtcttcgtctgggcatgtctgcacaagcaatgcaacgctgggccactgctgcccgcctgcctccctggcaccgcacgcaacgagcgtgccacggtctcttatttatggtgtgatcaccctggagggcgcccctgccctgctggggctatttattgtttaatttatttgctgaggttacttcctccaagcaaccaccttctccaggcccctggggtgttcaggaaagccaagggtggccgttcagtccacagacggcatcctggttcctgcacctgcagtaggtccctaaccccatgtttgtgggaggaggaatttgtacagtggctaatttaaggggagtgggagaccctgtcaccctgggcactctgcgctggggagggggtttaaattattgaccttgtacagtctgcttgctggctctgaaagctggggtgggggacagagtctcaagcccttaatttattttagcaactgtgttctgtgaccctggtgtgagtaggcatcaggggtggggttgtataagttcaaaagtgtgaaatgtctggagatcatattttttatacaggtatttcaattaaatgttttggtatat

SEQ ID NO: 1181 - protein, 455 aa, Rattus norvegicus
  ref <308>: DATABASE ACCESSION NUMBER: SWISS-Prot / AAC68900
  ref <309>: DATABASE ENTRY DATE: 2003-02-01
MPKLHQPLVNRQGASGFPSTTLPDSKQPHRKVSLGRKEAELQAAPPPRRDTCLRGPKPRGEAAGACEPLGQLPSTGFRAATGQLRRAAAPLSARPRGRGIRRAVCGQEDRPPASVPDGSEAAPHARPPAMLLSKFGSLAHLCGPGGVDHLPVKILQPAKADKESFEKVYQVGAVLGSGGFGTVYAGSRIADGLPVAVKHVVKERVTEWGSLGGMAVPLEVVLLRKVGAAGGARGVIRLLDWFERPDGFLLVLERPEPAQDLFDFITERGALDEPLARRFFAQVLAAVRHCHNCGVVHRDIKDENLLVDLRSGELKLIDFGSGAVLKDTVYTDFDGTRVYSPPEWIRYHRYHGRSATVWSLGVLLYDMVCGDIPFEQDEEILRGRLFFRRRVSPECQQLIEWCLSLRPSERPSLDQIAAHPWMLGTEGSVPENCDLRLCALDTDDGASTTSSSESL

SEQ ID NO: 1182 - DNA, 811 bp, Homo sapiens
  misc_feature (1)..(811): n=a, c, g or t
  ref <308>: DATABASE ACCESSION NUMBER: EMBL / AL526992
  ref <309>: DATABASE ENTRY DATE: 2001-02-11
ggaccgacgcgacacgccgtgcgcctccgcggctgcgctacgaaaacgagtcccggagcggccccgcgcccgccgcacccggccctcgcccgcccgaagacaggcgccaagctgccccgccgtctccccagctagcgcccggccgccgccgcctcgcgggccccgggcggaagggggcggggtcccgattcgccccgcccccgcggagggatacgcggcgccgcggcccaaaacccccgggcgaggcggccggggcgggtgaggcgctccgcctgctgcgcgtctacgcggtccccgcgggccttccgggcccactgcgccgcgcggaccgcctcgggctcggacggccggtgtccccggcgcgccgctcgcccggatcggccgcggcttcggcgcctggggctcggggctccggggaggccgtcgcccgcgatgctgctctccaagttcggctccctggcgcacctctgcgggcccggcggcgtggaccacctcccggtgaagatcctgcagccagccaaggcggacaaggagagcttcgagaaggcgtaccaggtgggcgccgtgctgggtagcggcggcttcggcacggtctacgcgggtagccgcatcgccgacgggctcccggtggctgtgaagcacgtggtgaaggagcgggtgaccgagtggggcagcctgggcggcgcgaccgtgcccctggaggtggtgctgctgcgcaaggtgggcgcggcgggcggcgcgcgcggcgtcatccgcctgctggactggttcgagcggcccgacggcttcctgctggtgctggagcggccna

SEQ ID NO: 1183 - protein, 313 aa, Homo sapiens
  ref <308>: DATABASE ACCESSION NUMBER: SWISS-Prot / AAA60089
  ref <309>: DATABASE ENTRY DATE: 2002-06-15
MLLSKINSLAHLRAAPCNDLHATKLAPGKEKEPLESQYQVGPLLGSGGFGSVYSGIRVSDNLPVAIKHVEKDRISDWGELPNGTRVPMEVVLLKKVSSGFSGVIRLLDWFERPDSFVLILERPEPVQDLFDFITERGALQEELARSFFWQVLEAVRHCHNCGVLHRDIKDENILIDLNRGELKLIDFGSGALLKDTVYTDFDGTRVYSPPEWIRYHRYHGRSAAVWSLGILLYDMVCGDIPFEHDEEIIRGQVFFRQRVSSECQHLIRWCLALRPSDRPTFEEIQNHPWMQDVLLPQETAEIHLHSLSPGPSK

SEQ ID NO: 1184 - DNA, 1234 bp, Rattus norvegicus
  ref <308>: DATABASE ACCESSION NUMBER: EMBL / AF086758
  ref <309>: DATABASE ENTRY DATE: 1999-10-29
gttctttctaccctcactcctgtagctcctacccccaatgctacagacccagtccagaccaccgcaagcctcagccacactgtcacaaacttgacacacactgtcacaagcgctaccaacaagcccatggcctctactctcatgaccgcaggccctacagccagtgccacaggtccagtgcagactaccactagccccacccacaccaacacctactacctgcgcaccttcggccacaacaccatggacgcggtgcccaggatcgaccactaccggcacacggccgcgcagctgggcgagaagctgctccggcccagcctggcagagctccacgatgagctggaaaaggaaccttttgaggatggctttgcgaatggagaagaaagtactccaaccagagatgctgtggtcacatacactgccgaaagtaaaggagttgtaaagtttggctggatcaagggtgtattagtacgatgtatgttgaacatttggggtgtgatgctctttattcgattgtcatggattgtgggtcaagctggaataggtctctccgttcttgtaataccaatggccactgttgtgacatcccttcccggattgtctacttcaccaatatctaccaatgggatcctgacaggaggaggaactttctctttaatctccaagtctggggcccaaatttggcggtgcaattggcttgatcttccctttgcccaatgcaggggcaggtggaaagaaagtggtgggattcacagagacggtaaggtggagctgcttaaggaacattccaaacttatgatagatgaattcaatgacatccgaattattggagccataacagtggtggtttttgtgggcatctcagtggccggaatggagtgggaaacaaaggctcagatggtcattctggtgattcttcttctggccatcgctgacttcgtcatagggacatttatctcactggacagcaagaagcccaagggtttctttggctataaatctgaaatatttagtgagaactttggaccggattttcgagaagaagagactttcttttctgtattcgccatcttttttcctgctgcaactggtattctagctggggcgaacatctcgggtgaccttgcagatcctcagtcagccatacccaaaggaacgctcttagccattttgattacgacagtggtttacataggaatcgcagtgtctgtaggttcgtgtgctgttcgggatg

SEQ ID NO: 1185 - protein, 369 aa, Rattus norvegicus
  ref <308>: DATABASE ACCESSION NUMBER: SWISS-Prot / AAD09008
  ref <309>: DATABASE ENTRY DATE: 2003-02-01
MASTLMTAGPTASATGPVQTTTSPTHTNTYYLRTFGHNTMDAVPRIDHYRHTAAQLGEKLLRPSLAELHDELEKEPFEDGFANGEESTPTRDAVVTYTAESKGVVKFGWIKGVLVRCMLNIWGVMLFIRLSWIVGQAGIGLSVLVIPMATVVTSLPGLSTSPISTNGILTGGGTFSLISKSGAQIWRCNWLDLPFAQCRGRWKESGGIHRDGKVELLKEHSKLMIDEFNDIRIIGAITVVVFVGISVAGMEWETKAQMVILVILLLAIADFVIGTFISLDSKKPKGFFGYKSEIFSENFGPDFREEETFFSVFAIFFPAATGILAGANISGDLADPQSAIPKGTLLAILITTVVYIGIAVSVGSCAVRD

SEQ ID NO: 1186 - DNA, 4098 bp, Homo sapiens
  ref <308>: DATABASE ACCESSION NUMBER: Refseq / NM_001046
  ref <309>: DATABASE ENTRY DATE: 2000-10-31
ggtggcctctgtggccgtccaggctagcggcggcccgcaggcggcggggagaaagactctctcacctggtcttgcggctgtggccaccgccggccaggggtgtggagggcgtgctgccggagacgtccgccgggctctgcagttccgccgggggtcgggcagctatggagccgcggcccacggcgccctcctccggcgccccgggactggccggggtcggggagacgccgtcagccgctgcgctggccgcagccagggtggaactgcccggcacggctgtgccctcggtgccggaggatgctgcgcccgcgagccgggacggcggcggggtccgcgatgagggccccgcggcggccggggacgggctgggcagacccttggggcccaccccgagccagagccgtttccaggtggacctggtttccgagaacgccgggcgggccgctgctgcggcggcggcggcggcggcggcagcggcggcggctggtgctggggcgggggccaagcagacccccgcggacggggaagccagcggcgagagcgagccagctaaaggcagcgaggaagccaagggccgcttccgcgtgaacttcgtggacccagctgcctcctcgtcggctgaagacagcctgtcagatgctgccggggtcggagtcgacgggcccaacgtgagcttccagaacggcggggacacggtgctgagcgagggcagcagcctgcactccggcggcggcggcggcagtgggcaccaccagcactactattatgatacccacaccaacacctactacctgcgcaccttcggccacaacaccatggacgctgtgcccaggatcgatcactaccggcacacagccgcgcagctgggcgagaagctgctccggcctagcctggcggagctccacgacgagctggaaaaggaaccttttgaggatggctttgcaaatggggaagaaagtactccaaccagagatgctgtggtcacgtatactgcagaaagtaaaggagtcgtgaagtttggctggatcaagggtgtattagtacgttgtatgttaaacatttggggtgtgatgcttttcattagattgtcatggattgtgggtcaagctggaataggtctatcagtccttgtaataatgatggccactgttgtgacaactatcacaggattgtctacttcagcaatagcaactaatggatttgtaagaggaggaggagcatattatttaatatctagaagtctagggccagaatttggtggtgcaattggtctaatcttcgcctttgccaacgctgttgcagttgctatgtatgtggttggatttgcagaaaccgtggtggagttgcttaaggaacattccatacttatgatagatgaaatcaatgatatccgaattattggagccattacagtcgtgattcttttaggtatctcagtagctggaatggagtgggaagcaaaagctcagattgttcttttggtgatcctacttcttgctattggtgatttcgtcataggaacatttatcccactggagagcaagaagccaaaagggttttttggttataaatctgaaatatttaatgagaactttgggcccgattttcgagaggaagagactttcttttctgtatttgccatcttttttcctgctgcaactggtattctggctggagcaaatatctcaggtgatcttgcagatcctcagtcagccatacccaaaggaacactcctagccattttaattactacattggtttacgtaggaattgcagtatctgtaggttcttgtgttgttcgagatgccactggaaacgttaatgacactatcgtaacagagctaacaaactgtacttctgcagcctgcaaattaaactttgatttttcatcttgtgaaagcagtccttgttcctatggcctaatgaacaacttccaggtaatgagtatggtgtcaggatttacaccactaatttctgcaggtatattttcagccactctttcttcagcattagcatccctagtgagtgctcccaaaatatttcaggctctatgtaaggacaacatctacccagctttccagatgtttgctaaaggttatgggaaaaataatgaacctcttcgtggctacatcttaacattcttaattgcacttggattcatcttaattgctgaactgaatgttattgcaccaattatctcaaacttcttccttgcatcatatgcattgatcaatttttcagtattccatgcatcacttgcaaaatctccaggatggcgtcctgcattcaaatactacaacatgtggatatcacttcttggagcaattctttgttgcatagtaatgttcgtcattaactggtgggctgcattgctaacatatgtgatagtccttgggctgtatatttatgttacctacaaaaaaccagatgtgaattggggatcctctacacaagccctgacttacctgaatgcactgcagcattcaattcgtctttctggagtggaagaccacgtgaaaaactttaggccacagtgtcttgttatgacaggtgctccaaactcacgtccagctttacttcatcttgttcatgatttcacaaaaaatgttggtttgatgatctgtggccatgtacatatgggtcctcgaagacaagccatgaaagagatgtccatcgatcaagccaaatatcagcgatggcttattaagaacaaaatgaaggcattttatgctccagtacatgcagatgacttgagagaaggtgcacagtatttgatgcaggctgctggtcttggtcgtatgaagccaaacacacttgtccttggatttaagaaagattggttgcaagcagatatgagggatgtggatatgtatataaacttatttcatgatgcttttgacatacaatatggagtagtggttattcgcctaaaagaaggtctggatatatctcatcttcaaggacaagaagaattattgtcatcacaagagaaatctcctggcaccaaggatgtggtagtaagtgtggaatatagtaaaaagtccgatttagatacttccaaaccactcagtgaaaaaccaattacacacaaagttgaggaagaggatggcaagactgcaactcaaccactgttgaaaaaagaatccaaaggccctattgtgcctttaaatgtagctgaccaaaagcttcttgaagctagtacacagtttcagaaaaaacaaggaaagaatactattgatgtctggtggctttttgatgatggaggtttgaccttattgataccttaccttctgacgaccaagaaaaaatggaaagactgtaagatcagagtattcattggtggaaagataaacagaatagaccatgaccggagagcgatggctactttgcttagcaagttccggatagacttttctgatatcatggttctaggagatatcaataccaaaccaaagaaagaaaatattatagcttttgaggaaatcattgagccatacagacttcatgaagatgataaagagcaagatattgcagataaaatgaaagaagatgaaccatggcgaataacagataatgagcttgaactttataagaccaagacataccggcagatcaggttaaatgagttattaaaggaacattcaagcacagctaatattattgtcatgagtctcccagttgcacgaaaaggtgctgtgtctagtgctctctacatggcatggttagaagctctatctaaggacctaccaccaatcctcctagttcgtgggaatcatcagagtgtccttaccttctattcataaatgttctatacagtggacagccctccagaatggtacttcagtgcctagtgtagtaacctgaaatcttcaatgacacattaacatcacaatggcgaatggtgacttttctttcacgatttcattaatttgaaagcacacaggaaagcttgctccattgataacgtgtatggagacttcggttttagtcaattccatatctcaatcttaatggtgattcttctctgttgaactgaagtttgtgagagtagttttcctttgctacttgaatagcaataaaagcgtgttaactttttgg

SEQ ID NO: 1187 - protein, 1212 aa, Homo sapiens
  ref <308>: DATABASE ACCESSION NUMBER: SWISS-Prot / P55011
  ref <309>: DATABASE ENTRY DATE: 1997-11-01
MEPRPTAPSSGAPGLAGVGETPSAAALAAARVELPGTAVPSVPEDAAPASRDGGGVRDEGPAAAGDGLGRPLGPTPSQSRFQVDLVSENAGRAAAAAAAAAAAAAAAGAGAGAKQTPADGEASGESEPAKGSEEAKGRFRVNFVDPAASSSAEDSLSDAAGVGVDGPNVSFQNGGDTVLSEGSSLHSGGGGGSGHHQHYYYDTHTNTYYLRTFGHNTMDAVPRIDHYRHTAAQLGEKLLRPSLAELHDELEKEPFEDGFANGEESTPTRDAVVTYTAESKGVVKFGWIKGVLVRCMLNIWGVMLFIRLSWIVGQAGIGLSVLVIMMATVVTTITGLSTSAIATNGFVRGGGAYYLISRSLGPEFGGAIGLIFAFANAVAVAMYVVGFAETVVELLKEHSILMIDEINDIRIIGAITVVILLGISVAGMEWEAKAQIVLLVILLLAIGDFVIGTFIPLESKKPKGFFGYKSEIFNENFGPDFREEETFFSVFAIFFPAATGILAGANISGDLADPQSAIPKGTLLAILITTLVYVGIAVSVGSCVVRDATGNVNDTIVTELTNCTSAACKLNFDFSSCESSPCSYGLMNNFQVMSMVSGFTPLISAGIFSATLSSALASLVSAPKIFQALCKDNIYPAFQMFAKGYGKNNEPLRGYILTFLIALGFILIAELNVIAPIISNFFLASYALINFSVFHASLAKSPGWRPAFKYYNMWISLLGAILCCIVMFVINWWAALLTYVIVLGLYIYVTYKKPDVNWGSSTQALTYLNALQHSIRLSGVEDHVKNFRPQCLVMTGAPNSRPALLHLVHDFTKNVGLMICGHVHMGPRRQAMKEMSIDQAKYQRWLIKNKMKAFYAPVHADDLREGAQYLMQAAGLGRMKPNTLVLGFKKDWLQADMRDVDMYINLFHDAFDIQYGVVVIRLKEGLDISHLQGQEELLSSQEKSPGTKDVVVSVEYSKKSDLDTSKPLSEKPITHKVEEEDGKTATQPLLKKESKGPIVPLNVADQKLLEASTQFQKKQGKNTIDVWWLFDDGGLTLLIPYLLTTKKKWKDCKIRVFIGGKINRIDHDRRAMATLLSKFRIDFSDIMVLGDINTKPKKENIIAFEEIIEPYRLHEDDKEQDIADKMKEDEPWRITDNELELYKTKTYRQIRLNELLKEHSSTANIIVMSLPVARKGAVSSALYMAWLEALSKDLPPILLVRGNHQSVLTFYS

SEQ ID NO: 1188 - DNA, 2703 bp, Rattus norvegicus
  ref <308>: DATABASE ACCESSION NUMBER: EMBL / AF087431
  ref <309>: DATABASE ENTRY DATE: 2000-07-06
cgcccgcatggcccggggcgagaggcgacggcgcgctgcggccgcagagggggcgcgcccgctggagagggcgcggggtgcgggccggcgggatggcagagccggcggggcgcgcggctcggcgggcggcgcggccctggccgtggtggttttggcgctggccttcggcctgtcggggcgctgggtgctggcgtggctgggtgtgcgccgcgcgctcacactgcaccccgctccgtcagcgctaccgccggactcctccagtcctgccgtggccccggaatttttttggggtacctatcgcccacacgtctatttcggcatgaagactcgcagccccaaaccactgctcacgggactgatgtgggcgcagcaaggcgccaccccggggacccctcctaagctcaggcacacatgcgaacaaggagacggcgtgggtccctatggctgggagttccatgatggactctcctttggtcggcaacatatctatgatggggccttaaggctcaccactgagttcgtcaagagatctgggggtcatcacggaggggattggagctggagagttaccgtagagcctcaggcctcaggtacaccttccttccctttggtctccctgttcttctacgtggtaacagatgggcaagaggtcctactaccagaggttggagccaaaggacagttgaagttcatcagtgggcacaccagtgaacttggtgacttccgcctcacacttctgccaccaaccactccaggagacactgtccctaagcatggcagctacaatgtcttctggtcctccaacccagggctgcctctgctcacagacatggtaaagagccacctaaacagctggtttcatcaccggcccccaggagcctctccggaacgataccttggcttgcctggatctcttaagtgggaagagagaggccctagtgggcaagggcagttcttggtccagcaggtgacactgaaagcccctttctctgtggagtttgtgtttgaatctggcagtgccaggacaggaagagaccaagcctctgagcagctggtaggtggccaactgacccgggccctggagagccatgctgcagcattcaaggagcgttttgagaggaccttccagctaaaggagaagggcctgagccctgaggagcaggctctgggtcaggttgccctcagtggcctacttggtgggattggttacttctatggacagggtttggtgttgccagacactggcatggaagggtctgaacagaaaatggacccttccctatttccgcctgtcccccttttctctggggtcccttcccggtcattcttcccacgaggcttcctctgggatgaaggctttcaccagctagtggtccagcgatgggatccccacctcacccgggaggccctaggacactggctggggctgctcaatgctgacggttggattgggcgagagcagattctgggggatgaggccagagcccgagtgcccccggaattcctagtgcaacgtgcagcccatgccaaccctccaaccctgctcctgccagtcatacacatgctagaaggccgggcccctgaggacttggccttcctgcgcagggctttcccccgcttgcatgcctggttctcttggctccatcaaagtcaggcagggccagtgccactttcctaccgctggcggggcagggatctagctttgcctaccctacttaaccccaagacactgccctcgggcctggatgactaccccagggcctcacatccttctgcagcagagcggcacctggacctgcggtgctgggtgacattgggtgcccgggtgctgtcacagcttgcagaagagcttggggagactgaagctgctgcagagttgggcccattggctgcctctctagaagcagctggaagtctcgatgagctgcactgggctcctgagctgggtgtctttgccgactttgggaaccacacaaaagcagtacagctcaagtctaggcccccacaggggctggttagggtggtaggcaggcctccagctcgactgcagtatgtggatgccctgggctatgtctctctttttcctttgctgctacaactgctggagcccagctcaccccgcttgggacccctgctggacgttctagctgatagccgccatctctggagcccctttgggttgcgctccctttcagcctccagtctcttttataaacagcgaaatacggaacacgatccaccttactggcgaggtgcggtgtggctgaatatcaactacctggctttgggggcactacaccactatgggcgtgtggagggtcctcacaaggttcaggctgccaaactctaccgtgaacttcgggccaatgtagtaagcaacgtacggcagcaataccaggctacagggtttctgtgggaacagtacagtgaccaggatgggcggggcatgggctgccgccccttccaaggatggaccagtcttgttttactgatcatggctgaagagtactagtgggacagaaggaaagctaggcctttgtgtcacttggaatatgcagacaagggcttgggtttctggtctcagtgtttcagatcccgtaagctcatctcaggtgtctccttattgtcatcccatacagctctggggtgaacgtgaactcaaagagtctatttttctaaataaactggaaaacaacggaattc

SEQ ID NO: 1189 - protein, 834 aa, Rattus norvegicus
  ref <308>: DATABASE ACCESSION NUMBER: SWISS-Prot / AAC36477
  ref <309>: DATABASE ENTRY DATE: 2002-06-01
MARGERRRRAAAAEGARPLERARGAGRRDGRAGGARGSAGGAALAVVVLALAFGLSGRWVLAWLGVRRALTLHPAPSALPPDSSSPAVAPEFFWGTYRPHVYFGMKTRSPKPLLTGLMWAQQGATPGTPPKLRHTCEQGDGVGPYGWEFHDGLSFGRQHIYDGALRLTTEFVKRSGGHHGGDWSWRVTVEPQASGTPSFPLVSLFFYVVTDGQEVLLPEVGAKGQLKFISGHTSELGDFRLTLLPPTTPGDTVPKHGSYNVFWSSNPGLPLLTDMVKSHLNSWFHHRPPGASPERYLGLPGSLKWEERGPSGQGQFLVQQVTLKAPFSVEFVFESGSARTGRDQASEQLVGGQLTRALESHAAAFKERFERTFQLKEKGLSPEEQALGQVALSGLLGGIGYFYGQGLVLPDTGMEGSEQKMDPSLFPPVPLFSGVPSRSFFPRGFLWDEGFHQLVVQRWDPHLTREALGHWLGLLNADGWIGREQILGDEARARVPPEFLVQRAAHANPPTLLLPVIHMLEGRAPEDLAFLRRAFPRLHAWFSWLHQSQAGPVPLSYRWRGRDLALPTLLNPKTLPSGLDDYPRASHPSAAERHLDLRCWVTLGARVLSQLAEELGETEAAAELGPLAASLEAAGSLDELHWAPELGVFADFGNHTKAVQLKSRPPQGLVRVVGRPPARLQYVDALGYVSLFPLLLQLLEPSSPRLGPLLDVLADSRHLWSPFGLRSLSASSLFYKQRNTEHDPPYWRGAVWLNINYLALGALHHYGRVEGPHKVQAAKLYRELRANVVSNVRQQYQATGFLWEQYSDQDGRGMGCRPFQGWTSLVLLIMAEEY

SEQ ID NO: 1190 - DNA, 2866 bp, Homo sapiens
ggaggcggaggcgcaggcgctggctggcaggtgtcgctaaccggacggtggtcgccagggcgagaggcgggagccggagaggtgaggcaggacccgggctccactgccgcctctccgagctcttgtgacgcggacctcagtgccaggatggctcggggcgagcggcggcgccgcgcagtgccggcagagggagtgcggacagccgagagggcggctcggggaggccccgggcgacgggacggccggggcggcgggccgcgtagcacggctggaggagtggctctggccgtcgtggtcctgtctttggccctgggtatgtcggggcgctgggtgctggcgtggtaccgtgcgcggcgggcggtcacgctgcactccgcgcctcctgtgttgcctgccgactcctccagccccgccgtggccccggacctcttctggggaacctaccgccctcacgtctacttcggcatgaagacccgcagcccgaagcccctcctcaccggactgatgtgggcgcagcagggcaccaccccggggactcctaagctcaggcacacgtgtgagcagggggacggtgtgggtccctatggctgggagttccacgacggcctctccttcgggcgccaacacatccaggatggggccttaaggctcaccactgagttcgtcaagaggcctgggggtcagcacggaggggactggagctggagagtgactgtagagcctcaggactcaggtacttctgccctccctttggtctccctgttcttctatgtggtgacagatggcaaggaagtcctactaccagaggttggggccaaggggcagttgaagtttatcagtgggcacaccagtgaacttggtgacttccgctttacacttttgccaccaaccagtccaggggatacagcccccaagtatggcagctacaatgtcttctggacctccaacccaggactgcccctgctgacagagatggtaaagagtcgcctaaatagctggtttcagcatcggcccccaggggccccccctgaacgctacctcggcttgccaggatccctgaagtgggaggacagaggtccaagtgggcaagggcaggggcagttcttgatacagcaggtgaccctgaaaattcccatttccatagagtttgtgtttgaatcaggcagtgcccaggcaggaggaaatcaagccctgccaagactggcaggcagtctactgacccaggccctggagagccatgctgaaggctttagagagcgctttgagaagaccttccagctgaaggagaagggcctgagctctggcgagcaggttttgggtcaggctgccctcagcggcctccttggtggaattggctacttctacggacaagggctggtattgccagacatcggggtggaagggtctgagcagaaggtggacccagccctctttccacccgtacctctttttacagcagtgccctcccggtcattcttcccacgaggcttcctttgggatgaaggctttcaccagctggtggttcagcggtgggatccctccctcacccgggaagcccttggccactggctggggctgctaaatgctgatggctggattgggagggagcagatactgggggatgaggcccgagcccgggtgcctccagaattcctagtacaacgagcagtccacgccaaccccccaaccctacttttgcctgtagcccatatgctagaggttggtgaccctgacgacttggctttcctccgaaaggccttgccccgcctgcatgcctggttttcctggctccatcagagccaggcaggcccactgccactatcttaccgctggcggggacgggaccctgccttaccaaccttactgaaccccaagaccctaccctctgggctggatgactacccccgggcttcacacccttcagtaaccgagcggcacctggacctgcgatgttgggtggcactgggtgcccgtgtgctgacgcggctggcagagcatctgggtgaggctgaggtagctgctgagctgggcccactggctgcctcactggaggcagcagagagcctggatgagctgcactgggccccagagctaggagtctttgcagactttgggaaccacacaaaagcagtacagctgaagcccaggccccctcaggggctcgttcgggtggtgggtcggccccaacctcaactgcagtatgtagatgctcttggctatgtcagtctttttcccttgctgctgcgactgctggaccccacctcatcccgccttgggcccctgctggacattctagccgacagccgccatctctggagcccctttggtttacgctcccttgcagcctccagctccttttatggccagcgcaattcagagcatgatcccccctactggcggggtgctgtgtggctcaatgtcaactacctggctttgggagcactccaccactatgggcatctggagggtcctcaccaggctcgggctgccaaactccacggtgagctccgtgccaacgtggtaggcaatgtatggcgccagtaccaggctacaggctttctttgggagcagtacagtgaccgcgatgggcgaggcatgggctgccgccctttccacggctggaccagccttgtcttactggccatggctgaagactactgaagggagggagaggaggggagccaagacactcatgccactctggctctgaagggacaaaggcttctggcttttgcccccagccccttggataccagtaattcaaaccttcctcatttcatctcaggtgtctccttgctgtcatcccacatagccctggggtgaatgtgaatccagagtctatttttctaaataaattggaaaaaac

SEQ ID NO: 1191 - protein, 837 aa, Homo sapiens
MARGERRRRAVPAEGVRTAERAARGGPGRRDGRGGGPRSTAGGVALAVVVLSLALGMSGRWVLAWYRARRAVTLHSAPPVLPADSSSPAVAPDLFWGTYRPHVYFGMKTRSPKPLLTGLMWAQQGTTPGTPKLRHTCEQGDGVGPYGWEFHDGLSFGRQHIQDGALRLTTEFVKRPGGQHGGDWSWRVTVEPQDSGTSALPLVSLFFYVVTDGKEVLLPEVGAKGQLKFISGHTSELGDFRFTLLPPTSPGDTAPKYGSYNVFWTSNPGLPLLTEMVKSRLNSWFQHRPPGAPPERYLGLPGSLKWEDRGPSGQGQGQFLIQQVTLKIPISIEFVFESGSAQAGGNQALPRLAGSLLTQALESHAEGFRERFEKTFQLKEKGLSSGEQVLGQAALSGLLGGIGYFYGQGLVLPDIGVEGSEQKVDPALFPPVPLFTAVPSRSFFPRGFLWDEGFHQLVVQRWDPSLTREALGHWLGLLNADGWIGREQILGDEARARVPPEFLVQRAVHANPPTLLLPVAHMLEVGDPDDLAFLRKALPRLHAWFSWLHQSQAGPLPLSYRWRGRDPALPTLLNPKTLPSGLDDYPRASHPSVTERHLDLRCWVALGARVLTRLAEHLGEAEVAAELGPLAASLEAAESLDELHWAPELGVFADFGNHTKAVQLKPRPPQGLVRVVGRPQPQLQYVDALGYVSLFPLLLRLLDPTSSRLGPLLDILADSRHLWSPFGLRSLAASSSFYGQRNSEHDPPYWRGAVWLNVNYLALGALHHYGHLEGPHQARAAKLHGELRANVVGNVWRQYQATGFLWEQYSDRDGRGMGCRPFHGWTSLVLLAMAEDY

SEQ ID NO: 1192 - DNA, 2703 bp, Rattus norvegicus; identical to SEQ ID NO: 1188
  ref <308>: DATABASE ACCESSION NUMBER: EMBL / AF087431
  ref <309>: DATABASE ENTRY DATE: 2000-07-06

SEQ ID NO: 1193 - protein, 834 aa, Rattus norvegicus; identical to SEQ ID NO: 1189
  ref <308>: DATABASE ACCESSION NUMBER: SWISS-Prot / AAC36477
  ref <309>: DATABASE ENTRY DATE: 2002-06-01

SEQ ID NO: 1194 - DNA, 2866 bp, Homo sapiens; identical to SEQ ID NO: 1190

SEQ ID NO: 1195 - protein, 837 aa, Homo sapiens; identical to SEQ ID NO: 1191

SEQ ID NO: 1196 - DNA, 708 bp, Rattus norvegicus
  ref <308>: DATABASE ACCESSION NUMBER: EMBL / AF087697
  ref <309>: DATABASE ENTRY DATE: 1998-11-20
atgccagtgctatcagaagactcgggtttgcatgagaccctggcactcctcacctctcagctcaggcctgactccaaccacagggaggagatgggcttcctgagggatgtcttcagtgagaagagcctcggttacttaatgaagattcacgagaaactccgctattatgagaggcagagtccgaccccggtcctacacagcgccatggcccttgctgaggatgtgatggaggaactgcaggctgcctcggtgcacagcgatgaacgggagctgctacagctgctgtccaccccccacctcagggctgtgctcatggtacacgacacagttgcccagaagaacttcgatcctgttctgccccctctgcctgataatatcgacgaggattttgaagaggaatcagtgaagattgttcgccttgtcaagaataaggagcccctgggtgccactatccgaagggatgagcattcgggggctgtcgtggtggccaggatcatgcgagggggtgcggcggatcggagcggtctggtccacgttggtgacgagctccgggaggtgaatgggatcaccgtcctgcacaaacgtccagacgagatcagccaaattctggcccaatcccagggatccatcaccctcaagatcatccctgccacccaggaggaagaccgcttcaaagagagcaaggtgttcatgcgtgccctcttctag

SEQ ID NO: 1197 - protein, 235 aa, Rattus norvegicus
  ref <308>: DATABASE ACCESSION NUMBER: SWISS-Prot / AAC78485
  ref <309>: DATABASE ENTRY DATE: 2003-02-01
MPVLSEDSGLHETLALLTSQLRPDSNHREEMGFLRDVFSEKSLGYLMKIHEKLRYYERQSPTPVLHSAMALAEDVMEELQAASVHSDERELLQLLSTPHLRAVLMVHDTVAQKNFDPVLPPLPDNIDEDFEEESVKIVRLVKNKEPLGATIRRDEHSGAVVVARIMRGGAADRSGLVHVGDELREVNGITVLHKRPDEISQILAQSQGSITLKIIPATQEEDRFKESKVFMRALF

SEQ ID NO: 1198 - DNA, 3012 bp, Homo sapiens
  misc_feature (1)..(3012): n=a, c, g or t
  ref <308>: DATABASE ACCESSION NUMBER: EMBL / U37707
  ref <309>: DATABASE ENTRY DATE: 2000-03-04
agcttccacgccgctgtttcttcatcaataaaatgggaacattcgcagtcatttctcaggactttgtgcagacaaaaagtttatcatagaaatcaccccacacaatgcttggcacatcgaggacactcagcacatcttagctttatttccttcctctctgaaaaaagtaagcagagttatttgttcccatcctctctgtccacagcctggtctcagagaacacagtagatgtgtagtcagtttgttcaataaatatgcttgatggagcttcaatacccacctccacccccttctnccagaatctgcagggagaggtcgggaggtgacaacgccagcatgccagtgctatcggaggactctggtttgcatgaaaccctggccctgctgacctcccagctcagacctgactccaaccacaaggaggagatgggcttcctgagggatgatttcagtgaaaaaagcctcagttacttaatgaagattcatgagaagcttcgctattatgaaaggcaaagtccaaccccagttctgcacagcgctgtggccctcgctgaggacgtgatggaggagttgcaggccgcctccgtgcacagtgatgagagggagctgctccagctgctgtccaccccgcacctgagggctgtgctcatggtacatgacacggttgcccagaagaattttgaccccgttctcccgcctctgcctgacaatatcgatgaggattttgatgaggaatcggtgaagatcgtccgcttggtgaagaacaaggaacccctgggtgccaccatccggcgggacgagcactcaggggctgttgtggtggccaggatcatgcgaggaggcgcagcagacaggagcggcctggtccacgttggagatgagctccgagaagtgaacgggatcgcagtcctgcacaagcggcccgacgagatcagccagattctggcccagtcccagggatccatcaccctaaaaatcatcccagccacccaggaggaagatcgcttaaaggagagcaaggtgttcatgcgcgccctcttccactacaaccctcgggaggaccgggccatcccttgccaggaggcgggcctgcccttccagcgcaggcaggtcctggaggtggtgagccaggacgaccccacgtggtggcaggccaagcgagtcggggacaccaaccttcgagccggnctcatcccctccaaggggttccaggagagacgactaagctaccggagagccgcgggcaccctgccgagcccccagagcctcaggaagcccccctatgatcagccttgtgacaaagagacctgtgactgtgagggctacctcaaagggcactatgtggctggtcttcggaggagcttccggctgggctgtagggagagactgggtggctcgcaggaaggaaagatgtcctccggagctgagtctccggagctgctgacttacgaagaggtggccaggtaccaacaccagcccggagagcggccccgcctggtggttctgatcgggtctctgggagcccgactgcacgagctgaagcaaaaggtggtggctgagaacccacagcactttggcgtcgctgttccacataccaccaggccccgaaagagccatgagaaggaaggagtggaatatcactttgtgtctaagcaagcatttgaggccgacttacatcacaacaagttcctggaacatggtgaatataaggaaaatctgtatggaaccagcctggaggccattcaggctgttatggccaaaaacaaagtttgtttggtggatgtggagccagaagcactgaaacaactgaggacctcagaatttaaaccctatattatatttgtaaagcctgcaattcaggaaaaaagaaaaacgccacctatgtccccagcttgtgaggacacagcagccccatttgatgagcagcagcaagagatggccgcttctgccgccttcatagaccggcattacgggcacctggtagacgccgtgctggtgaaggaggatctccagggtgcctacagccagctcaaagtggtcttagagaagctgagcaaggacactcactgggtacctgttagttgggtcaggtaactttatcccagaacatccaagctggacgggaccttgaagatcatctagtccagactccctcattttaccatcaaggaatctcaagcgcagagagggagagaattctccacaaattccatcatcgagaagagtataagtgggaagtcttgtttgttgttggtttttgtctgttgtttttcactgcacctctttggatcatgatttgaaaggggcatatcagaaaacaacacatttcatttattaaagtatcacaggcaagctgaccctgattctttgtaccaaagttaagtagccactgtcttttgtgggtggtagtggttaatttatacagtactgattcgcagaatgtttaagctttttaaacatagtgacgcttagtagtttttttggaagctaacttgttttatccagggggattttacatgtaactgaagttcccctgtcttcaagcactaaaacgttgatcttaaccttttttttgaagtgcttgcctggtaatagaaaacgggttctctgcctattttaaaatagtgaatatacgtaaattttctctggaaggctgaggcacacttcaccatcaacatgaattactgtactatcctgtactgcagtggtgccttcagggactcgaggaatgtaaggttgcctttcccctttctaaataccctcagattcctaacatcgagcccatgctttgtttgatttgttctattccatccattgtcccttttgttactgacagttgccttggtcctagccagtccctgccatgagatcataggggttcccattgtgctagatcttgggaaaccagatgactctccctgtcaaaactatggctacgtcactgtaaaccatttctgtcaagaataaaagtatgtagacccagagtgtgggcctaaaaaaaaaaaaaaaaaa

SEQ ID NO: 1199 - protein, 585 aa, Homo sapiens [sequence omitted]

SEQ ID NO: 1200 - DNA, 1450 bp, Rattus norvegicus
  ref <308>: DATABASE ACCESSION NUMBER: EMBL / AF087944
  ref <309>: DATABASE ENTRY DATE: 2000-07-05
ctcgagctggcctgcctctgcctcctaaatgctgggattaaaggcatgcccctctagccaagctagctttttaaagaaaggtattgaacaagctggacatggcgactcacacctataatcctagcgtttgggaggcagaggcaggaggagaattgccagttccaggctaggctagactgggctactagagtgagagaccatggggagaaaggagaggtaaagagtgagagaagaatgaactaataaacaacggagtgaacagggagaagggagaactgtttttcatattaactctcaaccttgagctgtattctgcctctggaacccatagatgagttcacaatctttccacaagtgtccagttacactcaaaaaaaaaaaaaaatcaagggcttggattcggacggtggaaaattgctagtactatgactatgggggaaatggagttgaactgatgggactgagcaaaagaatactgatctaggggctggggatttagctcagtggtagagcgcttacctaggaagcgcaaggccctgggttcggtccccagctccgaaaaaaagaaccaaaaaaaaaaaaaaaaaaaagaatactgatctaaggcactgtgtgattcacccttttcctgtatgtaccagacaagcccggggcgcctcggtcatcctcctggcacagaatgccctaatgccacttagaattcttcctgtttccgtccctccctgcaaaacatttcattgcaatatttactagaagtgagtagggttgttaggaggaagagaagtggggaagcaagttgagttcacagaggaagggacagggtgacatcccaggattacataaacttacaggggctgccaaattggtcaaaccagcctgtgtaacctagaagccagagaacgctgctgtaaaggaaagaaactgaagcctttctcggagcctgtctgggctgctcccactctcagaatctaccgaccatggtgagtcagactgtcttggagtggaactggagccaacctgaggaattcaggatctggctggaatttctgaccctttctttctctcagaagcttatgctcggcttgttgctgttgcctttgacactggtgcatgcctctcccgccacaccagaaccctgtgagctggaccaggacgaggaaagtgtccgctgctactgcaacttctcagatccgcagcccaattggtccagcgcttttctatgcgcgggggcggaagacgtggagttctacggcggcggtcgcagcctggagtaccttctaaagcgtgtggacacggaagcaaatctggggcagtacactgatattatcaggtctctgcccttgaagaggcttactgtgcggtccgcgcgggttcctactcagattctattcggaaccctgcgtgtgctcggatattctggcctccgggaactgactcttgaaaactcgag

SEQ ID NO: 1201 - protein, 128 aa, Rattus norvegicus
  ref <308>: DATABASE ACCESSION NUMBER: SWISS-Prot / AAC35372
  ref <309>: DATABASE ENTRY DATE: 2001-12-01
MKLMLGLLLLPLTLVHASPATPEPCELDQDEESVRCYCNFSDPQPNWSSAFLCAGAEDVEFYGGGRSLEYLLKRVDTEANLGQYTDIIRSLPLKRLTVRSARVPTQILFGTLRVLGYSGLRELTLENS

SEQ ID NO: 1202 - DNA, 1570 bp, Homo sapiens
  ref <308>: DATABASE ACCESSION NUMBER: EMBL / X06882
  ref <309>: DATABASE ENTRY DATE: 1999-10-11
cagaatgacatcccaggattacataaactgtcagaggcagccgaagagttcacaagtgtgaagcctggaagccggcgggtgccgctgtgtaggaaagaagctaaagcacttccagagcctgtccggagctcagaggttcggaagacttatcgaccatggtgagtgtagggtcttggggtcgaacgcgtgccactcgggagccacaggggttggatggggcctcctagacctctgctctctccccaggagcgcgcgtcctgcttgttgctgctgctgctgccgctggtgcacgtctctgcgaccacgccagaaccttgtgagctggacgatgaagatttccgctgcgtctgcaacttctccgaacctcagcccgactggtccgaagccttccagtgtgtgtctgcagtagaggtggagatccatgccggcggtctcaacctagagccgtttctaaagcgcgtcgatgcggacgccgacccgcggcagtatgctgacacggtcaaggctctccgcgtgcggcggctcacagtgggagccgcacaggttcctgctcagctactggtaggcgccctgcgtgtgctagcgtactcccgcctcaaggaactgacgctcgaggacctaaagataaccggcaccatgcctccgctgcctctggaagccacaggacttgcactttccagcttgcgcctacgcaacgtgtcgtgggcgacagggcgttcttggctcgccgagctgcagcagtggctcaagccaggcctcaaggtactgagcattgcccaagcacactcgcctgccttttcctacgaacaggttcgcgccttcccggcccttaccagcctagacctgtctgacaatcctggactgggcgaacgcggactgatggcggctctctgtccccacaagttcccggccatccagaatctagcgctgcgcaacacaggaatggagacgcccacaggcgtgtgcgccgcactggcggcggcaggtgtgcagccccacagcctagacctcagccacaactcgctgcgcgccaccgtaaaccctagcgctccgagatgcatgtggtccagcgccctgaactccctcaatctgtcgttcgctgggctggaacaggtgcctaaaggactgccagccaagctcagagtgctcgatctcagctgcaacagactgaacagggcgccgcagcctgacgagctgcccgaggtggataacctgacactggacgggaatcccttcctggtccctggaactgccctcccccacgagggctcaatgaactccggcgtggtcccagcctgtgcacgttcgaccctgtcggtgggggtgtcgggaaccctggtgctgctccaaggggcccggggctttgcctaagatccaagacagaataatgaatggactcaaactgccttggcttcaggggagtcccgtcaggacgttgaggacttttcgaccaattcaaccctttgccccacctttattaaaatcttaaacaacggttccgtgtcattcatttaacagacctttattggatgtctgctatgtgctgggcacagtactggatggggaattc

SEQ ID NO: 1203 - protein, 375 aa, Homo sapiens
  ref <308>: DATABASE ACCESSION NUMBER: SWISS-Prot / CAA29999
  ref <309>: DATABASE ENTRY DATE: 2002-06-15
MERASCLLLLLLPLVHVSATTPEPCELDDEDFRCVCNFSEPQPDWSEAFQCVSAVEVEIHAGGLNLEPFLKRVDADADPRQYADTVKALRVRRLTVGAAQVPAQLLVGALRVLAYSRLKELTLEDLKITGTMPPLPLEATGLALSSLRLRNVSWATGRSWLAELQQWLKPGLKVLSIAQAHSPAFSCEQVRAFPALTSLDLSDNPGLGERGLMAALCPHKFPAIQNLALRNTGMETPTGVCAALAAAGVQPHSLDLSHNSLRATVNPSAPRCMWSSALNSLNLSFAGLEQVPKGLPAKLRVLDLSCNRLNRAPQPDELPEVDNLTLDGNPFLVPGTALPHEGSMNSGVVPACARSTLSVGVSGTLVLLQGARGFA

SEQ ID NO: 1204 - DNA, 570 bp, Rattus norvegicus
  ref <308>: DATABASE ACCESSION NUMBER: EMBL / AF090134
  ref <309>: DATABASE ENTRY DATE: 2000-11-28
atggcgacattgacagtggtccagccgcttactctggacagagatgttgcaagagcaatcgaactactagaaaagctacaagaatccggagaagtaccagtgcacaagctgcagtctctcaaaaaggtgcttcagagtgagttttgtacagcaatccgagaggtgtatcaatacatgcatgaaacgattactgttaatggctgccctgaattccgtgcgagggccacagcaaaggcaacagttgcggcttttgcagccagcgaaggccactcccaccctcgggtagtcgaactgccaaagactgatgaaggcctgggttttaacgtgatgggaggaaaggaacagaattctccaatttacatctcccgcatcatccctggaggggtggctgaaagacacggaggcctcaaaagaggagaccagttgctatcagtgaacggagtggcccttgaagaaaagctagcaggtcaatcatccaacagtcacaaatttgggaacccgtgctccggaatcccagcacatagaaaaaggaaaagaaaataccagtaaacacctgtcacaaaactgtga

SEQ ID NO: 1205 - protein, 182 aa, Rattus norvegicus
  ref <308>: DATABASE ACCESSION NUMBER: SWISS-Prot / AAC78073
  ref <309>: DATABASE ENTRY DATE: 2003-02-01
MATLTVVQPLTLDRDVARAIELLEKLQESGEVPVHKLQSLKKVLQSEFCTAIREVYQYMHETITVNGCPEFRARATAKATVAAFAASEGHSHPRVVELPKTDEGLGFNVMGGKEQNSPIYISRIIPGGVAERHGGLKRGDQLLSVNGVALEEKLAGQSSNSHKFGNPCSGIPAHRKRKRKYQ

SEQ ID NO: 1206 - DNA, 1176 bp, Homo sapiens
  ref <308>: DATABASE ACCESSION NUMBER: EMBL / AF087693
  ref <309>: DATABASE ENTRY DATE: 1999-06-30
gccgcggaacagttgcgtctccatctggctaccaacccacccaagctttcttctccaccaccaccaccttccttccttccccctcctccccctcctttccgtcttccctctccacccccgcccccaatctcctcctttttttctcactacgagcggttgctgatgctgaagccgagcgtcacttcggctcccacggcagacatggcgacattgacagtggtccagccgctcaccctggacagagatgttgcaagagcaattgaattactggaaaaactacaggaatctggagaagtaccagtgcacaagctacaatccctcaaaaaagtgcttcagagtgagttttgtacagctattcgagaggtgtatcaatatatgcatgaaacgataactgttaatggctgtcccgaattccgtgcgagggcaacagcaaaggcaacagttgcagcttttgcagctagtgaaggccactcccaccctcgagtagttgaactgccaaagactgatgaaggccttggttttaatgtgatgggaggaaaggagcaaaattcccccatttatatctctcgcataattcctggaggggtggctgaaagacacggaggcctcaaaagaggagaccagctgctatcagtgaacggagtgagtgtggaaggagaacaccatgagaaagctgtggaactactcaaggctgctaaagacagcgtcaagctggtggtgcgatacaccccaaaagttctggaagaaatggaggctcgctttgaaaagctacgaacagccaggcgtcggcagcagcagcaattgctaattcagcagcagcaacagcagcagcagcaacaaacacaacaaaaccacatgtcataggcccttgagggaaagctacttgatcaaacatccgatagtcacaaatttgaaaccgtgcttcagaatcccagcacatagtaaaagacaacactgataattatacctgtcaagaagctgtgaacacatggtgtataaattctttaccaaggcaactcaacaccttctttctctgggcttgaaccgccactgctcacgtgggctttacatacattgaccttccattcactgcagtgggaattctcagtgtgcagagggagaggttttctagtctgcaaactgaaacagtgtaagaagaataaagtctatgacttt

SEQ ID NO: 1207 - protein, 233 aa, Homo sapiens
  ref <308>: DATABASE ACCESSION NUMBER: Refseq / NP_004655
  ref <309>: DATABASE ENTRY DATE: 2002-09-30
MLKPSVTSAPTADMATLTVVQPLTLDRDVARAIELLEKLQESGEVPVHKLQSLKKVLQSEFCTAIREVYQYMHETITVNGCPEFRARATAKATVAAFAASEGHSHPRVVELPKTDEGLGFNVMGGKEQNSPIYISRIIPGGVAERHGGLKRGDQLLSVNGVSVEGEHHEKAVELLKAAKDSVKLVVRYTPKVLEEMEARFEKLRTARRRQQQQLLIQQQQQQQQQQTQQNHMS

SEQ ID NO: 1208 - DNA, 2766 bp, Rattus norvegicus
  ref <308>: DATABASE ACCESSION NUMBER: EMBL / AF091247
  ref <309>: DATABASE ENTRY DATE: 2000-07-21
tgactccccatccgacctcccctgccccccgggaggcccgcctttgccttcttttgggggggtgggcggggaggggcgcgcggatcatggcattggagttcccgggcttgcagccgccgccgccgcctcgtccacgtaccccaagcgctccttcttcccggagcagcagcggagaaggcgaagcgcccagtgggggcgaggcagatggggctcaaggctcgcagggcatcgggctcctggcaaagacccccctgagccgtccagttaagaggaacaacgccaagtacaggcgcatccaaactttgatctatgacgccctggagagaccgaggggctgggcgctgctctaccacgcgcttgtgttcctgattgtcctgggatgcttgattctggccgtgctcaccactttcaaggagtatgagactgtgtctggagactggcttttgctgctggaaacatttgctattttcatctttggagctgagtttgctttgaggatctgggctgcaggatgttgctgtcgatacaaaggctggcgtggacggctgaagtttgccaggaagcccctgtgcatgttggatatcttcgtgctgattgcttctgtgccagtggttgccgtgggaaaccagggcaatgtcctggctacctctctgcgaagcctccgcttcctgcagatcctgcgcatgcttcgaatggataggaggggtggcacctggaagctcctgggctcagctatctgtgcccacagcaaagaactcatcaccgcctggtacatcggcttcctgacactcatcctttcttcatttcttgtctacctggtggagaaggatgtgccagagatggatgcccaaggagaggaaatgaaagaggagtttgagacctatgctgatgccctgtggtggggcctgatcacactggccaccattggttatggagacaagacacctaaaacctgggaaggacgtctgattgctgccaccttttctttaatcggcgtctccttttttgctcttccggcaggcatccttggctcaggactggcattgaaggttcaggaacagcaccgtcagaagcactttgagaagagaaggaagccagctgctgaactcatccaggctgcctggagatattatgctaccaaccccaacaggcttgacctggtggcaacctggagattttatgaatcagttgtctctttcccattcttcaggaaagaacaactggaagcagcagccagccaaaagctgggtctcttggatcgggttcgcctttctaatcctcgtggtagcaatactaaaggaaagctatttacccctctgaatgtagatgccatagaagaaagcccttccaaagagccaaagcccgttggcttaaacaataaagagcgtttccgcaccgccttccgcatgaaagcctacgctttctggcagagttctgaagatgccgggacaggagaccccatgacagaagacaggggctatggaaatgacttcctcattgaagacatgatccccaccctaaaggctgccatccgagctgtcagaattctacaattccgtctgtataaaaaaaaattcaaggagacattgaggccttatgatgtaaaagatgtaattgagcagtattccgctggacatcttgacatgctttccaggataaagtaccttcagacaagaatagatatgattttcacccctggacctccatccactccaaaacataagaagtctcagaaagggtcagcatttacctacccatcccagcagtctccaaggaatgaaccatatgtagccagggcagccacatcagaaactgaagaccaaagcatgatggggaagtttgtaaaagttgaaagacaggttcacgacatggggaagaaactggacttcctcgtggacatgcacatgcagcatatggagcgtctgcaggtgcgcgtcaccgagtactacccaacaaagggggcctcctccccagcagaaggggagaagaaagaggacaacaggtattctgacttgaaaaccatcatctgtaactactcagaatcaggcccccccgacccaccctacagcttccaccaggtgcccatcgacagagttggtccctatgggttttttgcacatgaccccgtgaaactgaccagagggggacccagttctacaaaggctcaggccaaccttccctcctcgggaagtacatatgcagagaggcccacagtcctgcccatcttgactcttctggactcatgtgtgagctaccactcccagacagaactgcaaggcccctattcggaccacatctcaccccgccagagacgcagcatcactagggacagtgacacaccactgtccctcatgtccgtcaaccacgaggaactggaacggtctccaagtggcttcagcatctcccaagacagagatgattatgtatttggccccagtgggggttcgagctggatgagggaaaagcggtacctggcagaaggagaaacagacacagatacagaccccttcacgcccagtggatccatgcctatgtcatctactggagatggtatttcagattccatatggaccccttccaacaagcccacttagaaggggtcactggctgactcctggtactgtagtcagactttgtacagctcacttactctcacatctagtgcttaacaatgaggactccagtggctgtgtcaagcgcatgcatgtgcgcggtggcccccctgcaagcaggggcttctcacagccttcttcctccccatgtcac

SEQ ID NO: 1209 - protein, 873 aa, Rattus norvegicus
  ref <308>: DATABASE ACCESSION NUMBER: SWISS-Prot / O88944
  ref <309>: DATABASE ENTRY DATE: 2002-06-15
MGLKARRAAGAAGGGGGEGGGGGGGAANPAGGDSAVAGDEERKVGLAPGDVEQVTLALGTGADKDGTLLLEGGGREEGQRRTPQGIGLLAKTPLSRPVKRNNAKYRRIQTLIYDALERPRGWALLYHALVFLIVLGCLILAVLTTFKEYETVSGDWLLLLETFAIFIFGAEFALRIWAAGCCCRYKGWRGRLKFARKPLCMLDIFVLIASVPVVAVGNQGNVLATSLRSLRFLQILRMLRMDRRGGTWKLLGSAICAHSKELITAWYIGFLTLILSSFLVYLVEKDVPEMDAQGEEMKEEFETYADALWWGLITLATIGYGDKTPKTWEGRLIAATFSLIGVSFFALPAGILGSGLALKVQEQHRQKHFEKRRKPAAELIQAAWRYYATNPNRLDLVATWRFYESVVSFPFFRKEQLEAAASQKLGLLDRVRLSNPRGSNTKGKLFTPLNVDAIEESPSKEPKPVGLNNKERFRTAFRMKAYAFWQSSEDAGTGDPMTEDRGYGNDFLIEDMIPTLKAAIRAVRILQFRLYKKKFKETLRPYDVKDVIEQYSAGHLDMLSRIKYLQTRIDMIFTPGPPSTPKHKKSQKGSAFTYPSQQSPRNEPYVARAATSETEDQSMMGKFVKVERQVHDMGKKLDFLVDMHMQHMERLQVHVTEYYPTKGASSPAEGEKKEDNRYSDLKTIICNYSESGPPDPPYSFHQVPIDRVGPYGFFAHDPVKLTRGGPSSTKAQANLPSSGSTYAERPTVLPILTLLDSCVSYHSQTELQGPYSDHISPRQRRSITRDSDTPLSLMSVNHEELERSPSGFSISQDRDDYVFGPSGGSSWMREKRYLAEGETDTDTDPFTPSGSMPMSSTGDGISDSIWTPSNKPT

SEQ ID NO: 1210 - DNA, 2926 bp, Homo sapiens
  ref <308>: DATABASE ACCESSION NUMBER: Refseq / NM_004519
  ref <309>: DATABASE ENTRY DATE: 2000-11-01
gacccgcgcgggatgtgaccccctgaccccctgcctggcctcccctgccccccagggggcccgcctttgcctgcttttgggggtgggtggggaggggcgcgcggatcatggcattggagttcccgggcttgcagccgccgccgccgcctcgttcacgcaccccgagcgccccttcttcccagagcagcagcggagaaggcgaagcggccggcgggggcgaggcagatggggctcaaggcgcgcagggcggcgggggcggctggcggcggcggcgacgggggcggcggaggcggcggggcggctaacccagccggaggggacgcggcggcggccggcgacgaggagcggaaagtggggctggcgcccggcgacgtggagcaagtcaccttggcgctcggggccggagccgacaaagacgggaccctgctgctggagggcggcggccgcgacgaggggcagcggaggaccccgcagggcatcgggctcctggccaagaccccgctgagccgcccagtcaagagaaacaacgccaagtaccggcgcatccaaactttgatctacgacgccctggagagaccgcggggctgggcgctgctttaccacgcgttggtgttcctgattgtcctggggtgcttgattctggctgtcctgaccacattcaaggagtatgagactgtctcgggagactggcttctgttactggagacatttgctattttcatctttggagccgagtttgctttgaggatctgggctgctggatgttgctgccgatacaaaggctggcggggccgactgaagtttgccaggaagcccctgtgcatgttggacatctttgtgctgattgcctctgtgccagtggttgctgtgggaaaccaaggcaatgttctggccacctccctgcgaagcctgcgcttcctgcagatcctgcgcatgctgcggatggaccggagaggtggcacctggaagcttctgggctcagccatctgtgcccacagcaaagaactcatcacggcctggtacatcggtttcctgacactcatcctttcttcatttcttgtctacctggttgagaaagacgtcccagaggtggatgcacaaggagaggagatgaaagaggagtttgagacctatgcagatgccctgtggtggggcctgatcacactggccaccattggctatggagacaagacacccaaaacgtgggaaggccgtctgattgccgccaccttttccttaattggcgtctccttttttgcccttccagcgggcatcctggggtccgggctggccctcaaggtgcaggagcaacaccgtcagaagcactttgagaaaaggaggaagccagctgctgagctcattcaggctgcctggaggtattatgctaccaaccccaacaggattgacctggtggcgacatggagattttatgaatcagtcgtctcttttcctttcttcaggaaagaacagctggaggcagcatccagccaaaagctgggtctcttggatcgggttcgcctttctaatcctcgtggtagcaatactaaaggaaagctatttacccctctgaatgtagatgccatagaagaaagtccttctaaagaaccaaagcctgttggcttaaacaataaagagcgtttccgcacggccttccgcatgaaagcctacgctttctggcagagttctgaagatgccgggacaggtgaccccatggcggaagacaggggctatgggaatgacttccccatcgaagacatgatccccaccctgaaggccgccatccgagccgtcagaattctacaattccgtctctataaaaaaaaattcaaggagactttgaggccttacgatgtgaaggatgtgattgagcagtattctgccgggcatctcgacatgctttccaggataaagtaccttcagacgagaatagatatgattttcacccctggacctccctccacgccaaaacacaagaagtctcagaaagggtcagcattcaccttcccatcccagcaatctcccaggaatgaaccatatgtagccagaccatccacatcagaaatcgaagaccaaagcatgatggggaagtttgtaaaagttgaaagacaggttcaggacatggggaagaagctggacttcctcgtggatatgcacatgcaacacatggaacggttgcaggtgcaggtcacggagtattacccaaccaagggcacctcctcgccagctgaagcagagaagaaggaggacaacaggtattccgatttgaaaaccatcatctgcaactattctgagacaggccccccggaaccaccctacagcttccaccaggtgaccattgacaaagtcagcccctatgggttttttgcacatgaccctgtgaacctgccccgagggggacccagttctggaaaggttcaggcaactcctccttcctcagcaacaacgtatgtggagaggcccacggtcctgcctatcttgactcttctcgactcccgagtgagctgccactcccaggctgacctgcagggcccctactcggaccgaatctccccccggcagagacgtagcatcacgcgagacagtgacacacctctgtccctgatgtcggtcaaccacgaggagctggagaggtctccaagtggcttcagcatctcccaggacagagatgattatgtgttcggccccaatggggggtcgagctggatgagggagaagcggtacctcgccgagggtgagacggacacagacacggaccccttcacgcccagcggctccatgcctctgtcgtccacaggggatgggatttctgattcagtatggaccccttccaataagcccatttaaaagaggtcactggctgacccctccttgtaatgtagacagactttgtatagttcacttactcttacacccgacgcttaccagc

SEQ ID NO: 1211 - protein, 872 aa, Homo sapiens
  ref <308>: DATABASE ACCESSION NUMBER: SWISS-Prot / O43525
  ref <309>: DATABASE ENTRY DATE: 2002-06-15
MGLKARRAAGAAGGGGDGGGGGGGAANPAGGDAAAAGDEERKVGLAPGDVEQVTLALGAGADKDGTLLLEGGGRDEGQRRTPQGIGLLAKTPLSRPVKRNNAKYRRIQTLIYDALERPRGWALLYHALVFLIVLGCLILAVLTTFKEYETVSGDWLLLLETFAIFIFGAEFALRIWAAGCCCRYKGWRGRLKFARKPLCMLDIFVLIASVPVVAVGNQGNVLATSLRSLRFLQILRMLRMDRRGGTWKLLGSAICAHSKELITAWYIGFLTLILSSFLVYLVEKDVPEVDAQGEEMKEEFETYADALWWGLITLATIGYGDKTPKTWEGRLIAATFSLIGVSFFALPAGILGSGLALKVQEQHRQKHFEKRRKPAAELIQAAWRYYATNPNRIDLVATWRFYESVVSFPFFRKEQLEAASSQKLGLLDRVRLSNPRGSNTKGKLFTPLNVDAIEESPSKEPKPVGLNNKERFRTAFRMKAYAFWQSSEDAGTGDPMAEDRGYGNDFPIEDMIPTLKAAIRAVRILQFRLYKKKFKETLRPYDVKDVIEQYSAGHLDMLSRIKYLQTRIDMIFTPGPPSTPKHKKSQKGSAFTFPSQQSPRNEPYVARPSTSEIEDQSMMGKFVKVERQVQDMGKKLDFLVDMHMQHMERLQVQVTEYYPTKGTSSPAEAEKKEDNRYSDLKTIICNYSETGPPEPPYSFHQVTIDKVSPYGFFAHDPVNLPRGGPSSGKVQATPPSSATTYVERPTVLPILTLLDSRVSCHSQADLQGPYSDRISPRQRRSITRDSDTPLSLMSVNHEELERSPSGFSISQDRDDYVFGPNGGSSWMREKRYLAEGETDTDTDPFTPSGSMPLSSTGDGISDSVWTPSNKPI

SEQ ID NO: 1212 - DNA, 663 bp, Rattus norvegicus
  ref <308>: DATABASE ACCESSION NUMBER: EMBL / AF091561
  ref <309>: DATABASE ENTRY DATE: 1998-10-20
ggtaatctgtcagctctagacatcctcttcaccaccaccactgtcccgaagatgctgtccctactcctgctgggagaccgcttgctcagcttccctgcctgcttcctgcagatgcatctattccacagcttctccagctcagaagccttcatcttggtggtcatggcctatgaccgctatgtggctatctgccgccctctgcactaccccgtccacatgaccccacagacaaacactgcactggcagccagtgcctggatcaccgccctcctcctgcccatcccagcagtggtacagacttcccacatggcatttgacaacatcgcctacatctaccactgcttctgtgaccacctggccgtggtccaggcttcctgctcagacaccagtccccagacgctcatgggcttctgcattgccatggtggtgtctttcctccccctcctcctggtgctcctctcctatgtgcgaatcctgatctcagtgcttcagatcaactccaaggaagggcgttccaaagccttctccacctgcagctcccacctcctggtggtgggcacctactacttgtccattgccatatcctatgtggcctacagggctgacctccccgtagacttcctcatcatggggaacgtggtctatgccattctcacacctgtg

SEQ ID NO: 1213 - protein, 221 aa, Rattus norvegicus
  ref <308>: DATABASE ACCESSION NUMBER: SWISS-Prot / AAC64584
  ref <309>: DATABASE ENTRY DATE: 2003-02-01
GNLSALDILFTTTTVPKMLSLLLLGDRLLSFPACFLQMHLFHSFSSSEAFILVVMAYDRYVAICRPLHYPVHMTPQTNTALAASAWITALLLPIPAVVQTSHMAFDNIAYIYHCFCDHLAVVQASCSDTSPQTLMGFCIAMVVSFLPLLLVLLSYVRILISVLQINSKEGRSKAFSTCSSHLLVVGTYYLSIAISYVAYRADLPVDFLIMGNVVYAILTPV

SEQ ID NO: 1214 - DNA, 31737 bp, Homo sapiens
  ref <308>: DATABASE ACCESSION NUMBER: EMBL / AF321237
  ref <309>: DATABASE ENTRY DATE: 2001-06-21
ctgagctgaaccaaatcccggagcctctaagaactaaccagatagcaccttccaccagatggacggcaattcaaaatgtagcaatgtttaaattacctgtattctcgaaatttatttttatatcagctgttttgataatacactatttttctctttagaagcaattctctattagtttgatgtgattgattatatagattccttaaaccaatattggctgtgaatctatgatattccaaggaccactgtaggcactggggatgaaacaatttggcccctcccctctggagttctttagtgttaggaactgggttttcagtctgtatccccagtctttagcatatgcttggtacacagtatttgctcaaaaaataagattgattgaatattcaaagtatgatgggtgcccaaggaaagtaatgataccttgatttagtgggcatgtctttgagtagagggactatgcggagcaaaaaacagtggggtgtaaaaatgcagtgtgttctagttagttggtatgggataaggctggtaaggttgcctgcagatggatacgggagggtggaatttatctatattcagtgtggggccgtaagtaatcatcaagcagagatgtaattattcataattatgttttatttatcagttattgaatgagttgatttcccttgaaataaaggtaggcacttctataactgctaggcactacagtttttagatattggcagcatctatcaaaagtaaagatatgcctacccttatatattccatcttggataaagctcgtatctagcaattcgaatgtttgtagtttaccctaacaggtatattggtaacagtgaaaaacaatatatgtataggaatgttcataacataattgtttgtggtagcataaattggccccaatattaatgttcatcaataagagaatagttaactaagttttggtttaactgtagtttaactgtagttaaactgtagtgtggaatataatgaaatcaatagcaagacataggtatagctatatatattggtcaagaagtgtctccaagataatagcgattgttgggaaaattaagtcattaaatcatatgttaactacaaaagtgtgcatactcatgtacatacacatatgcatatttgaattaatagacatctggaaagatgtataccaacctgtgatctatggttactaatggaaagggtattgggcttgagggtgtttggaaagagacttactattaccatacatttgggcgatgcatgttggacacaccacacaacttaccatttaaagtgtataattcaatggcttttagaatattcacaaagttatgcaaccatcaccacaatcaattttagaactttttcgttactccaaaaagaaaccatacattccttagtcatcatcatccagtcctcctataaccccagccctaggcaacaaccaatctactttctttctctatagatttgcctgttcttgacatttaatataaatgaaatcatgcaatatgtcatcctttgtgactacttttttcacttaatataatgtttttaacgtttattcatgttgtaccatgttcaatcctttatatggatatatcaccgttttttttgtttgtttgtttgtttgtttgtttttgaggtggggtctctctctctcacatggactgaagtgcagtggagtgatctcagctcactgcaacctctgcctaccctgttcaaatgattcttctgcctcagcctcccaactatttgggactataggcatgtgccatgatgcccagctaatttttgtatttttagtagagacggggtttcaccacattggccaggctggcctcgaactcctgaccttaagtgatacacctgccttagtctctcaatgtactgggattacaggcgtgagccaccacacccagctgatatatcaccttttctttatatattcaaagacatttcactttttgtctttggatcactgcactttttgagtattatgaataatgttgccataaacattcatgtataagtttttgtgtgcaacatatgctttcagttctcttgggtatatacctactggtggggtggctgattcatatggtaacctgctagccatcctagtaggtgtaaagttgtatgctattgtggttttggtttgcatttcctttatggctaatgacattcaacatattttcatgtgcctactggccatttgcatacctcttctggaaacaatgtctatttagattctttgcccagttattaattatattattggcctttttattaccaggttatgtttcttatatattctaaatataagtcccttatcagatacagaatttgcaaaaattttctcccactctgtgggttgtcttttcacttccttaatggtgtcttttgaagcacaaacatttttaattttgatgatgtccaatttattaatttttttcttttgttctgaaaaatatatatttgatgtatatttaaaatacaattaagcaaacaaaatgttaaaattaagtaacttatcttcaaaactgaggaggaatatagagttccttttaaggattaggtaagaggcttttatcctttcaaagattttagagtttggtggcactggtttttattttaccattgaatcaacatccacacctccatttacctgatataatggtaatattgtgtaaccattacatttatatgatttgatatgagactgtttttgttttgacagattttcctagatgtgtaaaagaggagaataacataaagaataatctgtattttgagttaaaaaagaaccttttaagtaattaatctgtacattgtaaagtaaaacagtaaggtgaaattgttttcaggcttcttcctctggtggttaaaataaaagtggagaagagaaaagaaattaggtcaaacttttcccagattggttgttagtggtaactttggcccaggacagctacattcctgtctggagaaaagatgttgcaggagaaatcccaggaagtgaggaaaggagtgtagagtccatggcttaccagtagtgggcaaaggtggaagggttataaattggattttgtcatacaggtgatgcatgttggactgagctgtttgcttaaggccttctgcctgcaaagtgagcagggagcaatgctaaaaatctaaagcaccaaacagttaagtagaagtgcaaagggaccttcctcccaatgccaaattccaactttagtctgaagaccagttaggaattgaaatctttcatttctttgactcacagaccaatccagatgctgagactctgttactagattatgtagggtgtaattatgtcttttttttttttttaagaaatctcctggggattcctgtaacccaagtgagttctgcaacttggagtaaaatgttacttctttatttttattttcccctaactgaaagttgatgtttccttccaatttgaatgcaagtaaccaacccacaccaatattagaagtatttatgactttgtcagcagtagtaattataagaatttttatattgtattgcagttgttggagagatctccaaatatttaaactcatcattattttgaaatgaagatggttattagacccaccactacatttcaaaattttagtgtattaataaagaagcacatatattgctgtttacaaatctgttttctaaaattatttcgataactgtattttgatataactggtttccttagtaatcctatacattttatttgatgtatttaaaacgttattctgagatactttcaccagacagttaaaggattgatagcccaacccgtgtataggatcttaaactttacactttaaagtaaatttatttcccttctttttggaacagctccacaaaattggattattatttcaaatctctctagggatattggcaaaacttctaaatgactctgcttaactatgtgatcaaattattatttgtttaatgaattatggtcatttatgaaatgaagttctctgctatgtcttgtaaaggacacagaggtgaaaaagacatggaaactattttcaaaggaacttttacttttgcggggggagtggacagataatgcatataatttttagcagagagagctggggagtagtgctgtttgggctgagtatgaaactagtcacgctggtggcttaaaatgaaaattctgttttgatggtgtgtctgttatgttggaagttcattcacagttgagactgaacagaactcaagctgaggcttcagataggattcccaagggtatcctgagttaatctttggtttcccagctcctgtaagacaggttagtttcttaaataaaacataccagtactttggctctttctgatttcttataccttcgtgtctgtcctttcacggaaaatacaacagaaaactatattatcataagcggggaagaggagatgtgacaagagcacttacgactcaggggttttagttaagaacaaacagaaattaaatggcaggactttatagatgaactcagtctgtatttaatattgtattattaaaagtgtggtattcagagtgagaaaaataattttaaaaatctattcttgccagatgacaccaacaatgaatgcaacatcttttaaagtttgttttacaacactgaaaatgttccaatgaaagaaacatgatcatcttatgaagggggttcttgaaattttcagtagaaattggggcagttcctaagcctgcacttctgaattatataattttataggtatgcctgtctatggttagcacatagtgacttcttactgaaaaggacaacaaactatgagacagataaatcagacacaagtgacagaattcctccttctgggactctctgatgggccacacaccgagcagctgctatttatcgtattattgggtgtctacctggtcactgtgcttggaaatctgcttctaatctcccttgttcatgttgactcccaacttcacacacccatgtatttttttctctgcaacttgtctctggctgacctctgtttctctaccaacatagttcctcaggcactagtccacctgctttccagaaagaaggtcattgcattcacactttgcgcagctcgacttctctttttcctcatttttgggtgtacccagtgcgcccttcttgcagtgatgtcctatgatcgctatgttgcaatctgcaatcctctgcgttaccctaacatcatgacctggaaagtgtgtgtccagctggcaacaggatcatggaccagtggcattctggtgtctgtggtagacaccaccttcacactgaggctaccctaccgaggcagtaacagcattgctcatttcttttgtgaggcccctgcactattgatcttagcatccacagacacccatgcatcagagatggccatttttcttacgggggttgtgattctcctcatacctgtttttctgattctggtatcctatggccgtatcatagtaactgtggtcaagatgaagtcaactgtggggagtctcaaggcattttctacctgtggctcccacctcatggtggtcatacttttttatggatcagcaattatcacttacatgacacccaagtcttccaaacagcaggaaaaatcggtgtctgttttctatgcaatagtgactcccatgcttaatcccctcatctatagcctgagaaacaaggatgtgaaggcagctctgaggaaagtagccacaaggaatttcccatgaaggcttggaatctcacactgacagtgagctcagagaaccttttggcttcctacttcaaagacttgctgggaagacatggaatcaacccaggtggattggatttttaaaaatgtacattggcacacttggtttctcaagtcacctgcttggcccccttccaagttgtactttccttctttttcctcctttccttttccttccttactgttctaaagctttttaataaactttctcctgctttgaaaacaaaagtacatatacaccatggaatactatgcagccacagaatagaatgaaatcatgtcattcgcagaaacatagatgcagcttgaaaccattatcctaagtgaactagcacaaaaacagaaaaccaaatacttcatgttgtcactcataagtaggaactaaacattgggtacatatgaagacaaaggtgggaacaatagacattggggactactagattatgggagggagggggaagggttaaaaaaactacctattacctactcactacctgggtgatggattcatttgtactccgtatctcagcatcacatgatatacctctgtaacaaacctgcgtgtgtaccctcgattttaaaataaaagttgaaaagaagaaaaaatgcacattagatttcaaattttcacacctatatgaaaatagaatttaaatcatgtcattagtaattttatatggatggcatgacaataaaataatattttaatatattggataaaataaacttatattattaaagaagacttgctgggtagccctcttctttgtgaatctaaaatatggtaagacttaaagtgatggatatggtaattaccctgatttgattattatacaatgtttccatgcattgaaacatcacactgtattcccaaactatatataattatgtcaattgtaaattaaaaattaataaaaaatatggtaagattcttattcttgggccttatccatagacacaccctctatccttcatcctgcatttctttcatagaaggagaaggacaataattcgtggagcaatcggaaggaggatatgcttccttctggttggtcctttgacacctaagggttgagaaatcccccgagaaacacacatattttataagccttgtaaaatctacctttttaataatgctgtgtattatcacctgtctatttcagatcttacttcaagtcctttttcttttggtacttctgaatctctctgcatcatcaaatgatcaataaatagacattactgaatcacttactatgagctaggtgctacatgtatgttggcatgtgcacctgtatgtgtgcttaacatgggtaatgaagagcatgggtacaatgaagcagaatatatgagctctgctctccttctcacactcttttagaaacataaggatcatatttatcaggatacatcttcataaagatgaatataggagttgtggaaaccagcaagaaatagtgacacattccaagaatagtgacacatagcaagagtgagaagctgtaactaacgataagcctgaatgaccaagaggagggaactagaacctggagagggtagaaatatgctaagggcacaaggcagtaactgtggacttaggctatgtgaaggcaaggaagccatgggaagaaatatttctcaagcccattttccacccgccttctgatcccccactattgtattccaattagaagccagggaacaaggagccttttggtataatccataaaagatgtcaaacattctgaagcacatagcaagctgaaaaaggatagaaggtagatctggaaaggtcaactggtgaagtacacaccttttgccctcagcatccacttctttcagtgattaattcatatttctaatacagggaacacataaagttccattaagaactatatcatagcggcatgatatcaagtagctcacacttctacttgctacataaaagaatagctcctgtcatgattatttatgtaagttgaaagaggaagagcaaaaaaggcaaataattagcagaaaacatagctattgtagctcctaatcctgccccagacataagttgataattatagcttggtctttcactaccctttcatggatttcttattttctaccttaaactcagctcactggagttttttaacaaggtgtggcaacctaaaacttcttacctgtaatatttgagttattgatgattctgttccttattttttaacttttagtttcacgggtacatgtgcaggtttattatataggtcaattgcgtgtcacaagggtttggtgtacagattacttcatcacccaggtaataagcatagtacctgataggcagtttattttatattcacccttctcttaccctcaaccctccagtaggccacaatatctgttgttctattatttgtatccatgtgtactcaatatttagctccaacttataagtgagaacacacagtatttggttttctgttcctgtgttaagataggataatagcctctagctccatttatgttgctgcaaaagacatgatctcggtctttttcatggctgtatagtattccatggtgtatatgtaccacatttcctgctattgatgggcatttaggttgattccatgcctttgctgtgtgaatagtgctgcgatgaacataaccgtgcacgtgtctttatggtagagtaatttatattcctctgggtatatacccagtaatggcattgttgggtcgaatagtagttctgttttaagttattcaagaaatcaccaaactgctttccacagtggctgaactaatttacattcccaccagaaaagtgttcccttttctctacaattttgccagcatctgttttgttgttgttgttttgactttttaatagtagccattttgactggtgtgagatggtacctcattgtggttttgatttgcacttctctaatgattagtgatgttgagcattttttcatatgcttatttgccacttgtatgtcttcttttgaaaagtgtctgttcggcaacctatagaatgggagaaaatttttgcaatctatccatctgacaaaggtttaatatccagaatctacaaggtccttaaacaaattttcaagaaaaagcaaacaagcccatcaaaaagtgggtgaaggatatgaacagacacttctcaaaagaagacattgatgtggccaacaaacatatgaaaaaaaaaagctcatcatcactggtcgttagagaaatgcaaatcaaaaccataatgagataccatctcacaccagtgataatggtgattattaaaaagtcaggaaacaacagatgctgttgtgactgtggagaaataggaatgctttttggtgggagtgtaaattcactcattcaaccattgtgttcaaccattgtggaagacagtgtggcaattcctcaaggatctagaaccagaaataccatttgacccagaaataccattactaggtatatactcaaaggattataaatcattctactataaagatacatgcccacgtacgtttattgcagcactgttcacaatagcaaagacttggaaccaacccaaatgcccatcagtgatagactggattaagaaaatgtggcacatatacaccatagaatactatgcagccatgaaaaaggatgagttcatgtcctttgcagggacatggatgaagctggaaaccatcattcccagcaaactatcacaggaacaaaaaactaaacaccgcctgttctcactcataagtgggagttgaacaatgaggacacatggacacagggaggggaacatcacccaccggggcctgtcgggggatggaggtctaggggaaggatagcattaggagaaatacctaatgtagatgactggttgatggccacagcaaaccaccatggcacgtgtatacctatgtaacaaacctgcacgttctgtacatgtatcccagaacttaatatgtgtgtgtgtgtgtgtgtgtgtgtgtgtgtgtgtgtgtgtgtgtgtgtatagatgtagtgggatattgaaatctcctactattgttgtgttgttttctatttctctcttataattgtcatatcttcctggtaaattgacttttttatcattaaataatgttgtttctggtaaaaaaaaatttggatactaagtaaatttttaaatatatttacttatattactactatttttatggtctccatttctttaaataccagattttcctatggtatctttttttttttatgagagagagaatctccctctgttgcccaggctggagtgcaatggtgtgatcttgtctcactgcaacctctgccttccaggttcaagcaattcttctgcctcagcctccggagtagctgggattacaagcgtacgccaccatgcccagctaatttttgtatttttagtagagatggggtttcgccatgttggacaggctggtcttgaactcctgacctcaaatgagtcgcctgccttagcctcccaaagtgctgggatttagaggcgtgagccaccacacctggcccgtgtatcatttttctttctgccaacaggacattctttaatatttctcatggtgtgggttctgctggtgataaatctttgaggtcttgtatgcctgaagacatctttatttccctttctttctgaaagatatttttccaagtgtagaatttcaggttgaaaaattgttattctcttgaataccataaaagtcttgcttcattttgacttacctgtattgtttttgatgagaaatttgatgttattcttatctttatacctctatacatagaatgcctcgcctccctcccactggccacttttgacattttctctttatcattgttttttgagcaatttgataattacatacctttagttatgtgtcttcatttttttgtgcttagcatttactgagtttcttgatctgtggtttatagttttaattaagtttggaaaattttcagccattatttcttcaatttttttttctgtcctctcctctgccttggtgacaacaactaccttcatgttacacagtgtgaagctgtcccatagttcactgattttcttctcatattttgtattcatttttctgttttattttgcattttctatggctattcatcaaactcactaatctttcatctgtaatatttaacctgctgtgaatcccattcagcatattttttatctcagatattttagttttcatctctagaagtttaatttgtcttttatttatagctttcatgtctctacttaactttttaaacatatgcaataacataacttttaatatttttctctgttaattgtaacatttgagtcagttctgggttgatttatactgatttttctcctcattatataagtcgttatttccttgcctctttacataactcataatattttattgaatgccagacttggtgaattgtactccggtggattctgggtattttttgtattcctataaatcttcttgagctctgttttagaattcagttaattcacttggagataattttgtccttttgtgttttgctgtatgaattgttaggtgggtctgaagcagtgctcagtatagggacaagtattccccattactgaaactggaccttcctgtatcttctacccactattccatgaattacgagtttttccagcctgaatgttgggaacaggaactactacggacgctgtgttcatgccaagcacctctgatgcttcctttgattctttctgatggctatttccccagccttggacagtttcttcagatgtatatgcttgactctattgaacaggcaaaatggaacccttttagatctttggggttctctttctctgcagatctctcttctctgttatacattcataaggtttacctcatttgtttccagtctctcagcagctactttcctttgttgcttgatgcctgtgtcttgaaggatcattgtttcatgtattttatgtgtttcttattttattgttttaggtgaggggtaaatccaattcctgttattcaattttggctaaaagtagaagtccttgagagtagttttgaatgacagttttgttcaatacaaaaatttatacagccagtattttctttcagcagtttaaaagtattatcccactgtcttctgtcttccactgattttgtgattgtatagatgctttttacatattctctatatctttctcagcattttgatgtgattatttatttgtttgttttagctatccgatcggtgttcactgagctagtatttttttcagatattgcatctcttttactttattgttttctcctggaaatctgactatccatgatttagacctttttgcttagttgaacttttatgctcatttctttattttccctcctttttgttctgtgcttctgtctccatactttctactgaacaagactacagtttataaattatctcttctgctttgtggactttgctattgagcctacctaatgaattttcagttcagtttattttttagttttatgtctgtttttctttttatgaattgtagttatctcatgaaaaaatctttttctctcttttcttaaaaatattagtaatagttattttgaacttagaactctaatatctaaatcacctctaaatcttttatgaataatggcaatatatctaaacatagacaaataaattatccataaaagattggcaaacaaatgtcacagatgtcacaaatatttatagataaatttcccattttttctctcggttttcagtcatttttgaccctttttcattagcatgttttataattttttcattaaatagtccccctgtagaggctctggatgatttttttctttctaagaggatgcagttttcttttgacagggtaaaaacataagcagatcaattcaatcctattgatggttggttttaggcttttttaggctttttctatctagttttgcatttgttcctaaattattacctttgtgggatctcagctgaaagcacagagtgatctacctcacaagacttaaaccctaccctctatctcccagcaccaatcggttagtaaatgctcagctcatatatatatatttttttagcctttcatatgctgctttcttttgagtttccttgagtcttttcttgtgcatacaccgtttaggagtgacaaacaacttataaatatattgcatgcaaatttttggacttgtttatctgtggtaccctcatctttgtgatttgattctcaatgttaatatgtttggcaaccccgaattctaatttctaccctcttatttcagtgactgctactttatgctaacactctcttttcctcttagagaaatgacaaacgcccttggggaaaacacttgggtgaatgtggcacttaccttattgttcttccctcctcttaccttttctcttcaagtcctgcatttgctgctctcctgtatctctaagcacttgttttgtgtgttttgtcaatcttttatagttgtgtagttgttttggggagaattatttaaattcaagctacttctctgtggccaaaagagaagtgctgacattaagtgtgtctttaaagttatccaggtgattctgatccacagttcaaaatcattgtactatatcaatgtaattgagaggccaggggattttaagtgaggctggaaaggtggatagagactagcacaagttgggaatgtagaattagtaaaggttttgcattttactttaatagtgatgggaagctgtgaaaagttttcaagcaagggaatgacacaatcttgtttacatattgaaaagactactcaggatcctccacggatagtggattatagggaagcaagatagaaataggaagatatgttaggaagtactgcagtagtcaaggtaaagaacgattgtgtcttggtctaggataatagcagcatagatcaaagaaaattggatatagcatatattttggaaaccatttgtcaggtttgctgataggttcaatatgagggatgaaaggtagtgagtaaataagaatggctcttaaggttttggcttgagtcactgaataaatggtgataatatttgctggtgagtagaagaggggaataaaaaagcaagttttatggaagtgttttggatgaattaagtttgagctgcctacttgacataaatgcagagggatgaagaatacaattggatattggatttgagctcaggggagatatcacatttgaagataaaattttggggatcagtactctgtacatagtatataaaggcatgaaaccagataaaatcttttagatgatctctaacatgggaataataataacaatagttatttcaaagggctgttttaaagataaaagtagaattttataaatgtaacttataaactatagaaatgtatattttttgttatattttctaatccaaccctattatgtaatttacatagaaatgattaactgcaggcagggagtagatagaaaagttatgtattttacacattttcttggataatacagacacccttcagatggacagatataaagtttttatcatttttaattcccacatttaatcataaatatagaattgttttaaatattggaaacctaaaatattgataagtcagcatttctctgcagggattatatatggatatctgtgagggatcctggatagttgaatgtttggacttatttagcacttccaatttatttcatgggaaatcaaatgtatattaattgcatttttcccatgctcaagtcactgtgctaggccatgtaggagatataagtatgttataaaccctgtccttacaagaaaacagtataatcaaggagcaaagaagtaggacagaataaaagtagatcatatgtttgtgtgcatgtgttttcagagaagaaaatactgtcaggttggaagcaattgaacccacgccatgaaagaggtaatatctgaaatacatcttgaaggatggtcagtttatgaatatatcacaatattttgaatgagcagaatagtaataaaatttttaaataggcaataaaaagttttaggaagaagtaaacttaactcttctttgtaaacagtatttctaaattatgatccagaaaaagaatcatacagtccttgtagaatttagtgaagattatgtgtaatgtagtattgtggcagaaagtaactgacaacgtgctgattaggtgaggactttttattggactttctggtatgaaggatgagcctcatttgattatcagatttctgattttgttgactaggtagtgctagtgacagtctttgaaataggaattcagttcaagaagcaggatttgataaagaaaatgagttaagtttttgacatgagttaaaagatacctttgaggtgccttttggaaatcaatgtggatatgtcttatggacacttgcaaatatctgactctcaagcttagagtgatgaggtttctctctctctttctctctctccttctctcaccttgttcatgtgtgtatggtatgggtatatgactttgtacaaactcatcaaattgtatacattaaatatatgcagtttctctatattacttatacttcaatatagctattttttaaaaaagcaacagagtgaaaaaaagcaccaaggttattattggaactttggggaacatagtgtttccaatggttaagtgtttgtgagaaaactccttgaagattgagaacgagtgttcagagatgcagaaagaaaaccagaacagaatggtatttgggaaataacaggtgtagaaattttcaaaagaaatacatgagcaatgtaagagttgtaatagagtagcaaaatcaagattaaacactggacaggttaatatagaggccattaatgattttgaaagatctattgcaatgaagtgataggggaagaaactagatttcagtgaataaatagtaaatttaatgaaaataaaatagaaattataaactttttttccccaagaagttgtctgatgctaatgggtgtgggttttcttttaggggtgataaaactgtaaaattagattgtggtgatggttgcacaacattgtgaatatgctaaaaaaattgaattataaactttaaatgggtgagttgtataatatgtaagttatttcaataaagatggtacaaaagtagtccaagcgtaaatgagaaagataagagaaacgtgatcaagattgtaattcgtttttgttttaaggatcagggcctgtttacagcttgagacaaaagaggggaagagattgaagttacaggtgaaacagatgagatactccaagaagcatggttcatagacaagaggctatgcaatcaagtatttctcagattaagagaaataggcatagatgtgggcatagatggaaacatttttagatgtaagggcatgagtaaaagtcatttaaatctgatcaccccaattttcttgatgaagtggaagttgttttcttgaataaaagaaggaagagtggtacagggaaaagtagcaaaaacttggatattagctgagaagaataaagtaagaccaagtgcattaatgtcgtattgctgctgtaacaaattaccacaaacctagtagcttaaaacaacctagatttgttatctgagaattctagagttcaaaagaccaaaatcagtttcactgtgctaaaattaaggtgtcagctagacctacattattttctgaaggctctaggggaaaattttgtccccttgactttttcagcttccacaggctgcctacattcctggatcatggccctgtcttctaatttcaaaatcagtggcatatcaccttctgtcttctctaacctctgcccatgcttacatctttctgtccctccttctgatcatcttgcctccctcttagaaggatgtttgtgattagattgggtccatccagatagcacaagataatctccctatataagaatccttaagtcaatcacatctgcagcccttttaccatggaaggtaccaccttcacaggttccagggactagaatatagatatcttcggggggggggccactatttaccttacccaccaaggtcaagaaaaaggaatgtgaacaagtgattaaaatttgactgaaattggagactaccaatatttaatggtgacaatctgtttaactgtgtgattgccatcatgcaaatagaaccccatgatctgccttttcttttgaaaattcttatggtcattttacagaatgagctatctttctgaagcccttgtgtcacgagagctgaaggacactttgtgcaggaaaggaaactggtcctggtacttctatggcacacagagatagggttgtttacagagttggtgaggtggacatgcctgtgtagtaaaataattttgccctgtaattatcaatgaattgccaggagtaagtttacacacagttatgttgcccatacacaacgttgctgtttgctgagtccagagttggactgtgttcactagataaaatcataaagagaggctactgtgtggttgaaagatacacaagcttgaaaaagacaattgattccatccaatcacaataagattacagaaaaaaatctcgtaagcaaagaatctttgggttctttataccagttccccataatttccccacttatacttgactgggagttctttatacctttgctatcaagcagttctcatacaccaggtgaataatgtgagatttagacagttgtcgttgtggagtagcctttctccagataaggcacagactgactggtagcagagacagaactcttcagtcgctagtcctctaaacacgtatactttataaaccactggaggattgaagtatctttttattatctgttttatcactagaatgtatattctatggggtaagaaatttatctgttttattcaccaaggtgtcttcagggcctaaacgaatctgaaacatgctgagtgctgaataaaaatttgttaaaattttgagttcaaactcaaatttgttgaaaaacatgagtaaaagaatacaacaaaactctacaatttattagcattattatttttattttaattactttgtaaacaaagacagcctagaaatatgcaggtaggttttggacaaatagaagaaattaaagcagaaaattataaaatgaaatggatgtgggagttcaagaaagattaaaacaaattttaaaacatggtggattatagttatcgatcttctgaggatcctaatttatataaactagcagcatctccagagacattggtaccaccatcccatagatactatgggatactataatgctttctttcattactcatgttctttcttttatacatatatatatatattttattatacttcaagttctagggtacatgtgcacaacgtgcaggtttgttacgtatgtatacatgtgcctagttggtgtgctgcacccattaactcgtcatttacattaggtatatctcctaatgctatccctctcccctccccccaccccacaacaggccccagtgtgtgatgttccccttcctgtgtccatgtgttctcattgttcaattcccacctctgagtgagaacaagcggtgtttggttttttgtccttgtgatagtttgctgagaatgatggtttccagcttcatccatgtccctgcaaaggacatgaactcatcattttttatggctgcatagtattccatggtgtatatgtgccacattttcttaatccagtctatcattgttggacatttgggttggttccaagtcttgctattgtgaatagtgctgcaataaatgtacgtgtgcatgtgtctttacagcagcatgatttataatcctttggtattattataatcctttgggtatatacccagtaatgggatggctgggtcaaatggtatttctggttctagatccctgaggacttgccacactgacttccacaatggttgaactagttttcagtcccaccaacagtgtaaaagtgttcctgtttctccacaccctctccagcacctgttgtttcctgactttttaatgatcaccattctaactggtgtgagatggtatctcattgtggttttgatttgcgtttctctgatggccagtgatgatgagcattttttcatgtgtctgttggctgcataaatgtcttcttttgagaagtgtctgttcatatccttcgcccacttgttgatggggttgtttgtttttttcttgtaaatttttttgagttctttgtggattctggatattagccctttgtcagatgagtagattgcaaaaattttctttcattctgtaggttgcctgttcactctgatggtagtttctttagctgtgcagaagctctttagtttaattagatcccatttgtcaattttggcttttgttgccattgcttttggtgttttagacatgaagtccttgcccatgcctatgtcctgaatggtattgcctaggttttcttctagggtttttatggttttaggtctaacatgtaagtctttaatccatcttgaattaatctttgtgtaaggtataaggaagggatccagtttcagctttctacatatggctagccagatttcccagcaccatttattaaatagggaatcctttccccatttcttgtttttgtcaggtttgtgaaagatcatatggttgtagatgtgtggtattatttctgagggctctgttgtgttccattggtctatatgtctgtttttgtaccagtaccatgctgttttggttactgtagccttgtagtatagtttgaagtcaggtagcacattactcatgttctttctttcagaaataggtcttagtagaaagtaaaaaatttcagtaggcataccgtgtcacctggaaagagtagaaacacaaaatccacttgaggaattcatttttctattttttgtgtgtgtacttacattttaccccttcagtttccatctaagccaatcatagtttctgagagcccagggtcctgtggataagccgcttcagtgcagccttcacttctttattccttgagctgtagatgatggggttcaacatgggagtcaccactgtggaagagagtgacagcagcttcttgctctcagaagaggcactggattggggtcggaaatacgtgaggatggcagtgctatagaagagagagacaaccaagaggtgggcggaacaggtggagaatgcctgatgtttcccctcagctgacggcatcctgaagatagtggagaggatgcggacataggatcccaggatcagcaagaaaggaaagagaatgaatgggacagtggctgtcagagcctccagttcaaacacagaggtgtcagcacagaccagtgcaataacaggagggctgtcacagaagaagtggttcaccctgttggggccacaaaaagggaaactgaaaatccatgtggtttgcacagtggccactgaaaaccctgagaaccaagaggcagctgccagctgggcacaggatatgtggcccatgatgactgggtagtgcaaggggtcacagatggccacgtagcggtcatatgccatggtggccaggaggcagcactcagcagccccaaaaaagaagaagaaatacatctgagtggcacatccaaggaaggagatggttgtgtcttgaatgatcagggtccccagcatcttgggcacaatgaccaagttgaaacctatctccaggaaggacaagtttctgaggaagaagtacataggactttgtagtgcagagtcagctatagtgaccaggatgatgaggacattgcccattaaagtaaccaagtaaatggtcaagaaaaggagaaacagtagagcctgaagctcagtggacagggctgagaagctcacgagaacaaattcactgacaattgtccagttttcccacatcattcttctgcccaggacttcactgggcattcaaaatctaggaaggtagaagaaatctcatatgttatttatacctttattatattcttataaaggggacctcctgtggcctcattctttactttccttgttagagttgttgaggatcaaacatctatactctccaaaatataataaaacaaatttgaccattagattcacaatttttggggaaagaattctacttttccagacttaattaacatactatatatatctatacatgtcctgatttttctgttctctgtagagaatgggcaaaatcacagctttatgttcatgctcctaccttatctctcttcaataatggtgctaagaaaggcaggccaagcatttatgaagagagaggtcgtgacacataatgaaaagtggtgaggtcaggcaggtatattttttgcaaaacaaaaatgtaggaaggagaaaatcaaagaaactgattcagcaattactaaatgattcctgaggaggagatccgaatgtgtctcaatctcaagaagcccatactcaggaaggtttcactatattgtgagaatctcaatttctacactctgaaaattgcagtgtaaacaagaagacacacaacatagtcagtgtggcttatcttgatcccagggatgagtattttccaagtggttgtatgtgtcaagatagcatcagaaccatggacagaatctagatgggttaagcatgaactttttcatcagctctcttggttgacttgtgtcttgactctcaagaaacttgaagctcacattttacatgttaataaaatacaacttaaatatgcaagtgtgactaatatgaaatcccatgaaaaggaaacaaaagatttcatcattgcattaataacgaagcttcaaaattgggaccctgaaattctttgtgatgactataaacatatggaggaataaaatctgaagcacttagcatgttgtctgctatactgtacatgttccatgaatgttaaccattataattattgatataatgctagacctatcttctaaatcttcttatccagctcattgccaaaactcactatagcccctactattcaatctctaaaataaaataattaattcagtaaatattgattatcagaagataattctgtatgctatgctctgttttagatactgaagataatacattagtaaataaaacaagcaaaaatctctgccctcataaaactcatcatagggaagacaggttataaacaaattctgttaagccaggcacggaggctcacgcctgtaatcacagctctttgggaggtggaggctggctgatcacctgagatcgggagttcaagaccagcctgaccaacatagagaaaccctgtctctactaaaaatacaaaattagctcggcgtggtggtgcatgcctgtaatcccagctactcaggaggctgaggcaggagaatcgctggaacacgggaggcggaagttgcggtgagccgagatcacaccattgcactccagcatgggcaacaagagcaaaattccactcaaaaattaattaattaattaattatgttagtagaaagtatggtatataagagcaatggagaagaataaagtagtagagaaggagacaaacatttagaggtggaaagtgtcagggaaagctccactgagaatatgatatttgagtaaagttctgagcaggtgcaagaagtgaatttaggttggtgaaggaaagagggcggtaaagagaaaaaaatgagaaaatgctattttaatttttttgctgattcatattcatttaaaacaattcaaccaaggaatcacttctcttatgaaaacatccttgatacctcatctactttcatagtaagaatgagcatttatgaagcagcaaataagcaccacacaccgttctaagtgttttgcatgtattatcttatttgattctcacaacacctgaagatacagatagtattatacccattttacagtcaaggaatctgagacacagataagttgagtagttttttcagcaagtgttggaatcctgggtggctgagtccaagtcagggatttggccgacaagtgacacttgcactcactttttcagaatgggaataaatctgagccacaggtgaggacaagccagtatccagtacagggtggtagtaagaacaaagcaacacaatttctaaagatgggcagaaaatttcaatatattagtaacattggagaactggaataccactttcatagttcttattttagaataatcattattgtatgtatttgtctcatacagtagatgacatgctccttgaaatagaaattgtgttattcatttttttaccccaatgcctagaaaggtagatgcccagtaaattgttattgaataatttaatagataatgaagaaaatgtggtaaataatcagggaaacatctacacagacacaaagtaagtacagtgagccccattcataaggaatttagacaaaggcacaaaagaatataatatagcatcatacaattcacacggactgaaacaatgataagagatataaatgtgcttgtctgcttcctccacctcaaacctcctctttgtagataccccatttcagtaaatggcaccaccccaaagtacaagccaggaactgggatataatcctttaatttgtgccccaaatttgattatttttactcctaaacactaattcagtgtcaccttctccagctctaccaccactgcctttaggttctggatttattttctctggcctagagtatggtaggaacctgcttctggttcattctcttcaaaccatccttggtttgtatgtgatctgtcttatcagcaactgtcttaccagttgctgtcttaaccagcaactctggttaagtcacttacctgcttaatgtctttcaattactccgtatggcccctgggataaagtaaatcctttaacaaggtcttttcctgtgatctctgcttatttttccagtttcaaatccccagtgtagctgatttttcagtcacacaaaaatgctttgtgttccttacacacatcatagtctctcagcactcctgtgtttgtgcatgtggcactcttctgttggaatcctttccctgaaactatgtacaactttttctttaggttttgggttattcttgtttgctttacttcaaattctttacccatactaaggactaccccctaccccagtacaaattgtctcagcatcaagcatcattgttctaatccaagcattgttggtattttcattctactgttgttgtatattttaaatatctactgtggcaacctccagcctcaatgagctgcctgcctgggcagtctacattgtctctctgggaaccaaatgttgtttctactaatgccttgtctttaaagttgcatgtattttgagtctagccctaaccctagccctacttccccataatatttttaatgtaaaggtttgcattacataagcttttcaggaatgcctacgtcatattaaaagggaaatacttggcctggcatggtggcccacgtctgtaatcccagcccttgggaggctgaggcaggcagatcacttgaggccaggagctccaacatggtaaaactgcatctctactaaaaaatacaaaaaaaaaaattagttgggcatggcttggcacgcctgtaatcccagctactcaagaggctgaggcatgagaattgattgaacccagaaggcagaagttgcagtgagccaagattgtgccattgcaccccagcagcctgagtaatagagcagacctttgtctcaaaaaaaaaaaaaaaaagaaagaaagaaaagaaaagagaaacacttgtgttgcatgcaatggctcacacttataatcccagcactttgagaggttcaggcagaaggattgcttgaactcagaagttcgataccagactgggtagcatagcaagacctcgtctctactaaaaaaaaatttttaaatggccaggcatggtgatgtacgcctatagtcccagccactagggagactgaggcaggaagatggcctgagcccaggtgtttgaggctacagtgagccataattctgctaccgcagtccagcctgggtgacagagagagagaccctgtctcaaacacaaaacaaaacaccagaaacacttgaacaattcttatttttgaagagttacagaaaagttggaggaagacaaacatgtaaaaataagtacatgtacagtttctacatgtagtatatacaaaatttaacgtatttattaataaacttgaaatgggtgcatacagaaagagtgatttctgcttcttgaggaatcacagtggggtcttgagagatgggatagatttggctaaaataaaagtgaaaaacaacctttcaagaagagaaaataaaacaccaagacatcaccaattgctaatcgtctaatctataactcaagtttcaatgaaatgcacacctttcctctgatttgatcatctgtttctttcttattcttcaaaatttatttcattcaaattaaaatttcattgagtttttataaaatattaaataatcgaaattctaaatatttcatgagaaatgttattgttgagttgtggggaaacaaacacctcataaattgctggtgggagcataaaatggtgcaataagttcagaggggagctagatagacaatcaatatatatagcaacattatgtatgtatttaacttttgcccaagaaactcaatttctagatttctatttgtcaggtacactagcaaaaatataaaaacagatatatggataagtccattatttacagcatgatttgtagtagtaaaagactggctaaataaattagggcacatctacaaatagagtactaccagattataagaaggagaaatcttgtggttaaagaagacttattctggagctttgttctcatcaaagcaaagctatgactgaaatttacgatattacttcaacaaaacataagaacttgaatatggaatagagatcttagggaagctcaggttgtttttcttgggaagaatctagtgtgaaggaaataattattggggttataaaggcatatgcatgtgaacttttgatctactctcatacatgcatactgcataccagtaagcttaaaagaactaacactgcttaagggcatgagaatgaagtaagatggtgaggagagttatgtgttgggaaagatcatgagattttctgtcatgaatgtagagtcagatctgcccagaagaggaaaagtgacaagatgatttttattgggttttaccctctgttactatgtgtgcccccatgttataatgactagcagtttcatattgtgcacaatgcacgtcacacagaaatataaacaccggccaggcgcggtggctcacgcctgtaatcccagcactttgggaggccgaggcgggtggatcacgaggtcaggagatcgagaccatcctggctaacacggtgaaaccctgtctctactaaaaaaatacaaaaaattagccgggcatggtggcgggcatctgtagtcccagctacttgggaggctgaggcaggagaacagcgtgaacccaggaggcggagcttgcagtgagcagagatgcgccactgcactccagcctgggggacagagcgagactccgtctcaaaaaaaaaaaaaaaaaagaaatataacacctggaaatagttggccacagaagtgctgtcataccagttgaaacaaggaaaacaatgtaagtctacaatgggcaggcagaggagttttcatagttggtggtgctaggtcgaaactacttctctgctcctttctctccactcagctttccaaaagccatttcagcaacaggacttcatcttattggagatgtggaaagatgcagagaggaatctcaaatctgggactgattgtttctcatccagtaaaatgtagccttacttcctaaggtctatgggatacagtttctgagggctagggccttagagaccgtcctgctgagggcattcttcacctcgttatttctcaggctgtagataatggggttcaacatgggagtcataacagtgtaggacaatgatagcagcttcttgccctcaggtgaattatttgatttaggccggaagtaggtgaggcttaatgatatatagaaaagagagacaacaaggaggtgtgaggaacatgtagaaaaggctttattcttccctttagctgatgggatcttgaggatggcagcagcaatgtgagtataggaacacaagatcagcaagcaggggatcatgaccaccagaatggttccgacgatggcgtagatctcaaagagtgctgtgtctgcacagaccagcctcagcacaggtgggctgtcacagaagaagtggttcaccttgttggtgccacagaatggaaaactgaagagccatgtggtctgcacagtagctacaggaaagcctgggaaccaggaggtagcagccagtttggcacgagtcctttggttcatgatgactgggtagtgcaagggactgcagatggccacatagcggtcatatgccatggtagccaggaggaagcattcagccactccaaagaagaagaagaaatacatctgagtggcacagccaaggaaggagatggttgtgtcctgggcaagcagggtccccagcattttgggcacaatgactaggttgaagccaatctccaggaaagataagtttctgaggaagaagtacatggggctgtgtagcatggggtcagctagggtaaccagaatgatgaggcagtttcccatcagggtgaccaggtagatggttagaaatgtcagaaagagtaatgactgtatttcagtaggcagggaagagaagctcatgaggataaactcacttattcttgtccagtttcctgtagctataagtgtgggcagaagtccccaactgtggtcatggagaaagattattgattggaagtcagattctcaatttgtttttcagactcgttcttactgtcagggaaagaggcaaggtcagcacctcaggcagaggaagtgccttgggttgtctaagaataaaacacaataaatagtagccagagcctaatctctgagatgggcctgaatcagcttctagaggagctgatatttctgttcacaccttaagttattcagaaagggcatgcaaagtcagaatcacaagtttctgaagggtccatcaaaggatacattttgggagaaagtgatgtttctgaaaacacttaaacttatgaaacacaccaagtgtttataatctcgtaaaagaacacatacatttaaatttatcaaaactttagaaatatatttataactatcatgaagaatgcatataatatgttttctactcttcatgaacctttcttgactggctagaatttgagaggagggtgaaaggttagcatgtattgaggaccatttacatatgcatgtttttgttcttttatatctctggtttatacatgaggaaactgatcccagataatttaagaaacacaaatcacatggaagatcttgaatccaaaccacatctattggattacaaaacccttcagatttttactaaatcatgctttgttggactgtcatgccttatctgatgactaacttattaatttgtaggagaattagaattggcatttctgcaaaatcacagtgaagacagacaaagataagcacgagaaccaacatcattagcattaagatgtttaggagatttcctagacacaactgaatcccaattttgtattactggtttctaatttgcagttggttatctagaggctcttcttattgtattcgtaatctagaatattgaagtctagtggagaaatggtgatattaagctggaaaatgaaattgagaggctgggataaataaaaaaagaaatgaatgtggttagcaaactatggttaaaaaaaattaataataaaaattaaaaactttattaggaacagtaaaaaccagaactgacacaaagtaaaagataaacaaagatatggtcagtgttttggatatattacattaatagacttatattacatgctgagaattttggactttattttatagatgaggagattcacctgaatatttgaagctgcagagtgacattgtcataatgctacttagaaggatcactctgacattgttgatagaatgggatagagaagggatcaaaagctgtaggcctcggatcaagaagactaggtggtatatctataattaccctccgtctttacgcacaatccattttcaagcagcagacaacttatttaaaagaggctaaatattagtcaggtcttggtgaataatttgaacttcaaggttatgtttaaaattccagagaatctatgaaggaaaaaacaccattcttataaaagaattataatcaaactgatctaagatttctcagaaatgctaaacattaaatgaagcaatgtctacagtttttagctcggtttcagaaaaacaaatgtaagtttaaaaaataataaaagaaccaatgatgaaaagacagatcatctcaactagaaactctttcactgtaggccaggcgtggtggctgatgcctgtaatcccaggactttgggagcctgaggcaggtggatcacttgagcctaggagtttgagaccagcctcagcaaggtggcgaaaccccatctctacaaaaaatggagaaaatatccagttgtggtggcatatgcctgttgtcctagctactcaggaggctgaggtgggaggatcaccagagctcgggaggttgaggctacattgagctgtgattgtgccactgcactccagcctgggtgacagagtgagactcagtctcaacaaaaaagaaaaaaaaagtaaagtaaaaaatagaaactctcttactgtcattccaaggcaagccagcccataagtaaacagaaaaggttatgggagatatgaagacaaaacactttaggttaatgagatgaaatccaagatatcaaatcaattgtttcccttttcaaaaacaagagtctgaaaggaagttgaaagacattaaattgtctttattacttactctcaacaaagccctataaaatattgaatatcgaggccaggcacggtggctcatgcctgtaatcccagcactttgggaggccaaggcaggaggatcacttgaggccaggagtttgaaaacagcctggccaacatgctgaaacaccctctctactaaaaatacaaaaattagctggccgtggtggcacatggctgtaatctcagctacttgggaggctgaggcacgagaattgcatgaactggggaggcagaggttgcagtgagccaagactgcaccgctgcattctagcctgggtgacagaaggagactctgtattaataataataataataatatagaatattgaataagtactcatgaaaatgacagtgtggggccagaaaagaccacctgggggacaaaacaaagccatgattattgaagttaaaccttgtggagcaaaatgccagaaacttaagaaaactgagtcaattagaatacaaatttgaaaaattacacccaagttactgggaaaaattatgaaaacataacaattataagaggaataatgaagtaaaatacaagaaataaaatcactataacaggtattccagaatgacagaaagaatggagaggggtagaaataatatccaaagaagtaccagaggaagaataaatgtctctgatctaatggaagagatgactttttgaaccaaaagaatccctaagtatgaaagaaaattttaatatattcacacaaacatgtttttattttactgaaagatttttttttaattctgaaaatagagaaaagttctgataagtaaccaaactggaaaatgattaaaacaaaataaaacaaaacaaaaataccccctataaaccacaaccaaacaaaaaaataaagtattcaccattagggaaatgcatatatgcttataaagaccccaatgatatatcactacacacatataagaatgggttaaaaaaaaagtgacaacaccaaatgctggtgaggatttgatgaattggatcattcatacattgctcatgaaaatgtaaatagtatcagagatgttcaatcttttggcttccctgggccacatgggaagaagaattggctgataagctaaaattaaaaaaaaagaaatctcataaaggtttaagaaagtttacaaatttgtgttgggccacatgcaaagccgtcctggtctgcatgcagcccgcagggttggacaagcttggtatagccactgcagaaaacagtttgacagttctttaaaaaaactaagcatgtaactgtggtacaaccagtaattgtacctttgggtatttatccctgagaaatgaagactatgttcatataaaaacatgaatattcctcagtgctgtattcataatagcctcaaattgttaaaaacccagatgatgaaacaaattatgatgcatttataccttagtaaactcagcaatagagaggatgaactattgatacatgcaataacatgaatgaatttacagataattctgagtgaataaaacagacacatattttattattccacttacataacatttctgtaatgacaaaattataggaatggaaaagagattagtgattgccagtgactaacgagagggtggggacaagagggaagcaggtctggatataaaagaccaaggtgggagattttcctagcaatggaatcctctgctatggagggtcatttggatgtttgcaaatactttcatcattacatgattttgttgacagaaatgattatgtctcctgtaaaactccatatttactcacataaaaaactgataaaaagaattgctaatgattttttttaaatctgctaaatatagagttgcaataagctttgaacacattttttaaaataataaaaga

SEQ ID NO: 1215 - protein, 317 aa, Homo sapiens
  ref <308>: DATABASE ACCESSION NUMBER: SWISS-Prot / AAG45206
  ref <309>: DATABASE ENTRY DATE: 2002-06-15
MAIGNWTEISEFILMSFSSLPTEIQSLLFLTFLTIYLVTLKGNSLIILVTLADPMLHSPMYFFLRNLSFLEIGFNLVIVPKMLGTLLAQDTTISFLGCATQMYFFFFFGVAECFLLATMAYDRYVAICSPLHYPVIMNQRTRAKLAAASWFPGFPVATVQTTWLFSFPFCGTNKVNHFFCDSPPVLKLVCADTALFEIYAIVGTILVVMIPCLLILCSYTRIAAAILKIPSAKGKHKAFSTCSSHLLVVSLFYISSSLTYFWPKSNNSPESKKLLSLSYTVVTPMLNPIIYSLRNSEVKNALSRTFHKVLALRNCIP

SEQ ID NO: 1216 - DNA, 669 bp, Rattus norvegicus
  misc_feature (1)..(669): n=a, c, g or t
  ref <308>: DATABASE ACCESSION NUMBER: EMBL / AF091563
  ref <309>: DATABASE ENTRY DATE: 1998-10-20
ggcaacatgtctctcctggagattggctatactttttctgtcatacccaagatgctgcagagccttgtgagtgaggcccgagggatctctcgggagggatgtgccacacagatgtttttcttcacactttttggtataagtgagtgctgcctattggcggccatggcctttgaccgctgtatagccatatgctccccactccactatgcaacccgaatgagtcgtggggtatgtgcccatttggcaattgtttcatggggaacaggttgcattgtggggttgggacaaaccaattttattttctccttaaacttttgtgggccctgtgagatagaccacttcttctgtgaccctttccaacttttcctgggcacttgcctgtgggagatacatcccaaaacggaggctgccatctttgtggtagcaatcctctgtatatctagtccgtttttactgatcatttattcttatgtcagaattctggtcgcagtgctcgtgatgccttcacctgaggggcgccataaagctttttccacctgttcgtcccacctacttgtagtcacactcttctatggctcaggatccattaactacttgaggcccaaatctagccattcaccaggaattgatagactcttggctctcttntacacagcagtgacatccatg

SEQ ID NO: 1217 - protein, 223 aa, Rattus norvegicus
  misc_feature (1)..(223): Xaa=Unknown amino acid
  ref <308>: DATABASE ACCESSION NUMBER: SWISS-Prot / AAC64586
  ref <309>: DATABASE ENTRY DATE: 2003-02-01
GNMSLLEIGYTFSVIPKMLQSLVSEARGISREGCATQMFFFTLFGISECCLLAAMAFDRCIAICSPLHYATRMSRGVCAHLAIVSWGTGCIVGLGQTNFIFSLNFCGPCEIDHFFCDPFQLFLGTCLWEIHPKTEAAIFVVAILCISSPFLLIIYSYVRILVAVLVMPSPEGRHKAFSTCSSHLLVVTLFYGSGSINYLRPKSSHSPGIDRLLALXYTAVTSM

SEQ ID NO: 1218 - DNA, 31737 bp, Homo sapiens; identical to SEQ ID NO: 1214
  ref <308>: DATABASE ACCESSION NUMBER: EMBL / AF321237
  ref <309>: DATABASE ENTRY DATE: 2001-06-21

SEQ ID NO: 1219 - protein, 315 aa, Homo sapiens
  ref <308>: DATABASE ACCESSION NUMBER: SWISS-Prot / AAG45205
  ref <309>: DATABASE ENTRY DATE: 2002-06-15
MMWENWTIVSEFVLVSFSALSTELQALLFLLFLTIYLVTLMGNVLIILVTIADSALQSPMYFFLRNLSFLEIGFNLVIVPKMLGTLIIQDTTISFLGCATQMYFFFFFGAAECCLLATMAYDRYVAICDPLHYPVIMGHISCAQLAAASWFSGFSVATVQTTWIFSFPFCGPNRVNHFFCDSPPVIALVCADTSVFELEALTATVPFILFPFLLILGSYVRILSTIFRMPSAEGKHQAFSTCSAHLLVVSLFYSTAILTYFRPQSSASSESKKLLSLSSTVVTPMLNPIIYSSRNKEVKAALKRLIHRTLGSQKL

SEQ ID NO: 1220 - DNA, 669 bp, Rattus norvegicus; identical to SEQ ID NO: 1216
  misc_feature (1)..(669): n=a, c, g or t
  ref <308>: DATABASE ACCESSION NUMBER: EMBL / AF091563
  ref <309>: DATABASE ENTRY DATE: 1998-10-20

SEQ ID NO: 1221 - protein, 223 aa, Rattus norvegicus; identical to SEQ ID NO: 1217
  misc_feature (1)..(223): Xaa=Unknown amino acid
  ref <308>: DATABASE ACCESSION NUMBER: SWISS-Prot / AAC64586
  ref <309>: DATABASE ENTRY DATE: 2003-02-01

SEQ ID NO: 1222 - DNA, 31737 bp, Homo sapiens; identical to SEQ ID NO: 1214
  ref <308>: DATABASE ACCESSION NUMBER: EMBL / AF321237
  ref <309>: DATABASE ENTRY DATE: 2001-06-21

SEQ ID NO: 1223 - protein, 315 aa, Homo sapiens; identical to SEQ ID NO: 1219
  ref <308>: DATABASE ACCESSION NUMBER: SWISS-Prot / AAG45205
  ref <309>: DATABASE ENTRY DATE: 2002-06-15

SEQ ID NO: 1224 - DNA, 663 bp, Rattus norvegicus
  ref <308>: DATABASE ACCESSION NUMBER: EMBL / AF091569
  ref <309>: DATABASE ENTRY DATE: 1998-10-20
cttaacctgtcctttgccgacctctgcttttcctctgtcacaatgcccaagttgttgcagaacatgcagagccaagttccatccatcccctatgcagggtgcctggcacagatatacttctttctgttttttggagaccttggaaacttcctgcttgtggccatggcctatgaccgctacgtggccatctgcttcccccttcattacatgagcatcatgagccccaagctctgtgtgagtctggtggtgctgtcctgggtgctgaccaccttccatgccatgctgcacaccctgctcatggccagattgtcattccgtgaggacagtgtgatccctcactatttctgtgatatgtctactctgctgaaagtggcttgtcctgacacccatgataatgaattagcaatatttatcttagggggccctatagttgtactacctttccttctcatcattgtttcttatgcaagaattgtttcctccatcttcaaggtcccttcttctcaaagcatccataaagccttctccacctgtggctcccacctgtctgtggtgtcactgatctatgggacagtcattggtctctacttatgtccttcagctaataactccactgtgaaggagactgtcatgtctttgatgtacacaatggtgacacccatg

SEQ ID NO: 1225 - protein, 221 aa, Rattus norvegicus
  ref <308>: DATABASE ACCESSION NUMBER: SWISS-Prot / AAC64591
  ref <309>: DATABASE ENTRY DATE: 2003-02-01
LNLSFADLCFSSVTMPKLLQNMQSQVPSIPYAGCLAQIYFFLFFGDLGNFLLVAMAYDRYVAICFPLHYMSIMSPKLCVSLVVLSWVLTTFHAMLHTLLMARLSFREDSVIPHYFCDMSTLLKVACPDTHDNELAIFILGGPIVVLPFLLIIVSYARIVSSIFKVPSSQSIHKAFSTCGSHLSVVSLIYGTVIGLYLCPSANNSTVKETVMSLMYTMVTPM

SEQ ID NO: 1226 - DNA, 945 bp, Homo sapiens
  ref <308>: DATABASE ACCESSION NUMBER: EMBL / AF087916
  ref <309>: DATABASE ENTRY DATE: 2000-03-06
atgatgggacaaaatcaaaccagcatctcagacttcctgctcctgggcctgcccatccaaccagagcagcaaaacctgtgctatgccctgttcttggccatgtatcttaccaccctcctggggaacctcctcatcattgtcctcattcgactggactcccatctccacacgcctatgtatttgtttctcagcaacttgtccttctctgacctctgcttctcttccgtgaccattcccaagttgttacagaacatgcagaaccaggacccatccatcccctatgcggactgcctgacccaaatgtacttcttcctgttatttggagacctggagagcttcctccttgtggccatggcctatgaccgctatgtggccatctgcttccccctgcactacaccgccatcatgagccccatgctctgtctcgccctggtggcgctgtcctgggtgctgaccaccttccatgccatgttacacactttactcatggccaggttgtgtttttgtgcagacaatgtgatcccccactttttctgtgatatgtctgctctgctgaagctggccttctctgacactcgagttaatgaatgggtgatatttatcatgggagggctcattcttgtcatcccattcctactcatccttgggtcctatgcaagaattgtctcctccatcctcaaggtcccttcttctaagggtatctgcaaggccttctctacttgtggctcccacctgtctgtggtgtcactgttctatggaaccgttattggtctctacttatgctcatcagctaatagttctactctaaaggacactgtcatggctatgatgtacactgtggtgacccccatgctgaaccccttcatctacagcctgaggaacagagacatgaagggagccctgagcagagtcattcatcagaagaaaactttcttctctctctga

SEQ ID NO: 1227 - protein, 314 aa, Homo sapiens
  ref <308>: DATABASE ACCESSION NUMBER: SWISS-Prot / AAF37309
  ref <309>: DATABASE ENTRY DATE: 2002-06-15
MMGQNQTSISDFLLLGLPIQPEQQNLCYALFLAMYLTTLLGNLLIIVLIRLDSHLHTPMYLFLSNLSFSDLCFSSVTIPKLLQNMQNQDPSIPYADCLTQMYFFLLFGDLESFLLVAMAYDRYVAICFPLHYTAIMSPMLCLALVALSWVLTTFHAMLHTLLMARLCFCADNVIPHFFCDMSALLKLAFSDTRVNEWVIFIMGGLILVIPFLLILGSYARIVSSILKVPSSKGICKAFSTCGSHLSVVSLFYGTVIGLYLCSSANSSTLKDTVMAMMYTVVTPMLNPFIYSLRNRDMKGALSRVIHQKKTFFSL

SEQ ID NO: 1228 - DNA, 663 bp, Rattus norvegicus
  ref <308>: DATABASE ACCESSION NUMBER: EMBL / AF091570
  ref <309>: DATABASE ENTRY DATE: 2000-03-03
ggcaatatgtccttctctgacctctgcttttcctctgttacgatgcccaagttgttgcagaacatgcagagccaagttccatccatcccctatgtaggctgcctgtcacaaatatacttctttctgttttttggagacctcgggaacttcctgcttgtggccatggcctatgaccgctatgtggccacctgcttcccccttcattacatgagcatcatgagccccaagctctgtgtgagtctggtggtgctgtcctgggtgcggactaccttccatgccatgctgcacaccctgctccatggccagattgtcattctgtgaggacaatgtgatccccactttttctgtgacatgtctgctctgctaaagctggcctgctctgacacccgtgttaatgaggttgtgatatttattgtggtcagcctctttcttgtccttccatttgccctcattatcatgtcctatgtaagaattgtgtcttccattctcaaggtcccttcttctcaaggtatttacaaagccttttccacatgtggatctcacctgtctgtagtgtcactgttctatgggacagtcattggtctctatttatgtccttccagtaataattctactgtgaaggagactgtcatgtctttgatgtacacagcggtgactcccatg

SEQ ID NO: 1229 - protein, 314 aa, Rattus norvegicus
  ref <308>: DATABASE ACCESSION NUMBER: SWISS-Prot / CAA68842
  ref <309>: DATABASE ENTRY DATE: 2003-02-01
MTERNQTVISQFLLLGLPIPPEHQHVFYALFLSMYLTTVLGNLIIIILILLDSHLHTPMYLFLSNLSFSDLCFSSVTMPKLLQNMQSQVPSIPYAGCLSQIYFFLFFGDLGNFLLVAMAYDRYVAICFPLHYMSIMSPKLCVSLVVLSWVLTTFHAMLHTLLMARLSFCEDNVIPHFFCDMSALLKLACSDTRVNEVVIFIVVSLFLVLPFALIIMSYVRIVSSILKVPSSQGIYKAFSTCGSHLSVVSLFYGTVIGLYLCPSSNNSTVKETVMSLMYTVVTPMLNPFIYSLRNRDIKGAMERIFCKRKIQLNL

SEQ ID NO: 1230 - DNA, 945 bp, Homo sapiens; identical to SEQ ID NO: 1226
  ref <308>: DATABASE ACCESSION NUMBER: EMBL / AF087916
  ref <309>: DATABASE ENTRY DATE: 2000-03-06

SEQ ID NO: 1231 - protein, 314 aa, Homo sapiens; identical to SEQ ID NO: 1227
  ref <308>: DATABASE ACCESSION NUMBER: SWISS-Prot / P30953
  ref <309>: DATABASE ENTRY DATE: 2002-06-15

SEQ ID NO: 1232 - DNA, 663 bp, Rattus norvegicus
  ref <308>: DATABASE ACCESSION NUMBER: EMBL / AF091578
  ref <309>: DATABASE ENTRY DATE: 1998-10-20
ggtaatctgtccttcgttgacctctgttactcttctgttattgtccccaaagccatggccaacttactttcttccactaaggccatcagctttgcaggatgtgccactcagttcttccttttctcccttctggttactactgaaagctttctattggcagtcatggcctacgatcgcttcatggccatctgcagtcccctgaggtaccctgtgaccatgtgccctatggcatgtgcccgtctggtcctgggtgcctactgtggtggctgcctgcactccatcatagagagcagcctcacgttccggctgcccttctgcagctccaaccgtatcaaccacttctactgtgatgtgcccccattgctccagctggcctgtgctgacacaactctcaatgagcttgtcatgtttggcatctgtggactcatcatcgtgtctaccactctcgtggtcctggtctcctatggctacatcacagtgaccattctcaggatgcgctctgggtcaggccggcacaagctcttctctacttgtggctcacacatgacagctgtgtccttgttttatggaactgtgtttgtcatgtatgctcagccaggcgctctaacatccatggagcaggggaaagtggcctctgtcttctacgccctggttatccccatg

SEQ ID NO: 1233 - protein, 221 aa, Rattus norvegicus
  ref <308>: DATABASE ACCESSION NUMBER: SWISS-Prot / AAC64598
  ref <309>: DATABASE ENTRY DATE: 2003-02-01
GNLSFVDLCYSSVIVPKAMANLLSSTKAISFAGCATQFFLFSLLVTTESFLLAVMAYDRFMAICSPLRYPVTMCPMACARLVLGAYCGGCLHSIIESSLTFRLPFCSSNRINHFYCDVPPLLQLACADTTLNELVMFGICGLIIVSTTLVVLVSYGYITVTILRMRSGSGRHKLFSTCGSHMTAVSLFYGTVFVMYAQPGALTSMEQGKVASVFYALVIPM

SEQ ID NO: 1234 - DNA, 945 bp, Homo sapiens
  ref <308>: DATABASE ACCESSION NUMBER: Refseq / NM_006637
  ref <309>: DATABASE ENTRY DATE: 2000-11-01
atggaatttacagatagaaactacacgttggtcactgagtttattctattaggttttccaactcgccctgaactgcagattgtcctgttcctcatgtttctgacattgtatgctataattctgatagggaacattggattgatgctgttgatcaggattgatcctcaccttcaaacccccatgtattttttccttagcaacctatcatttgtagacctttgctatttctcagacattgttcccaaaatgctggtcaatttcctctcggagaacaaatctatttcctattatgggtgtgccctgcagttttattttttctgtacttttgcagatacagaatccttcatcctggccgccatggcctatgatcgctatgtcgccatctgtaaccctttattgtacacagttgtgatgtctaggggcatctgtatgcggttgattgtcttgtcataccttggaggcaacatgagttccctggttcacacatcctttgcctttattctgaaatattgtgacaaaaatgttattaatcattttttctgtgacctccctcccctgcttaaactatcctgcactgacacaacaattaatgagtggctcctctccacatacggcagctcagtggaaatcatttgttttatcatcatcatcatctcctactttttcattcttctctcagtcttaaagatccgctctttcagtgggaggaagaagaccttttctacatgcgcctctcacctgacttcagtgacgatctaccaagggactctcctctttatttactcacggcccagctacctgtattctccaaacactgataaaattatctcagtgttctacaccattttcattccagtgctgaatccgttgatttatagtttgagaaataaagatgtaaaggatgcagctgagaaagttctaagatcaaaggtagattcttcatga

SEQ ID NO: 1235 - protein, 314 aa, Homo sapiens
  ref <308>: DATABASE ACCESSION NUMBER: Refseq / NP_006628
  ref <309>: DATABASE ENTRY DATE: 2000-11-01
MEFTDRNYTLVTEFILLGFPTRPELQIVLFLMFLTLYAIILIGNIGLMLLIRIDPHLQTPMYFFLSNLSFVDLCYFSDIVPKMLVNFLSENKSISYYGCALQFYFFCTFADTESFILAAMAYDRYVAICNPLLYTVVMSRGICMRLIVLSYLGGNMSSLVHTSFAFILKYCDKNVINHFFCDLPPLLKLSCTDTTINEWLLSTYGSSVEIICFIIIIISYFFILLSVLKIRSFSGRKKTFSTCASHLTSVTIYQGTLLFIYSRPSYLYSPNTDKIISVFYTIFIPVLNPLIYSLRNKDVKDAAEKVLRSKVDSS

SEQ ID NO: 1236 - DNA, 534 bp, Rattus norvegicus
  ref <308>: DATABASE ACCESSION NUMBER: EMBL / AF091834
  ref <309>: DATABASE ENTRY DATE: 2000-12-10
gagcagagacggctcggtgccaacagcggcctgcacatcatcatctttgatgaaatcgacgccatctgcaagcagagagggagcatggccggcagcaccggggtgcacgacactgtggtcaaccagctgctgtccaagatcgatggcgtcgagcagctgaacaacatcctcgttattggaatgaccaatcgaccagatttgattgatgaggctctccttcgacctggaagactggaagttaagatggagataggcttaccagatgagaagggccgactgcagatccttcacatccacacagcaaggatgcgagggcaccagctactgtctgcggatgtggacatcaaggaactggctgtggagactaagaatttcagtggcgccgagctggagggcctggtgcgagcagcgcagtccacagccatgaacagacacataaaggccagcacaaaagtggaagtagacatggagaaggcagagagcctgcaggtgacaagaggggacttcctcgcttccctggagaatgatatcaag

SEQ ID NO: 1237 - protein, 178 aa, Rattus norvegicus
  ref <308>: DATABASE ACCESSION NUMBER: SWISS-Prot / AAC61595
  ref <309>: DATABASE ENTRY DATE: 2002-03-01
EQRRLGANSGLHIIIFDEIDAICKQRGSMAGSTGVHDTVVNQLLSKIDGVEQLNNILVIGMTNRPDLIDEALLRPGRLEVKMEIGLPDEKGRLQILHIHTARMRGHQLLSADVDIKELAVETKNFSGAELEGLVRAAQSTAMNRHIKASTKVEVDMEKAESLQVTRGDFLASLENDIK

SEQ ID NO: 1238 - DNA, 3960 bp, Homo sapiens
  ref <308>: DATABASE ACCESSION NUMBER: Refseq / NM_006178
  ref <309>: DATABASE ENTRY DATE: 2001-03-14
gcgggggcgggctttgccgagcgcagagctgcagccgccgagccggacgtgtgcgcgaagatggcgggccggagcatgcaagcggcaagatgtcctacagatgaattatctttaaccaattgttcagttgtgaatgaaaaggatttccagtctggccagcatgtgattgtgaggacctctcccaatcacaggtacacatttacactgaagacacatccatcggtggttccagggagcattgcattcagtttacctcagagaaaatgggctgggctttctattgggcaagaaatagaagtctccttatatacatttgacaaagccaaacagtgtattggcacaatgaccatcgagattgatttcctgcagaaaaaaagcaatgactccaacccttatgacaccgacaagatggcagcagaatttattcagcaattcaacaaccaggcctactcagtgggacaacagcttgtctttagcttcaatgaaaagctttttggcttactggtgaaggacattgaatccatggatcctagcatcctgaagggagagcctgcgacagggaaaaggcagaagattgaagtaggactggttgttggaaacagtcaagttgcatttgaaaaagcagaaaattcgtcacttaatcttattggcaaagctaaaaccaaggaaaatcgccaatcaattatcaatcctgactggaactttgaaaaaatgggaataggaggtctagacaaggaattttcagatattttccgacgagcatttgccttccgagtatttcctccagagattgtggagcagatgggttgtatacatgttaaaggcatcctgttatatggacccccaggttgtggtaagactctcttggctcgacagattggcaagatgttgaatgcaagagagcccaaagtggtcaatgggccagaaatccttaacaaatatgtgggagaatcagaggctaacattcgcaaactttttgctgatgctgaagaggagcaaaggaggcttggtgctaacagtggtttgcacatcatcatctttgatgaaattgatgccatctgcaagcagagagggagcatggctggtagcacgggagttcatgacactgttgtcaaccagttgctgtccaaaattgatggcgtggagcagctaaacaacatcctagtcattggaatgaccaatagaccagatctgatagatgaggctcttcttagacctggaagactggaagttaaaatggagataggcttgccagatgagaaaggccgactacagattcttcacatccacacagcaagaatgagagggcatcagttactctctgctgatgtagacattaaagaactggccgtggagaccaagaatttcagtggtgctgaattggagggtctggtgcgagcagcccagtccactgctatgaatagacacataaaggccagtactaaagtggaagtggacatggagaaagcagaaagcctgcaagtgacgagaggagacttccttgcttctttggagaatgatatcaaaccagcctttggcacaaaccaagaagattatgcaagttacattatgaacggtatcatcaaatggggtgacccagttactcgagttctagatgatggggagctgctggtgcagcagactaagaacagtgaccgcacaccattggtcagcgtgcttctggaaggccctcctcacagtgggaagactgctttagctgcaaaaattgcagaggaatccaacttcccgttcatcaagatctgttctcctgataaaatgattggcttttctgaaacagccaaatgtcaggccatgaagaagatctttgatgatgcgtacaaatcccagctcagttgtgtggttgtggatgacattgagagattgcttgattacgtccctattggccctcgattttcaaatcttgtattacaggctcttctcgttttactgaaaaaggcacctcctcagggccgcaagcttcttatcattgggaccactagccgcaaagatgtccttcaggagatggaaatgcttaacgctttcagcaccaccatccacgtgcccaacattgccacaggagagcagctgttggaagctttggagcttttgggcaacttaaaggataaggaacgcaccacaattgcacagcaagtcaaagggaagaaggtctggataggaatcaagaagttactaatgctgatcgagatgtccctacagatggatcctgaataccgtgtgagaaaattcttggccctcttaagagaagaaggagctagcccccttgattttgattgaaaatgaactatttgaaacacacagtgaccaagggaagtgaccaaggtgaagatggcctaggatcttcactgtcttactcaagatactggactaagtggaacgttctctaccttcaacatgtgctcgctctgcatgattagtgcaataaaactcccttccttatgcatactgagatagcttagtgtctcgtggaaggtgtcaatttggtttagaatgctgcgcttaccttcccatgcaggctaaagtgattccttcttgctcagtccctctgggtgggaaccatccagtacttgtggacactacacgtttcaacctctctactagcaccatcacccttgaaaactctcagtcagtgtcatgaatgttgcatgacaacagttggccgattagaaggcagactttctacatgcaaatctggcttagtaaatcgaggtgtgggccagagatcctctgacagctgtcctgagctaacactaaaagtcactgggtatttggttaaaggtctcccacaagactggtattctctttgcctgaagaaacaaggcattgaatctctaaaatgctgttctcaatcattgtcagagatgttttcaagttgcagtcagaagatctttcttaatagaaagtcagatgactaccgtgttggttgtgacttccccttaagtataactaatttgctctgtggtaagagatatgctcattattaccacttagaagatgttgttaaaaacatgtgaaagataggtatggaaaaagcatacacccccaaacagaaaggagttattaaagtaatttacaaacctctcagcactaattagtgtccaactccaagtgggtcaattccttagtataatattaaggcttactagtatcactgctttttccttagcttaatgacttacttagaatttatcctttattttaaatgatctgtactatctagtgtctaaaacactattctccagaaaaatcaatcattttctagccctctccctcagtcctttattgtccattccaatacattgaacacatttcctttaccctccacacacttcttccaaaaggaagcacccgttgagtccttttgagggtgatttgtcttacaactgactgacttagcaggaatttaattaggtcatatttggtgatgagacttatggagtgtgcctctctctcccaactgctgcttaaaatgcaaggacaagcaattagaagccatcctaaggtgcttacctcacacgccacccatgaggcttgtggccacagtggcacttgggtgtggctcctctgttatttgtcctcatgtgagaaagcagatcatctccaaatcttgccatttgtatacttttggtggagacttggatgtcatatcttctttgttttgggttttcttccctagcttattttgtggcttttaaagaagtggattgtattgtgagatcctgtgattcctggtggccagtatcctggattcctctaagatcttgcctctttcctcctcatgaaagcagcacacattgtgttaacttatgtctcttgttaaatgagcttaatgtctttgtgttttgtccaaaactgtattgaaaaaatattgtttaatgcaaatgaaggaatgcaataaagagtaaatatacttgaaaaaaaaaaaaaaaaaaaaaaaaaaaa

SEQ ID NO: 1239 - protein, 744 aa, Homo sapiens
  ref <308>: DATABASE ACCESSION NUMBER: SWISS-Prot / P46459
  ref <309>: DATABASE ENTRY DATE: 2002-06-15
MAGRSMQAARCPTDELSLTNCSVVNEKDFQSGQHVIVRTSPNHRYTFTLKTHPSVVPGSIAFSLPQRKWAGLSIGQEIEVSLYTFDKAKQCIGTMTIEIDFLQKKSNDSNPYDTDKMAAEFIQQFNNQAYSVGQQLVFSFNEKLFGLLVKDIESMDPSILKGEPATGKRQKIEVGLVVGNSQVAFEKAENSSLNLIGKAKTKENRQSIINPDWNFEKMGIGGLDKEFSDIFRRAFAFRVFPPEIVEQMGCIHVKGILLYGPPGCGKTLLARQIGKMLNAREPKVVNGPEILNKYVGESEANIRKLFADAEEEQRRLGANSGLHIIIFDEIDAICKQRGSMAGSTGVHDTVVNQLLSKIDGVEQLNNILVIGMTNRPDLIDEALLRPGRLEVKMEIGLPDEKGRLQILHIHTARMRGHQLLSADVDIKELAVETKNFSGAELEGLVRAAQSTAMNRHIKASTKVEVDMEKAESLQVTRGDFLASLENDIKPAFGTNQEDYASYIMNGIIKWGDPVTRVLDDGELLVQQTKNSDRTPLVSVLLEGPPHSGKTALAAKIAEESNFPFIKICSPDKMIGFSETAKCQAMKKIFDDAYKSQLSCVVVDDIERLLDYVPIGPRFSNLVLQALLVLLKKAPPQGRKLLIIGTTSRKDVLQEMEMLNAFSTTIHVPNIATGEQLLEALELLGNLKDKERTTIAQQVKGKKVWIGIKKLLMLIEMSLQMDPEYRVRKFLALLREEGASPLDFD

SEQ ID NO: 1240 - DNA, 534 bp, Rattus norvegicus; identical to SEQ ID NO: 1236
  ref <308>: DATABASE ACCESSION NUMBER: EMBL / AF091834
  ref <309>: DATABASE ENTRY DATE: 2000-12-10

SEQ ID NO: 1241 - protein, 178 aa, Rattus norvegicus; identical to SEQ ID NO: 1237
  ref <308>: DATABASE ACCESSION NUMBER: SWISS-Prot / AAC61595
  ref <309>: DATABASE ENTRY DATE: 2002-03-01

SEQ ID NO: 1242 - DNA, 3960 bp, Homo sapiens; identical to SEQ ID NO: 1238
  ref <308>: DATABASE ACCESSION NUMBER: Refseq / NM_006178
  ref <309>: DATABASE ENTRY DATE: 2001-03-14

SEQ ID NO: 1243 - protein, 744 aa, Homo sapiens; identical to SEQ ID NO: 1239
  ref <308>: DATABASE ACCESSION NUMBER: SWISS-Prot / P46459
  ref <309>: DATABASE ENTRY DATE: 2002-06-15

SEQ ID NO: 1244 - DNA, 2148 bp, Rattus norvegicus
  ref <308>: DATABASE ACCESSION NUMBER: EMBL / AF092450
  ref <309>: DATABASE ENTRY DATE: 1998-10-01
atggcggagcgagagagcggcctgagcgggggtgccgcgtccccaccggccgcttccccattcctgggactgcacatcgcgtcgcctcccaatttcaggctcacccatgatgtcagcctggaggagtttgaggatgaagacctttcggagatcactgatgagtgtggcatcagcctgcagtgcaaagacaccttgtctctccggatggacctgatcgacgcggcaagtgacactccgggcgccgaggacgacgaagaggacgacgacgagctcgctgcccaacggccaggagtggggccttccaaagccgagtctggccaggagccggcgtctcgcagccagggtcagggccagggccccggcacaggcagcggagacacctaccggcccaagaggcctaccacgctcaaccttttcccgcaggtgccgcggtctcaggacacgctgaataataactctttaggcaaaaagcacagttggcaggaccgtgtgtctcgatcatcctcccctctgaagacaggggagcagacgcctccacatgaacatatctgcctgagtgatgagctgccgccccagggcagtcctgttcccacccaggatcgtggcacttccaccgacagcccttgtcgccgtactgcagccacccagatggcacctccaagtggtccccctgccactgcacctggtggccggggccactcccatcgagatcgaatccactatcaggcagatgtgcggctcgaggcgactgaggagatctacctgaccccagtgcagaggcccccagaccctgcagaacccacctccaccttcttgccacccactgagagccggatgtctgtcagctcggatcctgaccctgccgcttactctgtaactgcagggcgaccgcacccttccatcagtgaagaggatgagggcttcgactgtctgtcatccccagagcaagctgagccaccaggtggagggtggcggggaagcctcggggagccaccaccgcctccacgggcctcactgagctcggacaccagcgcactgtcctacgactctgtcaagtacacactggtggtggatgagcatgcccagcttgagttggtgagcctgcggccatgttttggagattacagtgacgaaagcgactctgccactgtctatgacaactgtgcctctgcctcctcgccctacgagtcagccattggtgaggaatatgaggaggcccctcaaccccggcctcccacctgcctgtcagaggactccacaccggatgagcctgacgtccacttctctaagaagtttctgaatgtcttcatgagtggtcgctctcgttcctccagtgccgagtcctttgggctgttctcctgtgtcatcaatggggaggagcatgagcaaacccatcgggctatattcaggtttgtgcctcggcatgaagatgaacttgagctggaagtggacgaccctctgctggtggagctgcaggcagaagactattggtatgaggcctataacatgcgcactggagcccgtggtgtctttcctgcctactatgccattgaggtcaccaaggagcctgagcacatggcagcccttgccaaaaacagcgactggattgaccagttccgggtgaagttcctgggctctgtccaggttccttatcacaagggcaatgatgtcctctgtgctgctatgcaaaagatcgccaccacccgccggctcaccgtgcactttaacccgccctccagctgtgtccttgaaatcagcgttaggggtgtcaagataggtgtcaaagctgatgaagctcaggaggccaagggaaataaatgtagccactttttccagctaaaaaacatctctttctgtgggtaccatccaaagaacaacaagtactttgggtttatcactaagcaccctgctgaccaccggtttgcctgccatgtctttgtgtctgaagattccaccaaagccctggcagagtctgtggggcgtgcatttcagcagttctacaagcaatttgtggaatatacctgtcctacagaagatatctacttggagcccatggcccaggtgcagctgcaggtcgacctcgagatcaaacgggcggccgcagaacaaaaactcatctcagaagaggatctgaatggggccgcatag

SEQ ID NO: 1245 - protein, 708 aa, Rattus norvegicus
  ref <308>: DATABASE ACCESSION NUMBER: SWISS-Prot / Q9R237
  ref <309>: DATABASE ENTRY DATE: 2002-06-15
MAERESGLSGGAASPPAASPFLGLHIASPPNFRLTHDISLEEFEDEDLSEITDECGISLQCKDTLSLRPPRAGLLSAGSSGSAGSRLQAEMLQMDLIDAASDTPGAEDDEEDDDELAAQRPGVGPSKAESGQEPASRSQGQGQGPGTGSGDTYRPKRPTTLNLFPQVPRSQDTLNNNSLGKKHSWQDRVSRSSSPLKTGEQTPPHEHICLSDELPPQGSPVPTQDRGTSTDSPCRRTAATQMAPPSGPPATAPGGRGHSHRDRIHYQADVRLEATEEIYLTPVQRPPDPAEPTSTFLPPTESRMSVSSDPDPAAYSVTAGRPHPSISEEDEGFDCLSSPEQAEPPGGGWRGSLGEPPPPPRASLSSDTSALSYDSVKYTLVVDEHAQLELVSLRPCFGDYSDESDSATVYDNCASASSPYESAIGEEYEEAPQPRPPTCLSEDSTPDEPDVHFSKKFLNVFMSGRSRSSSAESFGLFSCVINGEEHEQTHRAIFRFVPRHEDELELEVDDPLLVELQAEDYWYEAYNMRTGARGVFPAYYAIEVTKEPEHMAALAKNSDWIDQFRVKFLGSVQVPYHKGNDVLCAAMQKIATTRRLTVHFNPPSSCVLEISVRGVKIGVKADEAQEAKGNKCSHFFQLKNISFCGYHPKNNKYFGFITKHPADHRFACHVFVSEDSTKALAESVGRAFQQFYKQFVEYTCPTEDIYLE

SEQ ID NO: 1246 - DNA, 1510 bp, Homo sapiens
  ref <308>: DATABASE ACCESSION NUMBER: EMBL / AF007134
  ref <309>: DATABASE ENTRY DATE: 1998-06-11
gccgctcccgctcctccagtgctgagtccttcgggctgttctcctgcatcatcaacggggaggagcaggagcagacccaccgggccatattcaggtttgtgcctcgacacgaagacgaacttgagctggaagtggatgaccctctgctagtggagctccaggctgaagactactggtacgaggcctacaacatgcgcactggtgcccggggtgtctttcctgcctattacgccatcgaggtcaccaaggagcccgagcacatggcagccctggccaaaaacagtgactgggtggaccagttccgggtgaagttcctgggctcagtccaggttccctatcacaagggcaatgacgtcctctgtgctgctatgcaaaagattgccaccacccgccggctcaccgtgcactttaacccgccctccagctgtgtcctggagatcagcgtgcggggtgtgaagataggcgtcaaggccgatgactcccaggaggccaaggggaataaatgtagccactttttccagttaaaaaacatctctttctgcggatatcatccaaagaacaacaagtactttgggttcatcaccaagcaccccgccgaccaccggtttgcctgccacgtctttgtgtctgaagactccaccaaagccctggcagagtccgtggggagagcattccagcagttctacaagcagtttgtggagtacacctgccccacagaagatatctacctggagtagctgtgcagccccgccctctgcgtcccccagccctcaggccagtgccaggacagctggctgctgacaggatgtggcactgcttgaggaggggcacctgccaccgccagaggacaaggaagtgggggccgctggcccagggtaggggagggtggggcaatggggagaggcaaatgcagtttattgtaatatatgggattagattcatctatggagggcagagtgggctgcctggggattgggagggacagggcttggggagcaggtctctggcagagaaggatgtccgttccaggagcacacggccctgccccatcctgggccttacctcccctgccagggctcgggcgctgtggctcctgccttgatgaagcccgtgtcctgccttgatgaagcctgtgccacctgcaagtgcccgccctgcccctgccccaacccccaccgaagagccctgagctcaggctgagcccagccacctcccaaggactttccagtgaggaaatggcaacacgtggaggtgaagtccctgttctcagctccgtcatctgcggggcttctgggtggctcctgccactgacctcaccggcatgctggcctgtggcaggcctaggacctcaggcggggaggaggagctgccgcaaggccctgtcccagcagaagagggaggcttcctgactgacacaggccagccccatcttggtcctgtcaccctggccccaactattaaagtgccatttcctgtctggaaaaaaaaaaaaaaaaaaaaaaaaaaaaaa

SEQ ID NO: 1247 - protein, 711 aa, Homo sapiens
  ref <308>: DATABASE ACCESSION NUMBER: SWISS-Prot / Q9UQF2
  ref <309>: DATABASE ENTRY DATE: 2002-06-15
MAERESGGLGGGAASPPAASPFLGLHIASPPNFRLTHDISLEEFEDEDLSEITDECGISLQCKDTLSLRPPRAGLLSAGGGGAGSRLQAEMLQMDLIDATGDTPGAEDDEEDDDEERAARRPGAGPPKAESGQEPASRGQGQSQGQSQGPGSGDTYRPKRPTTLNLFPQVPRSQDTLNNNSLGKKHSWQDRVSRSSSPLKTGEQTPPHEHICLSDELPPQSGPAPTTDRGTSTDSPCRRSTATQMAPPGGPPAAPPGGRGHSHRDRIHYQADVRLEATEEIYLTPVQRPPDAAEPTSAFLPPTESRMSVSSDPDPAAYPSTAGRPHPSISEEEEGFDCLSSPERAEPPGGGWRGSLGEPPPPPRASLSSDTSALSYDSVKYTLVVDEHAQLELVSLRPCFGDYSDESDSATVYDNCASVSSPYESAIGEEYEEAPRPQPPACLSEDSTPDEPDVHFSKKFLNVFMSGRSRSSSAESFGLFSCIINGEEQEQTHRAIFRFVPRHEDELELEVDDPLLVELQAEDYWYEAYNMRTGARGVFPAYYAIEVTKEPEHMAALAKNSDWVDQFRVKFLGSVQVPYHKGNDVLCAAMQKIATTRRLTVHFNPPSSCVLEISVRGVKIGVKADDSQEAKGNKCSHFFQLKNISFCGYHPKNNKYFGFITKHPADHRFACHVFVSEDSTKALAESVGRAFQQFYKQFVEYTCPTEDIYLE

SEQ ID NO: 1248 - DNA, 1660 bp, Rattus norvegicus
  ref <308>: DATABASE ACCESSION NUMBER: EMBL / AF092523
  ref <309>: DATABASE ENTRY DATE: 2000-03-03
atggcaatccagttccgctcactcttccccttggccttgcctggaatgctagcactccttggctggtggtggtttttctctcgtaaaaaagatcggctcagcagcaatggcaagcaggtggggacattgaaggttggccctgccatcgaggaccgactgcccactgaagaggcctgtcctggagtcctgtctgtgacccccagtgtcacacagcctcctggaaaggaagagcagcgctctatggacaggcctctttcagatcccccagccttgccaaggacccgtcaagttcgccgaagatcagagtcctcaggcaacctccccagcattgtagacacaaggttgcaggcaggacagtgcagcgatgagaattcaaaagtggtactctccctgatgggggacgaagccaaatctattcctcttggacgtccgcttttcccaaaggatctgtccttcccctatgaagcagtggaagggtgtaagcaagagtctgccctgggcagaactcctgggagaggctggctaagccagtgtgcagcctctggagagaacgcgagagagacgggtggggcggaagggactggagatgctgtgttgggggaaagtgtacttgaggaaggcctattgccccaggagtgtgtttcagaagtagagaagagtgagtttccgatcctagctcccgggggaggcgggggagagaaggtgagaagtggcccaccacaggtagatgagcttttaaagaaggaagaatatattgttgggaagttgccaagtagctttgtggggccagttcactcggagctggttaaggatgagggtgcgctggtaccccaagtcaaaggtagccaggacagaagcctggctagagaactggacaaagacaagaccttgcctgaaaaggaccagattgagcagactgccttccagatcacctcccaggtgatcttggaagcgactgaagagatacgggccaccacagtgggcaagactgtggcacaagtgcatccaaccccgggcactcagcctcaggggcaggaggagagctgtgtcccagccagccaggaaactagcttgggacaagaaatcccagatcctgcttccaccagaacaggtgccactgccagcccttcagcaggagccccaccaccaaagacctatgtgagctgtctcagcagtcctctgtcaggccccaccaaggaccagaagccaaagaactctgcacaccacatctccctggctccctgcccaccgccagttaccccccagaggcagtctctggatggggcaagtaacccgagaggtgatgacacctttgccacctgtacgtccaacaacagccagagtgtcctttcagttacctccttggggctgtgctcagaccctgtcagtacttcgaggcttgaagactcttgcacagagaccatctcaagctccggagacaaagctgtcaccccaccactgccagacagtactgagcccttcagcaatggggtgctgaaggaggagttgtcagacttggggaccgaggatggatggaccatggatacagaagcagatcattcaggagttgcagctccaccccaggaaagagggcactttggtaacggagggtgcgctgggtttttcgagtgctgaccccagcgtagacagttcagaccgc

SEQ ID NO: 1249 - protein, 854 aa, Rattus norvegicus
  ref <308>: DATABASE ACCESSION NUMBER: SWISS-Prot / O88884
  ref <309>: DATABASE ENTRY DATE: 2002-06-15
MAIQFRSLFPLALPGMLALLGWWWFFSRKKDRLSSNGKQVGTLKVGPAIEDRLPTEEACPGVLSVTPSVTQPPGKEEQRSMDRPLSDPPALPRTRQVRRRSESSGNLPSIVDTRLQAGQCSDENSKVVLSLMGDEAKSIPLGRPLFPKDLSFPYEAVEGCKQESALGRTPGRGWLSQCAASGENARETGGAEGTGDAVLGESVLEEGLLPQECVSEVEKSEFPILAPGGGGGEKVRSGPPQVDELLKKEEYIVGKLPSSFVGPVHSELVKDEGALVPQVKGSQDRSLARELDKDKTLPEKDQIEQTAFQIISQVILEATEEIRATTVGKTVAQVHPTPGTQPQGQEESCVPASQETSLGQEIPDPASTRTGATASPSAGAPPPKTYVSCLSSPLSGPTKDQKPKNSAHHISLAPCPPPVTPQRQSLDGASNPRGDDTFVTCTSNNSQSVLSVTSLGLCSDPVSTSRLEDSCTETISSSGDKAVTPPLPDSTEPFSNGVLKEELSDLGTEDGWTMDTEADHSGGSDGNSMDSVDSCCGLTKPDSPQTVQAGSNPKKVDLIIWEIEVPKHLVGRLIGKQGRYVSFLKQTSGAKIYISTLPYTQNIQICHIEGSQHHVDKALNLIGKKFKELNLTNIYAPPLPSLALPSLPMTSWLMLPDGITVEVIVVNQVNAGHLFVQQHTHPTFHALRSLDQQMYLCYSQPGIPTLPTPVEITVICAAPGADGAWWRAQVVASYEETNEVEIRYVDYGGYKRVKVDVLRQIRSDFVTLPFQGAEVLLDSVVPLSDDDHFSPEADAAMSEMTGNTALLAQVTSYSATGLPLIQLWSVVGDEVVLINRSLVERGLAQWVDSCYASL

SEQ ID NO: 1250 - DNA, 3149 bp, Homo sapiens
  ref <308>: DATABASE ACCESSION NUMBER: EMBL / BC000729
  ref <309>: DATABASE ENTRY DATE: 2001-07-13
ggcacgaggctgtgttccacccgcctgggctagcacgtgggggagctgcggaagcgcggcgctgcgggccgggccgcggggcacagccgggggccggcggcggcgcgcggactccgcatcccgcaccccgatggtagccgaggagctggtgtaattacttcaagcctccaggatggcaatccagttccgttcgctcttccccttggcattgcctgggatgctggcgctcctcggctggtggtggtttttctctcgtaaaaaaggccatgtcagcagccatgatgagcagcaggtggaggctggtgctgtgcagctgagggctgaccctgccatcaaggaacctctccccgtggaagacgtctgtcccaaagtagtgtccacaccccccagtgtcacagagcctccagaaaaggaactgtccaccgtgagcaagctgcctgcagagcccccagcattgctccagacacacccaccttgccgaagatcagagtcctcgggcattcttcctaacaccacagacatgagattgcgaccaggaacacgcagagatgacagtacaaagctggagctagccctgacaggtggtgaagccaaatcgattcctctagagtgccccctttcatccccaaagggtgtactattctccagcaaatcagctgaggtgtgtaagcaagattcccccttcagcagggtgccaaggaaggtccagccaggctaccccgtagtccccgcagagaagcgtagctctggggagagggcaagagagacaggtggggccgaagggactggtgatgccgtgttgggggaaaaggtgcttgaagaagctctgttgtctcgggagcatgtcttggaattggagaacagcaagggccccagcctggcctctttagagggggaagaagataaggggaagagcagctcatcccaggtggtggggccagtgcaggaggaagagtatgtagcagagaagttgccaagtaggttcatcgagtcggctcacacagagctggcaaaggacgatgcggcgccagcacccccagtcgcagacgccaaagcccaggatagaggtgtcgagggagaactgggcaatgaggagagcttggatagaaatgaggagggcttggatagaaatgaggagggcttggatagaaatgaggagagcttggatagaaatgaggagggcttggatagaaatgaggagattaagcgggctgccttccagataatctcccaagtgatctcagaagcaaccgaacaggtgctggccaccacggttggcaaggttgcaggtcgtgtgtgtcaggccagtcagctccaagggcagaaggaagagagctgtgtcccagttcaccagaaaactgtcttgggcccagacactgcggagcctgccacagcagaggcagctgttgccccgccggatgctggcctccccttgccaggcctaccagcagagggctcaccaccaccaaagacctacgtgagctgcctgaagagccttctgtccagccccaccaaggacagtaagccaaatatctctgcacaccacatctccctggcctcctgcctggcactgaccacccccagtgaagagttgccggaccgggcaggcatcctggtggaagatgccacctgtgtcacctgcatgtcagacagcagccaaagtgtccctttggtggcttctccaggacactgctcagattctttcagcacttcagggcttgaagactcttgcacagagaccagctcgagccccagggacaaggccatcaccccgccactgccagaaagtactgtgcccttcagcaatggggtgctgaagggggagttgtcagacttgggggctgaggatggatggaccatggatgcggaagcagatcattcaggaggttctgacaggaacagcatggattccgtggatagctgttgcagtctcaagaagactgagagcttccaaaatgcccaggcaggctccaaccctaagaaggtcgacctcatcatctgggagatcgaggtgccaaagcacttagtcggtcggctaattggcaagcaggggcgctatgtgagttttctgaagcaaacatctggtgccaagatctacatttcaaccctgccttacacccagagcgtccagatctgccacatagaaggctctcaacatcatgtagacaaagcgctgaacttgattgggaagaagttcaaagagctgaacctcaccaatatctacgctcccccattgccttcactggcactgccttctctgccgatgacatcctggctcatgctgcctgatggcatcaccgtggaggtcattgtggtcaaccaggtcaatgccgggcacctgttcgtgcagcagcacacacaccctaccttccacgcgctgcgcagcctcgaccagcagatgtacctctgttactctcagcctggaatccccaccttgcccaccccagtggaaataacggtcatctgtgccgcccctggtgcggacggggcctggtggcgagcccaagtggttgcctcctacgaggagaccaacgaagtggagattcgatacgtgcactacggcggatataagagggtgaaagtagacgtgctccggcaaatcaggtctgactttgtcaccctgccgtttcagggagcagaagtccttctggacagtgtgatgcccctgtcagacgatgaccagttttcaccggaagcagatgccgccatgagcgagatgacggggaatacagcactgcttgctcaggtgacaagttacagtccaactggtcttcctctgattcagctgtggagtgtggttggagatgaagtggtgttgataaaccggtccctggtggagcgaggccttgcccagtgggtagacagctactacacaagcctttgacccccatgctgcttcctgagagtctttttttgcactgttgaaattgggcttggcactcaagtcaaagatgaacatcggaataacaaacattgtcctctccagaaagtcctttctttctccatactgtagtcctattgagaagacatttcgtctctgagaaaaaaggatggaactatgggttctcttcgcaaagccaaaggatagtgtttaacaagccagctggcttatgctggttctcagctgtttaaaaaaaaaaaaaaaaaaa

SEQ ID NO: 1251 - protein, 903 aa, Homo sapiens
  ref <308>: DATABASE ACCESSION NUMBER: SWISS-Prot / Q92667
  ref <309>: DATABASE ENTRY DATE: 2002-06-15
MAIQFRSLFPLALPGMLALLGWWWFFSRKKGHVSSHDEQQVEAGAVQLRADPAIKEPLPVEDVCPKVVSTPPSVTEPPEKELSTVSKLPAEPPALLQTHPPCRRSESSGILPNTTDMRLRPGTRRDDSTKLELALTGGEAKSIPLECPLSSPKGVLFSSKSAEVCKQDSPFSRVPRKVQPGYPVVPAEKRSSGERARETGGAEGTGDAVLGEKVLEEALLSREHVLELENSKGPSLASLEGEEDKGKSSSSQVVGPVQEEEYVAEKLPSRFIESAHTELAKDDAAPAPPVADAKAQDRGVEGELGNEESLDRNEEGLDRNEEGLDRNEESLDRNEEGLDRNEEIKRAAFQIISQVISEATEQVLATTVGKVAGRVCQASQLQGQKEESCVPVHQKTVLGPDTAEPATAEAAVAPPDAGLPLPGLPAEGSPPPKTYVSCLKSLLSSPTKDSKPNISAHHISLASCLALTTPSEELPDRAGILVEDATCVTCMSDSSQSVPLVASPGHCSDSFSTSGLEDSCTETSSSPRDKAITPPLPESTVPFSNGVLKGELSDLGAEDGWTMDAEADHSGGSDRNSMDSVDSCCSLKKTESFQNAQAGSNPKKVDLIIWEIEVPKHLVGRLIGKQGRYVSFLKQTSGAKIYISTLPYTQSVQICHIEGSQHHVDKALNLIGKKFKELNLTNIYAPPLPSLALPSLPMTSWLMLPDGITVEVIVVNQVNAGHLFVQQHTHPTFHALRSLDQQMYLCYSQPGIPTLPTPVEITVICAAPGADGAWWRAQVVASYEETNEVEIRYVDYGGYKRVKVDVLRQIRSDFVTLPFQGAEVLLDSVMPLSDDDQFSPEADAAMSEMTGNTALLAQVTSYSPTGLPLIQLWSVVGDEVVLINRSLVERGLAQWVDSYYTSL

SEQ ID NO: 1252 - DNA, 3706 bp, Rattus norvegicus
  ref <308>: DATABASE ACCESSION NUMBER: EMBL / AF093268
  ref <309>: DATABASE ENTRY DATE: 2000-03-03
gcggccgcgtcgactacggctgcgagaagacgacagaagggggctccgctgatgctcctcgtgagaacgaatcgatccttcccagccttctctgcctgctctccacctcctctctgctccgagtcttaggagaacgaacattcaaaggacagattccaatgtggtgtgctgtgcacatcgcgagcggctggggtttgcacttcgagatttcttctttataattttttttttttaatgtaagggagacagtggaattgctacccgtagaatttttattcaagtgcacgtcgcgttgggttgcacgctccacccccagggacctggtgtggtgaaatttgaacccaccgccttagcccaaaggccgagtaacctggctgcttgagtgtcgtggaagacgtgagcgaaatgatcagcgaactcattttttatcagactcactgaagctggcttttgcgtttttctacacgtacactaattttatggaatagttaaagtgctatattctccgcgcaaccttttcaaattccaaatgtttgaacgttttggtgtcagcgcgagtgaaatcattttaccgacaagaactaactgaattgtctgcctcgttgagttgcctccggaaaagatctcgggggtggaaaagcaactgcaaaataacagacggagaaaattccttggaagttatttctgtagcataagagcagaaacttcagagcaagttttcattgggcaaaatgggggaacaacctatcttcagcactcgagctcatgtcttccagatcgacccaaacacaaagaagaactgggtacccaccagcaagcatgcagttactgtgtcttatttctatgacagcacaaggaatgtgtataggataatcagtctagacggctcaaaggcaataataaatagcaccatcactccaaacatgacatttactaaaacatctcaaaagtttggccaatgggctgatagccgggcaaacactgtttatggactgggattctcctctgagcatcatctctcaaaatttgcagaaaagtttcaggaatttaaagaagctgctcggctggcaaaggagaagtcgcaggagaagatggaactgaccagtaccccttcacaggaatcagcaggaggagatcttcagtctcctttaacaccagaaagtatcaatgggacagatgatgagagaacacccgatgtgacacagaactcagagccaagggctgagccagctcagaatgcattgccattttcacatagtgccggggatcgaacccagggcctctctcatgctagttcagccatcagcaaacactgggaggctgaactagccacgctcaaggggaacaatgccaagctcaccgcagcgctgctggagtccactgccaacgtgaagcagtggaagcaacagctggctgcctaccaggaggaggcagagcggctgcacaagcgggtcacggagctggaatgtgttagtagtcaagcaaacgcggtgcacagccacaagacagagctgagtcagacagtgcaggagctggaagagaccctaaaagtaaaggaagaggaaatagaaagattaaaacaagaaattgataacgccagagaacttcaagaacagagggactctttgactcagaaactacaggaagttgagattcgaaataaagacctggaggggcagctgtcggagctggagcagcgcctggagaagagccagagcgagcaggacgctttccgcagtaacctgaagactctcctagagattctggacgggaaaatatttgaactaacagaattgcgggataatttggccaagctactagaatgcagctaaagaaagtgaaatttcagtgccaatagatgaagagatactgtctgtcttcgtaggactgtttgggctctgtaccaagattgcaaaaaattttttgaatatcattcctccagaaggagggtgttttgaaaattggaattgtatatttcagtataaattttagaatttagcttatagctagttgggggaaaaaaagacatgaaaaacttgaaccacaaataatgcaatcttttcccctgatagtagccaatgggagaattaacaatgtctgggtcccttctcctttttctgttcaacacagtgaagattatctgctttttaaatttatttacgatatctacagctgtgttttgtgtaaaaacttagtaatggaagccctgtctttgttgttatctgaataatttctcaggatatttttttgctgctgagaaagggccattaccaattaatccttgccaggagttggggagctatgtctctaattggaatcactataactgggtgtctggagttcttcccttttcgtactgagagtgttctcactctagtgactactctggtacactccgtgttctccaatcttgtctgttgtactttacttttccatattgactccatgtatttatgagaagatattatctcccattttattatacattttgaagccaactaaacaaaggcagctgagtccttcagatatttttctttttaaatttatagtaaatttgacacagaactgaaattcagcagtccgtctttgacggtttagtctagcaatgttaaggatatttagagaaaatatgcagttacgtttatttatatatttggcaagaaattttttctggatgatcaatgcttttcaatttatgataaataatggttaggggcgctgtttattatagataattttaaggtgtatagctgttttcaaggaggtccactcccgtctagcagccaagcagaggactgtatctaaatcgtgatcgtggcagatgggtcttcatagaaaccatgtctttattcaaacttcatagggcaatattttgaactgttacctaggcatttcaaaacaggaaataccgtcaacagactcttctccaagagcaggttttactgttgttttgatgtaattttaagacatttagcaaacatgcatttctttatatgatacatttctttcacaaaacaatttaaaagtaagccacgtgctgtctgctctgcccgggtaggaattgcatcagaatacatatatcttgctgtacaatgcctgtgatattgaagagggttcttttcatgtatgcttgagtatctaactctggagtcaatgaatgcactgacttttttttttgttcgtaccccaaatgattgaattgttaagtacaaattaagcagattaactcattttttcactcataaacagattcttagtactagttttgttttatatttatgtgtatgtatgtaaatacatacatattaatttatattagagtgaaaaataaattgtttgtttctaacattagtttctacagtaaggtgtctctgaaacatgtgtgtcagacacttagccaccatgcattctatgtgctaccccatcatgccagtcacctccatcgacgttagggtattttccttacctgtctattataaagagaataacttaggtacacatgctcagagccgagatatttctctgataaatcaggtaataaaatctatttgatgggtagaattttgaaaacagacatgattttatctatgagtttctgaatatcaaagaacaccaggttttcatttaaatagaggtctaacactagggatcagggaatttagttatgaagagttgaaaaaaaaaaaaaaaaaaaaaaaaaaaaaaa

SEQ ID NO: 1253 - protein, 366 aa, Rattus norvegicus
  ref <308>: DATABASE ACCESSION NUMBER: SWISS-Prot / AAC71032
  ref <309>: DATABASE ENTRY DATE: 2002-10-01
MGEQPIFSTRAHVFQIDPNTKKNWVPTSKHAVTVSYFYDSTRNVYRIISLDGSKAIINSTITPNMTFTKTSQKFGQWADSRANTVYGLGFSSEHHLSKFAEKFQEFKEAARLAKEKSQEKMELTSTPSQESAGGDLQSPLTPESINGTDDERTPDVTQNSEPRAEPAQNALPFSHSAGDRTQGLSHASSAISKHWEAELATLKGNNAKLTAALLESTANVKQWKQQLAAYQEEAERLHKRVTELECVSSQANAVHSHKTELSQTVQELEETLKVKEEEIERLKQEIDNARELQEQRDSLTQKLQEVEIRNKDLEGQLSELEQRLEKSQSEQDAFRSNLKTLLEILDGKIFELTELRDNLAKLLECS

SEQ ID NO: 1254 - DNA, 1225 bp, Homo sapiens
  ref <308>: DATABASE ACCESSION NUMBER: EMBL / Y17829
  ref <309>: DATABASE ENTRY DATE: 1999-01-07
agacggagaaattcctttggaagttattccgtagcataagagctgaaacttcagagcaagttttcattgggcaaaatgggggaacaacctatcttcagcactcgagctcatgtcttccaaattgacccaaacacaaagaagaactgggtacccaccagcaagcatgcagttactgtgtcttatttctatgacagcacaagaaatgtgtataggataatcagtttagatggctcaaaggcaataataaatagtaccatcaccccaaacatgacatttactaaaacatctcagaagtttggccagtgggctgatagccgggcaaacaccgtttatggattgggattctcctctgagcatcatctttcgaaatttgcagaaaagtttcaggaatttaaagaagctgctcgactagcaaaggaaaaatcacaagagaagatggaacttaccagtacaccttcacaggaatccgcaggcggggatcttcagtctcctttaacaccggaaagtatcaacgggacagatgatgaaagaacacctgatgtgacacagaactcagagccaagggctgaaccaactcagaatgcattgccattttcacatagttcagcaatcagcaaacattgggaggctgaactggctaccctcaaaggaaataatgccaaactcactgcagccctgctggagtccactgccaatgtgaaacaatggaaacagcaacttgctgcctatcaagaggaagcagaacgtctgcacaagcgggtgactgaacttgaatgtgttagtagccaagcaaatgcagtacatactcataagacagaattaaatcagacaatacaagaactggaagagacactgaaactgaaggaagaggaaatagaaaggttaaaacaagaaattgataatgccagagaactacaagaacagagggattctttgactcagaaactacaggaagtagaaattcggaacaaagacctggagggacaactgtctgacttagagcaacgtctggagaaaagtcagaatgaacaagaagcttttcgcaataacctgaagacactcttagaaattctggatggaaagatatttgaactaacagaattacgagataacttggccaagctactagaatgcagctaaggaaagtgaaatttcagtgccaattaattaaaagatacactgtctctcttcataggactgtttaggctctgcatcaagattgcac

SEQ ID NO: 1255 - protein, 354 aa, Homo sapiens
  ref <308>: DATABASE ACCESSION NUMBER: Refseq / NP_004263
  ref <309>: DATABASE ENTRY DATE: 2002-04-10
MGEQPIFSTRAHVFQIDPNTKKNWVPTSKHAVTVSYFYDSTRNVYRIISLDGSKAIINSTITPNMTFTKTSQKFGQWADSRANTVYGLGFSSEHHLSKFAEKFQEFKEAARLAKEKSQEKMELTSTPSQESAGGDLQSPLTPESINGTDDERTPDVTQNSEPRAEPTQNALPFSHSSAISKHWEAELATLKGNNAKLTAALLESTANVKQWKQQLAAYQEEAERLHKRVTELECVSSQANAVHTHKTELNQTIQELEETLKLKEEEIERLKQEIDNARELQEQRDSLTQKLQEVEIRNKDLEGQLSDLEQRLEKSQNEQEAFRNNLKTLLEILDGKIFELTELRDNLAKLLECS

SEQ ID NO: 1256 - DNA, 2856 bp, Rattus norvegicus
  ref <308>: DATABASE ACCESSION NUMBER: EMBL / AF095576
  ref <309>: DATABASE ENTRY DATE: 2002-07-10
ggcacgagcaaagagggagagaacctcaaggggcccgccccgggactgctaagagcgcacgagcctcgcagactgcaggccagggaagcgggagccagcccccgccgccgccgccaccaccggccaccaagggcggagctacggcccggagggccatgcgccaccgggtccgaggatcccggccgcggtccgggcagcgcttctccggcgccccggccggcgcggccgaagctgcgcgcctgtagtccgaggctgccatgggaccaaagccatgaatggtgccacccccggctcggcagccgcccccgccccagtccccgactggaggcaattctgcgagctgcacgctcaggtagctgctgtggacttcgctcacaagttctgccgcttccttcgggacaacccgacctacgacacgcctgacgctgggacctcgttctcccgccactttgcagccaacttcttggcagtcttcagcgaggaagtgcgccgcgtgctggggacagcagctgacaccatggaacccgagcctgcggtgacctccgtgacctcggcgctcaagactgcaacctatggccactctcgcagctccgaagatgtgtctgctcacgtggctaccaaggcccgtgtccgcaaaggcttctcactgcgtaacatgagcctgtgtgtagtggacggagtgcgcgacctatggcaccggcgcgcatccccagagcccgagggtggggccaccccgaaaaccaccgagcctgtgtccgagcctcgtgacaaatggacgcgacgtctgcggctggcacgaaccctggcagccaaagtggagttagtggacatccagcgcgagggcgcactgcgcttcatggtggcagatgatgcagcctccggccctgggggcacggcacagtggcagaaatgtcgcctgctcctccgaagggctgtggccggagagcgcttccgcctggagttcttcgtgccacccaaggcttccagacccaaggtcagcatccccctgtcggccatcatcgaggtccgaaccaccatgcccctggaaatgcctgagaaggacaacacatttgtgctcaaggtggagaacggagcggagtacattctggagacgatagactcactacagaagcactcgtgggtggctgacatccagggctgtgtggatcctggggacagtgaggaagacacagggctgtcttgtgcacggggaggctgtctggccagccgcgtgacctcctgcagctgtgagctcctgacagaagcagacatgccccggcccccagagacgatgacagcagtgggtgctgtggttacagctccacatggccgagctcgtgacaccgtgggagagtccctggctcacgttcccctggagactttcctgcaaaccctggagtcttcaggtggtgtcagtgagagcaataacacaggggatgaaggagctgagctggaccccgatgctgaggctgagctggaactctccgactacccctggttccatgggacactgtcccgggtgaaggccgcccagctggtgttggctggtgggccccggagtcacggcctctttgtgatccgccaaagcgagactcggcctggggagtgtgtgctgaccttcaacttccagggcaaggccaagcaccttcgcctttctctgaatggtcacggccagtgtcatgtccaacacctgtggttccagtcggtgtttgacatgcttcgacacttccacacccaccccattcccctggagtcaggaggatccgctgacatcaccctacgaagctacgtgcgtgcccaaggtccacctcctgatccaggaccagcgcccaacactgcagccccggtcccggcctgctggacggagccggctggccagcactacttctccagcctggccacggccacctgcccacccacttcaccctccaatggcgctggagcatcgtcgtcatccggttcatcatcctctgctacgtccgtgcccccacgcccagccgaggggccactcagtgcgcgcagtcgcagcaacagcacagagcacctgctagaggctgcatccggagccactgaggagcccgcagatgccacgctgggccgcgctcgcgctgtggagaatcagtactccttttactagctgccatgcctattacccacgggtgtcacgcacaacacagcaggccacgaacacctgctgtctgtcctgcccacccacagcctggctagcccatgacggtcaacaacacctaacaaatggctagacacacctatccatggtctagcatggccaagacagatggccagcctagccacttcaaaccccaggggcccattatgaccgtgtgtggcaggccaaggctaagtccatggtcgatcaaacccatgatagccctccaatgatttcacgccccgcccactggtggttggccacgcccaccagcagctatttctatacagtccatcgtatccacgacaggcagctcactgacaactaaccacatttggtgacttcaggccctgcctactgttggttggttactcctacagtggcatcatggccaacccactggctgcctgctttgctcgagggtagcaagccacgtctatcaagcccatgaaggcttacccactgattcctaacaacctcaggccctgcccacccatgttgggtcacatactccaatagcccaccaggctgtggtccgcctagcctaggacagcctgtcacgcccaccagccccagcccaacgctggggggaaaagccaagctcttcagtgaagacaaacattattaaagagcctgttttagggactaaaaaaaaaaaaaaaaaaaaaaaaaaaaaaaaaaaaaaaaaa

SEQ ID NO: 1257 - protein, 621 aa, Rattus norvegicus
  ref <308>: DATABASE ACCESSION NUMBER: SWISS-Prot / AAC64408
  ref <309>: DATABASE ENTRY DATE: 2003-02-01
MNGATPGSAAAPAPVPDWRQFCELHAQVAAVDFAHKFCRFLRDNPTYDTPDAGTSFSRHFAANFLAVFSEEVRRVLGTAADTMEPEPAVTSVTSALKTATYGHSRSSEDVSAHVATKARVRKGFSLRNMSLCVVDGVRDLWHRRASPEPEGGATPKTTEPVSEPRDKWTRRLRLARTLAAKVELVDIQREGALRFMVADDAASGPGGTAQWQKCRLLLRRAVAGERFRLEFFVPPKASRPKVSIPLSAIIEVRTTMPLEMPEKDNTFVLKVENGAEYILETIDSLQKHSWVADIQGCVDPGDSEEDTGLSCARGGCLASRVTSCSCELLTEADMPRPPETMTAVGAVVTAPHGRARDTVGESLAHVPLETFLQTLESSGGVSESNNTGDEGAELDPDAEAELELSDYPWFHGTLSRVKAAQLVLAGGPRSHGLFVIRQSETRPGECVLTFNFQGKAKHLRLSLNGHGQCHVQHLWFQSVFDMLRHFHTHPIPLESGGSADITLRSYVRAQGPPPDPGPAPNTAAPVPACWTEPAGQHYFSSLATATCPPTSPSNGAGASSSSGSSSSATSVPPRPAEGPLSARSRSNSTEHLLEAASGATEEPADATLGRARAVENQYSFY

SEQ ID NO: 1258 - DNA, 2110 bp, Homo sapiens
  ref <308>: DATABASE ACCESSION NUMBER: EMBL / AB000520
  ref <309>: DATABASE ENTRY DATE: 1997-09-29
ggatccaagctattgtcctgcccatggcttcccatctcaggacgctctctggccgctatcatcccagcagtggagttcagcccactactctgaaccagccgcaggtggctgctatgggactgaagccatgaatggtgccggccctggccccgccgcagccgccccggtcccagtcccggtcccggtcccggactggcggcagttctgcgagctgcatgcgcaggcggccgccgtggactttgcgcacaagttctgccgtttcctgcgggacaacccagcttacgacacgcccgacgccggcgcctccttctcccgccacttcgccgccaacttcctggacgtcttcggcgaggaggtgcgccgcgtgctggtggctgggccgacgactcggggcgcggccgtgagcgcagaggccatggagccggagctcgcggacacctctgcactcaaggcggcgtcctacggccactcgcggagctcggaggacgtgtccacgcacgcggccaccaaggcccgcgttcgcaagggcttctcgctgcgcaacatgagcctgtgcgtggtggacggcgtgcgcgacatgtggcaccggcgcgcctcgcccgagcccgacgcggcagctgccccgcgcaccgccgagccccgcgacaagtggacgcggcgcctgaggctgtcgcggacgctggctgccaaggtggagctggtggacattcaacgcgagggggcgctgcgcttcatggtggccgacgacgcggccgcgggctccgggggctcggctcagtggcagaagtgccgcctgctcctgcgcagggctgtggccgaggaacgcttccgcctggagttcttcgtgccgcccaaagcctccaggcccaaggtcagcatcccactgtcagccatcattgaggtccgcaccaccatgcccctggaaatgccagagaaggataacacattcgtcctcaaggtagagaatggagccgaatacatcttggagaccatcgactctctgcagaagcactcgtgggtagctgacatccagggctgcgtggaccccggtgacagtgaggaagacaccgagctctcctgtacccgaggaggctgtctggccagccgcgtggcctcctgcagctgtgagctcctgactgatgcagtcgacctgccccgccccccagagacgacagccgtgggtgcagtggtgacagccccccacagccgaggtcgagatgccgtcagagaatccctgatccacgtcccgctagagacctttctgcagaccctggaatccccgggcggcagcggcagtgacagcaataacacaggggaacagggtgcagagacggatcccgaggctgaacccgagctggagctatccgactacccatggttccacgggacactgtcccgggtcaaggctgctcaactggttctggcaggggggccccggaaccacggcctcttcgtgatccgccaaagtgagactcggcctggggagtacgtgctgaccttcaacttccagggcaaggccaagcacctgcgcctgtccctgaacggccacggccagtgtcacgtacagcatctgtggttccagtctgtgcttgacatgctccgccacttccacacacaccccatcccactggagtcagggggctcggccgacatcacccttcgcagctatgtgcgggcccaggaccccccaccagagccgggccccacgccccctgccgcgcccgcgtccccggcctgctggagcgactcgcccggccagcactacttctccagcctcgccgcggccgcctgcccgcctgcctcgccctccgacgccgccggcgcctcctcgtcttccgcctcgtcgtcctctgccgcgtcggggcccgcccccccgcgccccgtcgagggccagctcagcgcgcggagccgcagcaacagcgccgagcgcctgctggaggccgtggccgccaccgccgccgaggagcccccggaggccgcgcccggccgcgcgcgcgccgtggagaaccagtactccttctactagcccgcggcgccgcccgggtgggacacgccaagctcttcagtgaagacacgatgttattaaaagcctgttttagggactgcaaaa

SEQ ID NO: 1259 - protein, 632 aa, Homo sapiens
  ref <308>: DATABASE ACCESSION NUMBER: SWISS-Prot / BAA22514
  ref <309>: DATABASE ENTRY DATE: 2003-02-01
MNGAGPGPAAAAPVPVPVPVPDWRQFCELHAQAAAVDFAHKFCRFLRDNPAYDTPDAGASFSRHFAANFLDVFGEEVRRVLVAGPTTRGAAVSAEAMEPELADTSALKAASYGHSRSSEDVSTHAATKARVRKGFSLRNMSLCVVDGVRDMWHRRASPEPDAAAAPRTAEPRDKWTRRLRLSRTLAAKVELVDIQREGALRFMVADDAAAGSGGSAQWQKCRLLLRRAVAEERFRLEFFVPPKASRPKVSIPLSAIIEVRTTMPLEMPEKDNTFVLKVENGAEYILETIDSLQKHSWVADIQGCVDPGDSEEDTELSCTRGGCLASRVASCSCELLTDAVDLPRPPETTAVGAVVTAPHSRGRDAVRESLIHVPLETFLQTLESPGGSGSDSNNTGEQGAETDPEAEPELELSDYPWFHGTLSRVKAAQLVLAGGPRNHGLFVIRQSETRPGEYVLTFNFQGKAKHLRLSLNGHGQCHVQHLWFQSVLDMLRHFHTHPIPLESGGSADITLRSYVRAQDPPPEPGPTPPAAPASPACWSDSPGQHYFSSLAAAACPPASPSDAAGASSSSASSSSAASGPAPPRPVEGQLSARSRSNSAERLLEAVAATAAEEPPEAAPGRARAVENQYSFY

SEQ ID NO: 1260 - DNA, 1330 bp, Rattus norvegicus
  ref <308>: DATABASE ACCESSION NUMBER: EMBL / AF095741
  ref <309>: DATABASE ENTRY DATE: 1998-10-16
gggttagtttaacatgggttcctccagctccaccgctctggctcgccttggactccccgggcagccgcggtccacctggctcggcgtcgccgcgctgggactggccgcagtggcgctggggaccgtggcctggcgtcgcgcgcgtccccggcggcgccggcagctgcagcaagtgggcacggtgtcgaaggtttggatctacccgatcaagtcctgcaagggggtgtcggtgtgcgagactgagtgcaccgacatggggctgcgctgcggcaaagtgcgcgacaggttttggatggtggttaaggaagatggtcacatgatcactgcccgccaggagcctcgccttgtgctggtcaccatcaccttggagaacaattacctgatgctcgaagctccaggcatggagccgatagttctgcctatcaagctgccctcttcgaataagatccacgactgcaggttgtttggcctcgacattaaaggcagggattgtggcgatgaggtggcccggtggttcaccagctacctaaagacgcaagcctacaggttggttcagtttgataccaaaatgaaaggaaggacaacaaagaaactctacccgtcggagagctaccttcagaactatgaggtcgcctacccagactgcagccctatccacctgatttctgaagcctccttagtggatctcaacaccaggctgcagaagaaagtgaagatggagtatttcaggccgaacatcgtggtgtcaggctgcgaggctttcgaggaggacacctgggatgagctcttgattggtgacgtagagatgaagagggtgttgagctgccccaggtgcgtgttgactacagtggacccagacaccggcatcatagacaggaaagagccgctggagaccctgaagagctatcgcctgtgtgatccttctgtgaagagtttataccagtcgtctccactctttgggatgtatttctcagtggaaaaaattggaagcctgagagtgggtgaccctgtgtatcggatggtggattagtggatcccgtggactgactcggtttggattattcacaactgacagtctgagtaacagagtgatggggaatcttgtcatttactcggcttccctgggagacgacgcatctgcaagtcctcacggccatcttcctggaaatggatctctgttcttcctctggagctgcacatgcccgagttcattcaagaaagctaccagaggtggtttgggaatgtgacggtgtataaattttagataatgaggttttaaaaaattaaacggaattgttactcccacggttaaaaaaaaaaaaaaaaaaaa

SEQ ID NO: 1261 - protein, 338 aa, Rattus norvegicus
  ref <308>: DATABASE ACCESSION NUMBER: SWISS-Prot / AAC64190
  ref <309>: DATABASE ENTRY DATE: 2002-06-01
MGSSSSTALARLGLPGQPRSTWLGVAALGLAAVALGTVAWRRARPRRRRQLQQVGTVSKVWIYPIKSCKGVSVCETECTDMGLRCGKVRDRFWMVVKEDGHMITARQEPRLVLVTITLENNYLMLEAPGMEPIVLPIKLPSSNKIHDCRLFGLDIKGRDCGDEVARWFTSYLKTQAYRLVQFDTKMKGRTTKKLYPSESYLQNYEVAYPDCSPIHLISEASLVDLNTRLQKKVKMEYFRPNIVVSGCEAFEEDTWDELLIGDVEMKRVLSCPRCVLTTVDPDTGIIDRKEPLETLKSYRLCDPSVKSLYQSSPLFGMYFSVEKIGSLRVGDPVYRMVD

SEQ ID NO: 1262 - DNA, 853 bp, Homo sapiens
  ref <308>: DATABASE ACCESSION NUMBER: EMBL / AK000612
  ref <309>: DATABASE ENTRY DATE: 2000-02-22
aaaacttctccccactcttgatcagaatttccaggtggcctacccagactactgcccgctcctgatcatgacagatgcctccctggtagatttgaataccaggatggagaagaaaatgaaaatggagaatttcaggccaaatattgtggtgaccggctgtgatgcttttgaggaggatacctgggatgaactcctaattggtagtgtagaagtgaaaaaggtaatggcatgccccaggtgtattttgacaacggtggacccagacactggagtcatagacaggaaacagccactggacaccctgaagagctaccgcctgtgtgatccttctgagagggaattgtacaagttgtctccactttttgggatctattattcagtggaaaaaattggaagcctgagagttggtgaccctgtgtatcggatggtgtagtgatgagtgatggatccactagggtgatatggcttcagcaaccaggagggattgactgagatcttaacaacagcagcaacgatacatcagcaaatccttattatccagccttcaactatctttaccctggaaaacaatctcgatttttgacttttcaaagttgtgtatgctccaggttaatgcaaggaaagtattagaggggggaatatgaaagtatatatataaattttaggtactgaaggctttaaaaataattaagatcatcaaaaatgctattttgaatgttatcatggctattacacttttacttcctgactttaatattgatgaataaagcaagtttaatgaatcaactaaaaaaaaaaaaaaaaaaaaaaacaaacaaaaaaaaaaaaaaaaaaaaaaaaaaaaaaaaaaaaa

SEQ ID NO: 1263 - protein, 122 aa, Homo sapiens
  misc_feature (1)..(122): Xaa=Unknown amino acid
MTDASLVDLNTRMEKKMKMENFRPNIVVTGCDAFEEDTWDELLIGSVEVKKVMACPRCILTTVDPDTGVIDRKQPLDTLKSYRLCDPSERELYKLSPLFGIYYSVEKIGSLRVGDPVYRMVX

SEQ ID NO: 1264 - DNA, 1330 bp, Rattus norvegicus; identical to SEQ ID NO: 1260
  ref <308>: DATABASE ACCESSION NUMBER: EMBL / AF095741
  ref <309>: DATABASE ENTRY DATE: 1998-10-16

SEQ ID NO: 1265 - protein, 338 aa, Rattus norvegicus; identical to SEQ ID NO: 1261
  ref <308>: DATABASE ACCESSION NUMBER: SWISS-Prot / AAC64190
  ref <309>: DATABASE ENTRY DATE: 2002-06-01

SEQ ID NO: 1266 - DNA, 853 bp, Homo sapiens; identical to SEQ ID NO: 1262
  ref <308>: DATABASE ACCESSION NUMBER: EMBL / AK000612
  ref <309>: DATABASE ENTRY DATE: 2000-02-22

SEQ ID NO: 1267 - protein, 122 aa, Homo sapiens; identical to SEQ ID NO: 1263
  misc_feature (1)..(122): Xaa=Unknown amino acid

SEQ ID NO: 1268 - DNA, 1318 bp, Rattus norvegicus
  ref <308>: DATABASE ACCESSION NUMBER: EMBL / AF095927
  ref <309>: DATABASE ENTRY DATE: 2000-03-03
cgccgcccaggctagcgcgagcctccgctccatcgccccgccgccatggacctattcggggacttgccggagcccgagcgcccgccgcggccgtctgccgggaaagaagcacaggaaggacccgtgctcttcgaggacctgcccccgaccagcagtactgactcaggatctgggggacctttactctttgatggtcttccacctgctggcagcggcaattcaggttctcttgccacatcaggctcccaggtggtgaagaacgaaggaaaaggagcaaagaggaaagcccctgaggaagagaagaatggcggtgaagagcttgtggaaaagaaagtttgtaaagcctcttcggtgatctttggtttgaaaggctacgtggcagagcggaagggtgagagggaggagatgcaggacgcccatgtcatcctgaatgatatcactcaggagtgtaatcctccatcatctctcattactcgggtttcatactttgctgtttttgatggacatggaggaattcgagcctcgaaatttgctgcacagaatttgcaccagaacttaatcaggaaatttcctaaaggagatgtaatcagtgtggagaagactgtgaagaggtgcctgctagatacttttaagcacaccgatgaagagttcctgaaacaggcttcaagccagaagcctgcctggaaagacgggtccactgccacgtgtgtcctggctgtggacaacatcctgtatatcgccaaccttggagatagtcgggcaatcctgtgtcgatataacgaggaaagtcaaaagcatgcagccttaagcctcagcaaagagcacaatccaactcagtatgaagagcgcatgaggatacagaaggctggaggcaatgtcagagatggccgtgtcttgggtgtgctggaggtatcccgctccattggagatgggcagtacaagcgttgcggggtcacatccgtgcctgatatcagacgctgccagttgacccccaatgacaggttcattttgctggcttgtgatgggctcttcaaggtctttaccccagaagaagctgtgaacttcatcttgtcctgccttgaggatgagaagatccagacccgagaagggaagcctgctgttgatgcccgctatgaagctgcatgcaacaggctggctaacaaggcagtgcagcggggctcggcagataacgtgacggtgatggtggtgaggataggacactgaggccgcacactgcacgtgtgctcttgacttgcaggttcatcttgtttgtgcacgctgtgtgtactcctgtggggcttctatggttgtaaataaa

SEQ ID NO: 1269 - protein, 392 aa, Rattus norvegicus
  ref <308>: DATABASE ACCESSION NUMBER: SWISS-Prot / AAC97497
  ref <309>: DATABASE ENTRY DATE: 2003-02-01
MDLFGDLPEPERPPRPSAGKEAQEGPVLFEDLPPTSSTDSGSGGPLLFDGLPPAGSGNSGSLATSGSQVVKNEGKGAKRKAPEEEKNGGEELVEKKVCKASSVIFGLKGYVAERKGEREEMQDAHVILNDITQECNPPSSLITRVSYFAVFDGHGGIRASKFAAQNLHQNLIRKFPKGDVISVEKTVKRCLLDTFKHTDEEFLKQASSQKPAWKDGSTATCVLAVDNILYIANLGDSRAILCRYNEESQKHAALSLSKEHNPTQYEERMRIQKAGGNVRDGRVLGVLEVSRSIGDGQYKRCGVTSVPDIRRCQLTPNDRFILLACDGLFKVFTPEEAVNFILSCLEDEKIQTREGKPAVDARYEAACNRLANKAVQRGSADNVTVMVVRIGH

SEQ ID NO: 1270 - DNA, 2654 bp, Homo sapiens
  ref <308>: DATABASE ACCESSION NUMBER: EMBL / AK055417
  ref <309>: DATABASE ENTRY DATE: 2002-08-06
cttgtctcagagtcctgggctcaagccatcttcccaccttggtctcccaaagtgccaggattactcgcatgagccaccatacccagcctgggatttgcattaaaaccaggaaagggacctctggagcccaagaaggcagatccattgagtgtaaatttaattgggaacactacatcatgccttgcaaataacaggcagtaagaacagctctgagttataaaccagacgaggttttttttctcatggctcaggatgtcctaaattgaaaaggaattccaaaaaacttgaaagaaaagcagctctctagaataaatgtcatttctcgtgggcatttttgttttttttttttccttgaaatagtttatttgatgtcttttattccatatatgtgggttttctggcaaaatttgaaaggggaatgggaataagagtagtaagataggttttaaaaatgagatatttagaatttatttgagtaacaattctgtaatatcctccctgctcttatgcagtcatgtgctgaataacaacatcaagtcagtgatggactgcatatatgacggtgctcccataagattacaaattttgtagagatgggggtctcgctatgttgcccaggctggtcttgaactcctggcctcaagtgatcctcctgccttggccacctcccgaagtgttgggattaacaggcgtgagctgtcgtgttcagccataataccatgtttactgtaccttttctatgtttaggtatgtttaaatacacaaatactaccagtgtgttacaactgcctatggtatttagtgcagtaacatgctgtgcagtttagcctaggagcaataggctctaccatgtatgtagcttaggtgtgtagtaagctgcgccgcgttagtttctgtaaatatgttctatgatgttcacacaacaaagtcacctaacaatgcatttctgttaagtgatgcatgactgtattttttactgttttcgataaataacttgatctgtttgttaatgtttaaaaccaaatccgatttaaataggaacggagttctgaattttagttttgttgtcagtgaaaaatcagaattaacagatcttgatctttgaagcaaatgtgagttttaaacatttaatgtaaaatactgggaaaagtgttacatctcttttagaatattagacctttagcaggtcttgcagtcttcaccagaaacactcccacacctacacacacacagtgtttttgtttttttttttttttttagacagaatctcgctctgtcaccccggctgaagtgcagtggtgcgatctcagttcactgcaagctccgcctcctgggttcacgccattctcctgcctcagcctcccgagtagctgggactgtaggtgcctgccaccgcgcccggctaatttttttgtattgttagtagagatggggtttcaccgtgttagccaggatggtcttgatctcctgatctcgtgatccgcctgcctcggcctcccaaagcgctgggattacaggcatgagcccccacacctggcccacacacaagtattttttttttaaaaaaagataaaatgctgtgaaagttacttaaatatttgtctcagttaaagccttttttttcccatttgtaacagtgtgactggtgtcttaaccagtgtgacttcctctgacttattaatgttcactctttgagacgaaatttaaaagctttaatggaaaagtgtggtttttgctgtgagaatttgattaactctcaattcgttctttcagtactcgggtttcatattttgctgtttttgatggacatggaggaattcgagcctcaaaatttgctgcacagaatttgcatcaaaacttaatcagaaaatttcctaaaggagatgtaatcagtgtagagaaaaccgtgaagagatgccttttggacactttcaagcatactgatgaagagttccttaaacaagcttccagccagaagcctgcctggaaagatgggtccactgccacgtgtgttctggctgtagacaacattctttatattgccaacctcggagatagtcgggcaatcttgtgtcgttataatgaggagagtcaaaaacatgcagccttaagcctcagcaaagagcataatccaactcagtatgaagagcggatgaggatacagaaggctggaggaaacgtcagggatgggcgtgttttgggcgtgctagaggtgtcacgctccattggggacgggcagtacaagcgctgcggtgtcacctctgtgcccgacatcagacgctgccagctgacccccaatgacaggttcattttgttggcctgtgatgggctcttcaaggtctttaccccagaagaagccgtgaacttcatcttgtcctgtctcgaggatgaaaagatccagacccgggaagggaagtccgcagccgacgcccgctacgaagcagcctgcaacaggctggccaacaaggcggtgcagcggggctcggccgacaacgtcactgtgatggtggtgcggatagggcactgaggggtggcgcgcggccaggagcacgcatggtattgacttaaaaggttcattttgtgtgtgtgcacattgtgtgttttgtgtactcctgtgggactcccatggttgtaaataaaggtttctctttttt

SEQ ID NO: 1271 - protein, 392 aa, Homo sapiens
  ref <308>: DATABASE ACCESSION NUMBER: Refseq / NP_110395
  ref <309>: DATABASE ENTRY DATE: 2001-08-09
MDLFGDLPEPERSPRPAAGKEAQKGPLLFDDLPPASSTDSGSGGPLLFDDLPPASSGDSGSLATSISQMVKTEGKGAKRKTSEEEKNGSEELVEKKVCKASSVIFGLKGYVAERKGEREEMQDAHVILNDITEECRPPSSLITRVSYFAVFDGHGGIRASKFAAQNLHQNLIRKFPKGDVISVEKTVKRCLLDTFKHTDEEFLKQASSQKPAWKDGSTATCVLAVDNILYIANLGDSRAILCRYNEESQKHAALSLSKEHNPTQYEERMRIQKAGGNVRDGRVLGVLEVSRSIGDGQYKRCGVTSVPDIRRCQLTPNDRFILLACDGLFKVFTPEEAVNFILSCLEDEKIQTREGKSAADARYEAACNRLANKAVQRGSADNVTVMVVRIGH

SEQ ID NO: 1272 - DNA, 1318 bp, Rattus norvegicus; identical to SEQ ID NO: 1268
  ref <308>: DATABASE ACCESSION NUMBER: EMBL / AF095927
  ref <309>: DATABASE ENTRY DATE: 2000-03-03

SEQ ID NO: 1273 - protein, 392 aa, Rattus norvegicus; identical to SEQ ID NO: 1269
  ref <308>: DATABASE ACCESSION NUMBER: SWISS-Prot / AAC97497
  ref <309>: DATABASE ENTRY DATE: 2003-02-01

SEQ ID NO: 1274 - DNA, 2654 bp, Homo sapiens; identical to SEQ ID NO: 1270
  ref <308>: DATABASE ACCESSION NUMBER: EMBL / AK055417
  ref <309>: DATABASE ENTRY DATE: 2002-08-06

SEQ ID NO: 1275 - protein, 392 aa, Homo sapiens; identical to SEQ ID NO: 1271
  ref <308>: DATABASE ACCESSION NUMBER: Refseq / NP_110395
  ref <309>: DATABASE ENTRY DATE: 2001-08-09

SEQ ID NO: 1276 - DNA, 1318 bp, Rattus norvegicus; identical to SEQ ID NO: 1268
  ref <308>: DATABASE ACCESSION NUMBER: EMBL / AF095927
  ref <309>: DATABASE ENTRY DATE: 2000-03-03

SEQ ID NO: 1277 - protein, 392 aa, Rattus norvegicus; identical to SEQ ID NO: 1269
  ref <308>: DATABASE ACCESSION NUMBER: SWISS-Prot / AAC97497
  ref <309>: DATABASE ENTRY DATE: 2003-02-01

SEQ ID NO: 1278 - DNA, 2654 bp, Homo sapiens; identical to SEQ ID NO: 1270
  ref <308>: DATABASE ACCESSION NUMBER: EMBL / AK055417
  ref <309>: DATABASE ENTRY DATE: 2002-08-06

SEQ ID NO: 1279 - protein, 392 aa, Homo sapiens; identical to SEQ ID NO: 1271
  ref <308>: DATABASE ACCESSION NUMBER: Refseq / NP_110395
  ref <309>: DATABASE ENTRY DATE: 2001-08-09

SEQ ID NO: 1280 - DNA, 1318 bp, Rattus norvegicus; identical to SEQ ID NO: 1268
  ref <308>: DATABASE ACCESSION NUMBER: EMBL / AF095927
  ref <309>: DATABASE ENTRY DATE: 2000-03-03

SEQ ID NO: 1281 - protein, 392 aa, Rattus norvegicus; identical to SEQ ID NO: 1269
  ref <308>: DATABASE ACCESSION NUMBER: SWISS-Prot / AAC97497
  ref <309>: DATABASE ENTRY DATE: 2003-02-01

SEQ ID NO: 1282 - DNA, 2654 bp, Homo sapiens; identical to SEQ ID NO: 1270
  ref <308>: DATABASE ACCESSION NUMBER: EMBL / AK055417
  ref <309>: DATABASE ENTRY DATE: 2002-08-06

SEQ ID NO: 1283 - protein, 392 aa, Homo sapiens; identical to SEQ ID NO: 1271
  ref <308>: DATABASE ACCESSION NUMBER: Refseq / NP_110395
  ref <309>: DATABASE ENTRY DATE: 2001-08-09

SEQ ID NO: 1284 - DNA, 4510 bp, Rattus norvegicus
  ref <308>: DATABASE ACCESSION NUMBER: EMBL / AF096835
  ref <309>: DATABASE ENTRY DATE: 1998-12-11
gcggaaccctcgctcaatgggcgatgtctgtacaaggctgtcactcaggtggcagtggctgagacgtggccgggcagctctgctgctgcggcgtgaagtcgagaggcgtcggggtccgtggtgcgcgctttcggtgctccaaggctcctagcggcgagacgggccggcgccgaccgcagggtctccatgcccgctcgtggggcgggccgctgatggagcgcgccacccagccccgaccgcgcgcgctgctgctgctgttcctgctgctgggctgcgcggcggggatctcagcggtcgcgcgcgcccgcagcttgcttgctcccacatcggatacggcatttggcttgggggcagcagccgcccctacttcagccgcgcgggtgcctgcggtggctacggccgaagtgaccgtggaagacgccgaggcattgcccgctgcctccggcgaacaggagtcacgcgcgaccgagtccgatgacgacgtggaactgcggcctcgcggcaggtccttagtaatcatcagcactttagatggacgaattgccgcactggatgccgagaatcatgggaaaaagcagtgggatttggacgtgggatctggttccttggtttcatctagccttagcaagccagaggtgtttgggaacaagatgatcattccttccctggacggagacctcttccagtgggaccgagaccgagagagcatggaggccgtccctttcactgtggagtcccttctcgaatcttcatacaagtttggagatgatgttgttctggttggaggaaagtctctgaccacatacgggctcagtgcatatagtggaaagctgaggtatatctgttctgccttgggatgtcgccgatgggatagtgatgaaatggaagaagaggaagacatcttgcttctgcaacgcacgcagaagactgtgcgagctgtcgggcctcgaagcggcagtgagaagtggaatttcagtgttggccactttgaacttcggtatattccagacatggaaactagagccggattcattgaaagcacctttaaactgggtggaaacaaagaagactctaaaatcatttcagatgtggaagaacaagatgtggacacagtgataaaagtttccgttgctgattggaaggtcatggcgtttagtaagaagggaggccgcctagaatgggagtaccagttttgtactcccattgcgtctgcctggctggtgagggatggtaaagtcatccccatcagtctgtttgatgacacaagttacacagccaatgaggaagttttggaagatgaagaagacattgtagaggctgctcggggagccacagagaacagcgtgtacttagggatgtacagaggccagctgtacctgcaatcatccgtcagggtctcggaaaagttccctacaaggccgaaggccttggagtctgtaaatggagaaagtgccattattcctctgccgacgatcaaatggaagcccttaatccattctccgtctaggactcctgtcttggttgggtctgatgaatttgacaagtgtctaagtaatgataaatattcccatgaagaatacagtaatggtgcgctttcaatcctacagtatccatatgacaacggttactatctgccttattacaagagagaaaggaataagcggagcacgcagatcacggtcaggttcctggacagcccgcactacagcaagaacatccgcaagaaggaccccatcctcctcctgcactggtggaaggaaatatttggaacgatcttgctttgcattgtggccacgacctttatcgtgcgcaggcttttccatcctcagccccacaggcaacggaaggagtctgaaactcagtgccaaactgaaagtaaatacgactctgtgagtgctgataacagcgacaacagctggaacgacattaaacactcaggatacgtgtcccgatacctaacagattttgagccaattcagtgcatgggtcgaggcggctttggcgttgtctttgaagctaagaacaaagtagatgactgcaattacgccatcaagaggatccgtctcccaaacagggagctggcacgggagaaggtaatgcgggaagtcaaagccttggctaagctggagcacccaggcatcgtgaggtatttcaatgcgtggctggaaacaccaccagagaagtggcaagaggagatggatgaaatctggctgaaggacgaaagcacagactggccactcagctcccctagcccaatggatgccccatctgttaagatccggcagatggatcctttctctacaaaagaacagattgaagtcatagctccttctcctgaaagaagtcggtctttctcagtgggcatttcctgtggccggacaagctcatctgagagccagttctctcccctggagttctcagggacagactgtggagacaacagtgactcagaggacgcagcccacaacctccaggacagctgcctgacagattgcgacatggaagatggtacagtggacggcgatgatgagggacactcctttgaactttgtccttctgaagcttctccctataccaggtcaagggagggaacgtcctcttccatagtgtttgaagactctggctgtgataatgcgtccagtaaggaggaccccagaatgaatcggctgcataatggccaccattacgttaataagctaactgagttcaagcactccagcagcaggtcttcttccgaagccaccttgtctacctctcctaccaggccaaccaccctaagtttagatttcaccaggaacacggtggaccggctccagcccagctcccccaaggtgtacctgtacatccagatgcagctgtgcaggaaggagaaccttaaagactggatgaaccggcgctgcagcatggaggacagggagcacagagtgtgcctgcacatctttctgcagatcgcagaggcagtgcagtttctgcacagcaagggactcatgcacagggacctcaagccttccaacatattcttcacaatggatgatgtggtcaaagttggggactttgggctagtgactgcaatggaccaggatgaagaagagcagacagtactgactccaatgccagcctatgctacacacacgggacaagtcgggaccaagctgtacatgagcccagaacagattcatggaaacaactactcccataaagtggacatcttctctttaggcttgattctgtttgaactcctttacccattcagcactcagatggaacgagttaggactttaactgatgtaagaaatctcaagtttccaccactgttcactcagaaatatccccaagagcatatgatggttcaagacatgctttctccatcccccatggagcggcctgaagccacagacatcattgaaaatgctgtgtttgagaacttggagtttcctgggaaaacggttctgagacagcggtcccgctccttgagttcatccggaactaaacattccagacagcccagcagcacattcagcccactgcctggcaactagtctccagctgtgcctgcggccctcagaggtggcacaggacgggcaccttgaggaatgtggctctccgtggtggcggactcattttatgctttgatcaacttgacttaggaccaatttttctaagtcagactggattatgggcctaacccagtttgatcttaactaaacttcaaggaaagggctatataaatgacaagtggatttgtttcttgttggtgtcccaaaactagctggtcaagctacagaaccttcacttttcaccaggaggcagaagacagcctgaaaccatctgaactggaaatgactttaaagcacaaaggtgtgaaagaccctctcacatgggaactacatgttctagaaacgtgctttctagaaatacaagggtgattatggaagcgactgttataaagctgactccatttttgtccctggtgagcatgtgacccatctgcactattttggaaggcgcagcacaggctgggtggccatttatgtcagtagtgccatagtctgcagcagtgaataacttcactttttaggtggtctagggagcacggtgagctttttgtacttttttatctccagtaatgggaaaatgaagctttttaggtattggtcaaaagatctgattggagggtttaaaaagaagtgtagtaagaaatgggtcacctattacacctaacttattccattatggagtttttgtcctagtagaagtctaccttatgtgtaatactacaagtcagcatatcccccaaactgattataggtaagtttaatcatctcaacttgctaacatgttctcatttttcctgtaaatatctttattttttatttataaaaattctgaaatcaatccatttgggttggtggtgtacaggatgcacataagtgtgttaactattatgacttctttcaagtctaaatgatttaataaaacgtttttaaattataaaaaaaaaaaaaaaaaa

SEQ ID NO: 1285 - protein, 1108 aa, Rattus norvegicus
  ref <308>: DATABASE ACCESSION NUMBER: SWISS-Prot / Q9Z1Z1
  ref <309>: DATABASE ENTRY DATE: 2002-06-15
MERATQPRPRALLLLFLLLGCAAGISAVARARSLLAPTSDTAFGLGAAAAPTSAARVPAVATAEVTVEDAEALPAASGEQESRATESDDDVELRPRGRSLVIISTLDGRIAALDAENHGKKQWDLDVGSGSLVSSSLSKPEVFGNKMIIPSLDGDLFQWDRDRESMEAVPFTVESLLESSYKFGDDVVLVGGKSLTTYGLSAYSGKLRYICSALGCRRWDSDEMEEEEDILLLQRTQKTVRAVGPRSGSEKWNFSVGHFELRYIPDMETRAGFIESTFKLGGNKEDSKIISDVEEQDVDTVIKVSVADWKVMAFSKKGGRLEWEYQFCTPIASAWLVRDGKVIPISLFDDTSYTANEEVLEDEEDIVEAARGATENSVYLGMYRGQLYLQSSVRVSEKFPTRPKALESVNGESAIIPLPTIKWKPLIHSPSRTPVLVGSDEFDKCLSNDKYSHEEYSNGALSILQYPYDNGYYLPYYKRERNKRSTQITVRFLDSPHYSKNIRKKDPILLLHWWKEIFGTILLCIVATTFIVRRLFHPQPHRQRKESETQCQTESKYDSVSADNSDNSWNDIKHSGYVSRYLTDFEPIQCMGRGGFGVVFEAKNKVDDCNYAIKRIRLPNRELAREKVMREVKALAKLEHPGIVRYFNAWLETPPEKWQEEMDEIWLKDESTDWPLSSPSPMDAPSVKIRQMDPFSTKEQIEVIAPSPERSRSFSVGISCGRTSSSESQFSPLEFSGTDCGDNSDSEDAAHNLQDSCLTDCDMEDGTVDGDDEGHSFELCPSEASPYTRSREGTSSSIVFEDSGCDNASSKEDPRMNRLHNGHHYVNKLTEFKHSSSRSSSEATLSTSPTRPTTLSLDFTRNTVDRLQPSSPKVYLYIQMQLCRKENLKDWMNRRCSMEDREHRVCLHIFLQIAEAVQFLHSKGLMHRDLKPSNIFFTMDDVVKVGDFGLVTAMDQDEEEQTVLTPMPAYATHTGQVGTKLYMSPEQIHGNNYSHKVDIFSLGLILFELLYPFSTQMERVRTLTDVRNLKFPPLFTQKYPQEHMMVQDMLSPSPMERPEATDIIENAVFENLEFPGKTVLRQRSRSLSSSGTKHSRQPSSTFSPLPGN

SEQ ID NO: 1286 - DNA, 4325 bp, Homo sapiens
  ref <308>: DATABASE ACCESSION NUMBER: EMBL / AF110146
  ref <309>: DATABASE ENTRY DATE: 1999-03-15
ggagctccaagcggcgggagaggcaggcgtcagtggctgcgcctccatgcctgcgcgcggggcgggacgctgatggagcgcgccatcagcccggggctgctggtacgggcgctgctgctgctgctgctgctggggctcgcggcaaggacggtggccgcggggcgcgcccgtggcctcccagcgccgacggcggaggcggcgttcggcctcggggcggccgctgctcccacctcagcgacgcgagtaccggcggcgggcgccgtggctgcggccgaggtgactgtggaggacgctgaggcgctgccggcagccgcgggagagcaggagcctcggggtccggaaccagacgatgagacagagttgcgaccgcgcggcaggtcattagtaattatcagcactttagatgggagaattgctgccttggatcctgaaaatcatggtaaaaagcagtgggatttggatgtgggatccggttccttggtgtcatccagccttagcaaaccagaggtatttgggaataagatgatcattccttccctggatggagccctcttccagtgggaccgagaccgtgaaagcatggaaacagttcctttcacagttgaatcacttcttgaatcttcttataaatttggagatgatgttgttttggttggaggaaaatctctgactacatatggactcagtgcatatagtggaaaggtgaggtatatctgttcagctctgggttgtcgccaatgggatagtgacgaaatggaacaagaggaagacatcctgcttctacagcgtacccaaaaaactgttagagctgtcggacctcgcagtggcaatgagaagtggaatttcagtgttggccactttgaacttcggtatattccagacatggaaacgagagccggatttattgaaagcacctttaagcccaatgagaacacagaagagtctaaaattatttcagatgtggaagaacaggaagctgccataatggacatagtgataaaggtttcggttgctgactggaaagttatggcattcagtaagaagggaggacatctggaatgggagtaccagttttgtactccaattgcatctgcctggttacttaaggatgggaaagtcattcccatcagtctttttgatgatacaagttatacatctaatgatgatgttttagaagatgaagaagacattgtagaagctgccagaggagccacagaaaacagtgtttacttgggaatgtatagaggccagctgtatctgcagtcatcagtcagaatttcagaaaagtttccttcaagtcccaaggctttggaatctgtcactaatgaaaacgcaattattcctttaccaacaatcaaatggaaacccttaattcattctccttccagaactcctgtcttggtaggatctgatgaatttgacaaatgtctcagtaatgataagttttctcatgaagaatatagtaatggtgcactttcaatcttgcagtatccatatgataatggttattatctaccatactacaagagggagaggaacaaacgaagcacacagattacagtcagattcctcgacaacccacattacaacaagaatatccgcaaaaaggatcctgttcttcttttacactggtggaaagaaatagttgcaacgattttgttttgtatcatagcaacaacgtttattgtgcgcaggcttttccatcctcatcctcacaggcaaaggaaggagtctgaaactcagtgtcaaactgaaaataaatatgattctgtaagtggtgaagccaatgacagtagctggaatgacataaaaaactctggatatatatcacgatatctaactgattttgagccaattcagtgcctgggacgtggtggctttggagttgtttttgaagctaaaaacaaagtagatgactgcaattatgctatcaagaggatccgtctccccaatagggaattggctcgggaaaaggtaatgcgagaagttaaagccttagccaagcttgaacacccgggcattgttagatatttcaatgcctggctcgaagcaccaccagagaagtggcaagaaaagatggatgaaatttggctgaaagatgaaagcacagactggccactcagctctcctagcccaatggatgcaccatcagttaaaatacgcagaatggatcctttctctacaaaagaacatattgaaatcatagctccttcaccacaaagaagcaggtctttttcagtagggatttcctgtgaccagacaagttcatctgagagccagttctcaccactggaattctcaggaatggaccatgaggacatcagtgagtcagtggatgcagcatacaacctccaggacagttgccttacagactgtgatgtggaagatgggactatggatggcaatgatgaggggcactcctttgaactttgtccttctgaagcttctccttatgtaaggtcaagggagagaacctcctcttcaatagtatttgaagattctggctgtgataatgcttccagtaaagaagagccgaaaactaatcgattgcatattggcaaccattgtgctaataaactaactgctttcaagcccaccagtagcaaatcttcttctgaagctacattgtctatttctcctccaagaccaaccactttaagtttagatctcactaaaaacaccacagaaaaactccagcccagttcaccaaaggtgtatctttacattcaaatgcagctgtgcagaaaagaaaacctcaaagactggatgaatggacgatgtaccatagaggagagagagaggagcgtgtgtctgcacatcttcctgcagatcgcagaggcagtggagtttcttcacagtaaaggactgatgcacagggacctcaagccatccaacatattctttacaatggatgatgtggtcaaggttggagactttgggttagtgactgcaatggaccaggatgaggaagagcagacggttctgaccccaatgccagcttatgccagacacacaggacaagtagggaccaaactgtatatgagcccagagcagattcatggaaacagctattctcataaagtggacatcttttctttaggcctgattctatttgaattgctgtatccattcagcactcagatggagagagtcaggaccttaactgatgtaagaaatctcaaatttccaccattatttactcagaaatatccttgtgagtacgtgatggttcaagacatgctctctccatcccccatggaacgacctgaagctataaacatcattgaaaatgctgtatttgaggacttggactttccaggaaaaacagtgctcagacagaggtctcgctccttgagttcatcgggaacaaaacattcaagacagtccaacaactcccatagccctttgccaagcaattagccttaagttgtgctagcaaccctaataggtgatgcagataatagcctacttcttagaatatgcctgtccaaaattgcagacttgaaaagtttgttcttcgctcaatttttttgtggactactttttttatatcaaatttaagctggatttgggggcataacctaatttgagccaactcctgagttttgctatacttaaggaaagggctatctttgttctttgttagtctcttgaaactggctgctggccaagctttatagccctcaccatttgcctaaggaggtagcagcaatccctaatatatatatatagtgagaactaaaatggatatatttttataatgcagaagaaggaaagtccccctgtgtggtaactgtattgttctagaaatatgctttctagagatatgatgattttgaaactgatttctagaaaaagctgactccatttttgtccctggcgggtaaattaggaatctgcactattttggaggacaagtagcacaaactgtataacggtttatgtccgtagttttatagtcctatttgtagcattcaatagctttattccttagatggttctagggtgggtttacagctttttgtacttttacctccaataaagggaaaatgaagctttttatgtaaattggttgaaaggtctagttttgggaggaaaaaagccgtagtaagaaatggatcatatatattacaactaacttcttcaactatggactttttaagcctaatgaaatcttaagtgtcttatatgtaatcctgtaggttggtacttcccccaaactgattataggtaacagtttaatcatctcacttgctaacatgtttttatttttcactgtaaatatgtttatgttttatttataaaaattctgaaatcaatccatg

SEQ ID NO: 1287 - protein, 1115 aa, Homo sapiens
  ref <308>: DATABASE ACCESSION NUMBER: SWISS-Prot / Q9NZJ5
  ref <309>: DATABASE ENTRY DATE: 2002-06-15
MERAISPGLLVRALLLLLLLGLAARTVAAGRARGLPAPTAEAAFGLGAAAAPTSATRVPAAGAVAAAEVTVEDAEALPAAAGEQEPRGPEPDDETELRPRGRSLVIISTLDGRIAALDPENHGKKQWDLDVGSGSLVSSSLSKPEVFGNKMIIPSLDGALFQWDRDRESMETVPFTVESLLESSYKFGDDVVLVGGKSLTTYGLSAYSGKVRYICSALGCRQWDSDEMEQEEDILLLQRTQKTVRAVGPRSGNEKWNFSVGHFELRYIPDMETRAGFIESTFKPNENTEESKIISDVEEQEAAIMDIVIKVSVADWKVMAFSKKGGHLEWEYQFCTPIASAWLLKDGKVIPISLFDDTSYTSNDDVLEDEEDIVEAARGATENSVYLGMYRGQLYLQSSVRISEKFPSSPKALESVTNENAIIPLPTIKWKPLIHSPSRTPVLVGSDEFDKCLSNDKFSHEEYSNGALSILQYPYDNGYYLPYYKRERNKRSTQITVRFLDNPHYNKNIRKKDPVLLLHWWKEIVATILFCIIATTFIVRRLFHPHPHRQRKESETQCQTENKYDSVSGEANDSSWNDIKNSGYISRYLTDFEPIQCLGRGGFGVVFEAKNKVDDCNYAIKRIRLPNRELAREKVMREVKALAKLEHPGIVRYFNAWLEAPPEKWQEKMDEIWLKDESTDWPLSSPSPMDAPSVKIRRMDPFSTKEHIEIIAPSPQRSRSFSVGISCDQTSSSESQFSPLEFSGMDHEDISESVDAAYNLQDSCLTDCDVEDGTMDGNDEGHSFELCPSEASPYVRSRERTSSSIVFEDSGCDNASSKEEPKTNRLHIGNHCANKLTAFKPTSSKSSSEATLSISPPRPTTLSLDLTKNTTEKLQPSSPKVYLYIQMQLCRKENLKDWMNGRCTIEERERSVCLHIFLQIAEAVEFLHSKGLMHRDLKPSNIFFTMDDVVKVGDFGLVTAMDQDEEEQTVLTPMPAYARHTGQVGTKLYMSPEQIHGNSYSHKVDIFSLGLILFELLYPFSTQMERVRTLTDVRNLKFPPLFTQKYPCEYVMVQDMLSPSPMERPEAINIIENAVFEDLDFPGKTVLRQRSRSLSSSGTKHSRQSNNSHSPLPSN

SEQ ID NO: 1288 - DNA, 4510 bp, Rattus norvegicus; identical to SEQ ID NO: 1284
  ref <308>: DATABASE ACCESSION NUMBER: EMBL / AF096835
  ref <309>: DATABASE ENTRY DATE: 1998-12-11

SEQ ID NO: 1289 - protein, 1108 aa, Rattus norvegicus; identical to SEQ ID NO: 1285
  ref <308>: DATABASE ACCESSION NUMBER: SWISS-Prot / Q9Z1Z1
  ref <309>: DATABASE ENTRY DATE: 2002-06-15

SEQ ID NO: 1290 - DNA, 4325 bp, Homo sapiens; identical to SEQ ID NO: 1286
  ref <308>: DATABASE ACCESSION NUMBER: EMBL / AF110146
  ref <309>: DATABASE ENTRY DATE: 1999-03-15

SEQ ID NO: 1291 - protein, 1115 aa, Homo sapiens; identical to SEQ ID NO: 1287
  ref <308>: DATABASE ACCESSION NUMBER: SWISS-Prot / Q9NZJ5
  ref <309>: DATABASE ENTRY DATE: 2002-06-15

SEQ ID NO: 1292 - DNA, 3036 bp, Rattus norvegicus
  ref <308>: DATABASE ACCESSION NUMBER: EMBL / AF097593
  ref <309>: DATABASE ENTRY DATE: 1998-12-11
ccgcctccggctcctcgctcggcccctctccgcctcatgtgccggatagcgggagggccgcggaccctgctgccgcttctggcggccttgcttcaggcatctctggaggcttctggtgaacttgcattatgcaagactggatttcctgaagatgtttacagcgcagtcttaccgaagacagtgcacgaaggccagcctcttctcaatgtgaaattcagcaactgcaatagaaaaaggaaagttcagtatgaaagcagtgaaccagcagattttaaggtggatgaggacggcacagtgtacgctgtgagaagcttccctctctctgcagagcaggcaaagttcctgatatatgcccaagacaaagaaacccaggaaaagtggcaggtagctgttaacctgagcctggagcccagcctgactgaggagccgatgaaggaaccacatgaaattgaagaaatagtattccctagacaactcgccaagcacagcggagctctacaaaggcagaagagagactgggtcatccctccgatcaacttgccagaaaactccagaggaccctttccgcaagagcttgtcagaatcaggtctgatagagataagaacctatctctgagatacagtgtcactgggccaggagctgaccagcctccaacgggcatcttcatcatcaaccccatctctggacaactgtcagtcacaaagcctctggacagagaactgatagcccggtttcacctgagggcacatgcagttgacatcaatggcaatcaagtggagaaccccattgacatcgtcatcaatgtcatcgacatgaatgataacagacctgagtttctgcaccaggtttggaatgggtctgttccagagggatcaaagcctgggacgtatgtgatgactgtcactgccattgatgcagatgacccaaatgccctgaatgggatgctgaggtacaggatcctctcccaggcacccagcaccccttctcccaacatgtttacaatcaacaacgagaccggggacatcatcactgtggcagctggtctggaccgagagaaagtgcaacagtatacgttaataattcaagccactgacatggaaggcaatcccacttacggcctttcaaacacagccacagccgtcatcacagtgacagatgtcaatgacaatcctccagagtttactgccatgactttctacggagaagtccctgagaacagagtggatgtcattgtagccaacctgactgtcaccgacaaggaccagccccacacaccagcctggaatgcggcatacagaatcagtggtggagaccccacgggaaggttcgccatcctgacagaccccaacagcaatgatgggctagtcacagtggtaaaaccaattgactttgaaacgaataggatgtttgtccttactgttgctgcagaaaaccaagtgccattagctaaggggatccagcacccacctcagtcgacagccacggtgtctgtgacagttattgatgtcaatgaaaatccttattttgccccaaatcctaaaatcattcgccaagaggaaggcctccacgcaggtaccatgctgaccactctcactgctcaggaccccgatcgatatatgcaacagaatatcagatacacaaagttatctgaccctgccaactggctgaaaatagaccctgtgaacgggcagatcaccactatcgctgttctggacagagagtcgccaaatgtcaaaaacaacatctataatgctaccttccttgcttctgacaatggaatccctcctatgagtggaacaggaacgctgcaaatctatttacttgatatcaatgacaacgcccctcaggtgttacctcaagaggccgagacttgtgaaactccagaacccaattcaattaacatcacagcgcttgattatgacatagaccccaatgcagggccctttgcatttgaccttcccttatccccagcgaccattaaaagaaactggaccatcacccggcttaatggtgattttgctcagctcaatttaaagatcaagtttttggaagctggcatctatgaagttcccatcgttatcacagattcagggaatccccccaagtccaatatttccatcctgcgtgtgaaagtttgccaatgtgactccaatggagactgcaccgacgtagacaggatcgtgggtgcagggcttggcacgggcaccatcatcgcgatacttctgtgtatcatcatcctgctgatccttgtcctcatgttcgtggtatggatgaaacgccgggataaagagcgccaggccaagcagcttttaatagacccagaagatgatgtaagagataacatattgaaatatgatgaagaaggtggaggagaggaagaccaggactatgacttgagccagctccagcaaccagataccgtggagcctgatgccatcaaacctgtgggaatcagacggctagacgagaggcctatccacgctgagccacagtatccagtccgatccgcagccccacaccctggggatattggggacttcattaatgagggccttaaagctgctgacaatgaccccacggcgccaccatatgactccctcttagtcttcgactatgagggcagcggctccacggctggctccttgagctctctcaactcctccagcagcggcggggaccaggactatgactacctgaatgactggggaccccgcttcaagaagctggccgacatgtatggtggtggtgatgactgaacggcaggacggacttggcttttggacacgtatgaacagtttcacctgatattcccaaaaagcatacagaagctaggctttaactctgtagtccactagcaccgtgcttgctggaggctttggcgtaggctgcgaaccagtttgggctcccagggaatatcagtgatccgatactgtctggaaaacaccgagctcagctacacttgaattttacagtacagaagcactgggattttatgtgcctttttgtacctttttcagattggaattagttttctg

SEQ ID NO: 1293 - protein, 906 aa, Rattus norvegicus
  ref <308>: DATABASE ACCESSION NUMBER: SWISS-Prot / Q9Z1Y3
  ref <309>: DATABASE ENTRY DATE: 2001-10-16
MCRIAGGPRTLLPLLAALLQASLEASGELALCKTGFPEDVYSAVLPKTVHEGQPLLNVKFSNCNRKRKVQYESSEPADFKVDEDGTVYAVRSFPLSAEQAKFLIYAQDKETQEKWQVAVNLSLEPSLTEEPMKEPHEIEEIVFPRQLAKHSGALQRQKRDWVIPPINLPENSRGPFPQELVRIRSDRDKNLSLRYSVTGPGADQPPTGIFIINPISGQLSVTKPLDRELIARFHLRAHAVDINGNQVENPIDIVINVIDMNDNRPEFLHQVWNGSVPEGSKPGTYVMTVTAIDADDPNALNGMLRYRILSQAPSTPSPNMFTINNETGDIITVAAGLDREKVQQYTLIIQATDMEGNPTYGLSNTATAVITVTDVNDNPPEFTAMTFYGEVPENRVDVIVANLTVTDKDQPHTPAWNAAYRISGGDPTGRFAILTDPNSNDGLVTVVKPIDFETNRMFVLTVAAENQVPLAKGIQHPPQSTATVSVTVIDVNENPYFAPNPKIIRQEEGLHAGTMLTTLTAQDPDRYMQQNIRYTKLSDPANWLKIDPVNGQITTIAVLDRESPNVKNNIYNATFLASDNGIPPMSGTGTLQIYLLDINDNAPQVLPQEAETCETPEPNSINITALDYDIDPNAGPFAFDLPLSPATIKRNWTITRLNGDFAQLNLKIKFLEAGIYEVPIVITDSGNPPKSNISILRVKVCQCDSNGDCTDVDRIVGAGLGTGTIIAILLCIIILLILVLMFVVWMKRRDKERQAKQLLIDPEDDVRDNILKYDEEGGGEEDQDYDLSQLQQPDTVEPDAIKPVGIRRLDERPIHAEPQYPVRSAAPHPGDIGDFINEGLKAADNDPTAPPYDSLLVFDYEGSGSTAGSLSSLNSSSSGGDQDYDYLNDWGPRFKKLADMYGGGDD

SEQ ID NO: 1294 - DNA, 4122 bp, Homo sapiens
  ref <308>: DATABASE ACCESSION NUMBER: Refseq / NM_001792
  ref <309>: DATABASE ENTRY DATE: 2002-11-05
tttgtcatcagctcgctctccattggcggggagcggagagcagcgaagaagggggtggggaggggaggggaagggaagggggtggaaactgcctggagccgtttctccgcgccgctgttggtgctgccgctgcctcctcctcctccgccgccgccgccgccgccgccgcctcctccggctcttcgctcggcccctctccgcctccatgtgccggatagcgggagcgctgcggaccctgctgccgctgctggcggccctgcttcaggcgtctgtagaggcttctggtgaaatcgcattatgcaagactggatttcctgaagatgtttacagtgcagtcttatcgaaggatgtgcatgaaggacagcctcttctcaatgtgaagtttagcaactgcaatggaaaaagaaaagtacaatatgagagcagtgagcctgcagattttaaggtggatgaagatggcatggtgtatgccgtgagaagctttccactctcttctgagcatgccaagttcctgatatatgcccaagacaaagagacccaggaaaagtggcaagtggcagtaaaattgagcctgaagccaaccttaactgaggagtcagtgaaggagtcagcagaagttgaagaaatagtgttcccaagacaattcagtaagcacagtggccacctacaaaggcagaagagagactgggtcatccctccaatcaacttgccagaaaactccaggggaccttttcctcaagagcttgtcaggatcaggtctgatagagataaaaacctttcactgcggtacagtgtaactgggccaggagctgaccagcctccaactggtatcttcattatcaaccccatctcgggtcagctgtcggtgacaaagcccctggatcgcgagcagatagcccggtttcatttgagggcacatgcagtagatattaatggaaatcaagtggagaaccccattgacattgtcatcaatgttattgacatgaatgacaacagacctgagttcttacaccaggtttggaatgggacagttcctgagggatcaaagcctggaacatatgtgatgaccgtaacagcaattgatgctgacgatcccaatgccctcaatgggatgttgaggtacagaatcgtgtctcaggctccaagcaccccttcacccaacatgtttacaatcaacaatgagactggtgacatcatcacagtggcagctggacttgatcgagaaaaagtgcaacagtatacgttaataattcaagctacagacatggaaggcaatcccacatatggcctttcaaacacagccacggccgtcatcacagtgacagatgtcaatgacaatcctccagagtttactgccatgacgttttatggtgaagttcctgagaacagggtagacatcatagtagctaatctaactgtgaccgataaggatcaaccccatacaccagcctggaacgcagtgtacagaatcagtggcggagatcctactggacggttcgccatccagaccgacccaaacagcaacgacgggttagtcaccgtggtcaaaccaatcgactttgaaacaaataggatgtttgtccttactgttgctgcagaaaatcaagtgccattagccaagggaattcagcacccgcctcagtcaactgcaaccgtgtctgttacagttattgacgtaaatgaaaacccttattttgcccccaatcctaagatcattcgccaagaagaagggcttcatgccggtaccatgttgacaacattcactgctcaggacccagatcgatatatgcagcaaaatattagatacactaaattatctgatcctgccaattggctaaaaatagatcctgtgaatggacaaataactacaattgctgttttggaccgagaatcaccaaatgtgaaaaacaatatatataatgctactttccttgcttctgacaatggaattcctcctatgagtggaacaggaacgctgcagatctatttacttgatattaatgacaatgcccctcaagtgttacctcaagaggcagagacttgcgaaactccagaccccaattcaattaatattacagcacttgattatgacattgatccaaatgctggaccatttgcttttgatcttcctttatctccagtgactattaagagaaattggaccatcactcggcttaatggtgattttgctcagcttaatttaaagataaaatttcttgaagctggtatctatgaagttcccatcataatcacagattcgggtaatcctcccaaatcaaatatttccatcctgcgcgtgaaggtttgccagtgtgactccaacggggactgcacagatgtggacaggattgtgggtgcggggcttggcaccggtgccatcattgccatcctgctctgcatcatcatcctgcttatccttgtgctgatgtttgtggtatggatgaaacgccgggataaagaacgccaggccaaacaacttttaattgatccagaagatgatgtaagagataatattttaaaatatgatgaagaaggtggaggagaagaagaccaggactatgacttgagccagctgcagcagcctgacactgtggagcctgatgccatcaagcctgtgggaatccgacgaatggatgaaagacccatccacgctgagccccagtatccggtccgatctgcagccccacaccctggagacattggggacttcattaatgagggccttaaagcggctgacaatgaccccacagctccaccatatgactccctgttagtgtttgactatgaaggcagtggctccactgctgggtccttgagctcccttaattcctcaagtagtggtggtgagcaggactatgattacctgaacgactgggggccacggttcaagaaacttgctgacatgtatggtggaggtgatgactgaacttcagggtgaacttggtttttggacaagtacaaacaatttcaactgatattcccaaaaagcattcagaagctaggctttaactttgtagtctactagcacagtgcttgctggaggctttggcataggctgcaaaccaatttgggctcagagggaatatcagtgatccatactgtttggaaaaacactgagctcagttacacttgaattttacagtacagaagcactgggattttatgtgcctttttgtacctttttcagattggaattagttttctgtttaaggctttaatggtactgatttctgaaacgataagtaaaagacaaaatattttgtggtgggagcagtaagttaaaccatgatatgcttcaacacgcttttgttacattgcatttgcttttattaaaatacaaaattaaacaaacaaaaaaactcatggagcgattttattatcttgggggatgagaccatgagattggaaaatgtacattacttctagttttagactttagtttgttttttttttttcactaaaatcttaaaacttactcagctggttgcaaataaagggagttttcatatcaccaatttgtagcaaaattgaattttttcataaactagaatgttagacacattttggtcttaatccatgtacacttttttatttctgtatttttccacttcactgtaaaaatagtatgtgtacataatgttttattggcatagtctatggagaagtgcagaaacttcagaacatgtgtatgtattatttggactatggattcaggttttttgcatgtttatatctttcgttatggataaagtatttacaaaacagtgacatttgattcaattgttgagctgtagttagaatactcaatttttaatttttttaatttttttattttttattttctttttggtttggggagggagaaaagttcttagcacaaatgttttacataatttgtaccaaaaaaaaaaaaaaggaaaggaaagaaaggggtggcctgacactggtggcactactaagtgtgtgttttttaaaaaaaaaaatggaaaaaaaaaagcttttaaactggagagacttctgacaacagctttgcctctgtattgtgtaccagaatataaatgatacacctctgaccccagcgttctgaataaaatgctaattttggaaaaaaaaaaaaaaaaa

SEQ ID NO: 1295 - protein, 906 aa, Homo sapiens
  ref <308>: DATABASE ACCESSION NUMBER: SWISS-Prot / P19022
  ref <309>: DATABASE ENTRY DATE: 2001-10-16
MCRIAGALRTLLPLLLALLQASVEASGEIALCKTGFPEDVYSAVLSKDVHEGQPLLNVKFSNCNGKRKVQYESSEPADFKVDEDGMVYAVRSFPLSSEHAKFLIYAQDKETQEKWQVAVKLSLKPTLTEESVKESAEVEEIVFPRQFSKHSGHLQRQKRDWVIPPINLPENSRGPFPQELVRIRSDRDKNLSLRYSVTGPGADQPPTGIFIINPISGQLSVTKPLDREQIARFHLRAHAVDINGNQVENPIDIVINVIDMNDNRPEFLHQVWNGTVPEGSKPGTYVMTVTAIDADDPNALNGMLRYRIVSQAPSTPSPNMFTINNETGDIITVAAGLDREKVQQYTLIIQATDMEGNPTYGLSNTATAVITVTDVNDNPPEFTAMTFYGEVPENRVDIIVANLTVTDKDQPHTPAWNAVYRISGGDPTGRFAIQTDPNSNDGLVTVVKPIDFETNRMFVLTVAAENQVPLAKGIQHPPQSTATVSVTVIDVNENPYFAPNPKIIRQEEGLHAGTMLTTFTAQDPDRYMQQNIRYTKLSDPANWLKIDPVNGQITTIAVLDRESPNVKNNIYNATFLASDNGIPPMSGTGTLQIYLLDINDNAPQVLPQEAETCETPDPNSINITALDYDIDPNAGPFAFDLPLSPVTIKRNWTITRLNGDFAQLNLKIKFLEAGIYEVPIIITDSGNPPKSNISILRVKVCQCDSNGDCTDVDRIVGAGLGTGAIIAILLCIIILLILVLMFVVWMKRRDKERQAKQLLIDPEDDVRDNILKYDEEGGGEEDQDYDLSQLQQPDTVEPDAIKPVGIRRMDERPIHAEPQYPVRSAAPHPGDIGDFINEGLKAADNDPTAPPYDSLLVFDYEGSGSTAGSLSSLNSSSSGGEQDYDYLNDWGPRFKKLADMYGGGDD

SEQ ID NO: 1296 - DNA, 3036 bp, Rattus norvegicus; identical to SEQ ID NO: 1292
  ref <308>: DATABASE ACCESSION NUMBER: EMBL / AF097593
  ref <309>: DATABASE ENTRY DATE: 1998-12-11

SEQ ID NO: 1297 - protein, 906 aa, Rattus norvegicus; identical to SEQ ID NO: 1293
  ref <308>: DATABASE ACCESSION NUMBER: SWISS-Prot / Q9Z1Y3
  ref <309>: DATABASE ENTRY DATE: 2001-10-16

SEQ ID NO: 1298 - DNA, 4122 bp, Homo sapiens; identical to SEQ ID NO: 1294
  ref <308>: DATABASE ACCESSION NUMBER: Refseq / NM_001792
  ref <309>: DATABASE ENTRY DATE: 2002-11-05

SEQ ID NO: 1299 - protein, 906 aa, Homo sapiens; identical to SEQ ID NO: 1295
  ref <308>: DATABASE ACCESSION NUMBER: SWISS-Prot / P19022
  ref <309>: DATABASE ENTRY DATE: 2001-10-16

SEQ ID NO: 1300 - DNA, 3036 bp, Rattus norvegicus; identical to SEQ ID NO: 1292
  ref <308>: DATABASE ACCESSION NUMBER: EMBL / AF097593
  ref <309>: DATABASE ENTRY DATE: 1998-12-11

SEQ ID NO: 1301 - protein, 906 aa, Rattus norvegicus; identical to SEQ ID NO: 1293
  ref <308>: DATABASE ACCESSION NUMBER: SWISS-Prot / Q9Z1Y3
  ref <309>: DATABASE ENTRY DATE: 2001-10-16

SEQ ID NO: 1302 - DNA, 4122 bp, Homo sapiens; identical to SEQ ID NO: 1294
  ref <308>: DATABASE ACCESSION NUMBER: Refseq / NM_001792
  ref <309>: DATABASE ENTRY DATE: 2002-11-05

SEQ ID NO: 1303 - protein, 906 aa, Homo sapiens; identical to SEQ ID NO: 1295
  ref <308>: DATABASE ACCESSION NUMBER: SWISS-Prot / P19022
  ref <309>: DATABASE ENTRY DATE: 2001-10-16

SEQ ID NO: 1304 - DNA, 3036 bp, Rattus norvegicus; identical to SEQ ID NO: 1292
  ref <308>: DATABASE ACCESSION NUMBER: EMBL / AF097593
  ref <309>: DATABASE ENTRY DATE: 1998-12-11

SEQ ID NO: 1305 - protein, 906 aa, Rattus norvegicus; identical to SEQ ID NO: 1293
  ref <308>: DATABASE ACCESSION NUMBER: SWISS-Prot / Q9Z1Y3
  ref <309>: DATABASE ENTRY DATE: 2001-10-16

SEQ ID NO: 1306 - DNA, 4122 bp, Homo sapiens; identical to SEQ ID NO: 1294
  ref <308>: DATABASE ACCESSION NUMBER: Refseq / NM_001792
  ref <309>: DATABASE ENTRY DATE: 2002-11-05

SEQ ID NO: 1307 - protein, 906 aa, Homo sapiens; identical to SEQ ID NO: 1295
  ref <308>: DATABASE ACCESSION NUMBER: SWISS-Prot / P19022
  ref <309>: DATABASE ENTRY DATE: 2001-10-16

SEQ ID NO: 1308 - DNA, 931 bp, Rattus norvegicus
  misc_feature (1)..(931): n=a, c, g or t
  ref <308>: DATABASE ACCESSION NUMBER: EMBL / AF099093
  ref <309>: DATABASE ENTRY DATE: 2000-03-03
agctccaccgcggtgngccgctctagaactagtggatccccgggctncaggaattcctttcccttccgggcgtgacgcctgagaggaaagccgagcggagatctcgcataggcagcgaggtgcttctcgggtctcccaagaccggcctcccgcggcttcggcgctccagtcgcggggcccgggttcctcaacacacntagcttcagccaccgtcagagcttgtcccccatccgtcgaagtcccggcggcaccgggcttcttggtggggaggatgacggagctgcagtcggcactgctactgcgaagacagctggcagaactcaacaaaaatccagtggaaggcttttcagcaggtttaatagacgacaatgatctctatcgttgggaagtccttattattggtcctccagatacactttatgaaggtggtgtttttaaggctcatctcactttcccaaaagattatcccctccgacctcctaaaatgaaattcattacagagatttggcacccaaatgttgataaaaatggtgatgtttgcatttctattcttcatgaacctggagaggataaatatggttatgagaagccagaggaacgctggctgcctatccatactgtggaaaccatcatgattagtgtcatttctatgctggcagatcctaatggagactcacctgcaaatgtagatgctgcgaaagaatggagggaagacagaaatggagaatttaaaaggaaagttgcccgctgtgtaagaaaaagccaagaaactgcttttgagtgatgtttattcaatagctagtaacttcacttatttcagggtctccaattgagaaacatggcactgtttttncttgcacctctacccaccttattgctgggacttctgttgtaacaagttggcaaactctggctggaactgggctgcaat

SEQ ID NO: 1309 - protein, 170 aa, Rattus norvegicus
  ref <308>: DATABASE ACCESSION NUMBER: SWISS-Prot / Q99462
  ref <309>: DATABASE ENTRY DATE: 2002-06-15
MTELQSALLLRRQLAELNKNPVEGFSAGLIDDNDLYRWEVLIIGPPDTLYEGGVFKAHLTFPKDYPLRPPKMKFITEIWHPNVDKNGDVCISILHEPGEDKYGYEKPEERWLPIHTVETIMISVISMLADPNGDSPANVDAAKEWREDRNGEFKRKVARCVRKSQETAFE

SEQ ID NO: 1310 - DNA, 2430 bp, Homo sapiens
  ref <308>: DATABASE ACCESSION NUMBER: Refseq / NM_003342
  ref <309>: DATABASE ENTRY DATE: 2002-11-05
accggcagcgaggcgccgctcccgccgcctcagcccggccttcctcggctccggcgctccggtcgcggggcccgggttcctcggcacaccccgctccagccgcccccagagcctgtccccagcccttcggaagccccggcgccagcccgggccctcggcagggaggatgacggagctgcagtcggcactgctactgcgaagacagctggcagaactcaacaaaaatccagtggaaggcttttctgcaggtttaatagatgacaatgatctctaccgatgggaagtccttattattggccctccagatacactttatgaaggtggtgtttttaaggctcatcttactttcccaaaagattatcccctccgacctcctaaaatgaaattcattacagaaatctggcacccaaatgttgataaaaatggtgatgtgtgcatttctattcttcatgagcctggggaagataagtatggttatgaaaagccagaggaacgctggctccctatccacactgtggaaaccatcatgattagtgtcatttctatgctggcagaccctaatggagactcacctgctaatgttgatgctgcgaaagaatggagggaagatagaaatggagaatttaaaagaaaagttgcccgctgtgtaagaaaaagccaagagactgcttttgagtgacatttatttagcagctagtaacttcacttatttcagggtctccaattgagaaacatggcactgtttttcctgcactctacccacctattgctggacttctgttgtacaagttggcaaacactggctggaactgggctgcaataaaacatgccagttatcaatgctgacaagagcctaacaagtgccaacttacagatgattacgcattttgaattctaatgaactgttttaaccttcaggaagaattgtaaagacctgtacatagcacaacatgatccggataatatatatactgttcatgtacatccacaaatacaccttgtaccaaataatgctttcttgtagtagaataagaatcgtgtaaattctaagagattttagcaggttttctttcctattcattgtttcttatcagtttaaaaggattcctttaagcatgtcagatgaaaagcaattaggattaaaagtttccatttaatttcccttaaacccttgaggcttcattaaactcttttcacttactaaacttttgtatcttctttgttttgacacactcccctttgcttttatctcttacctgccagaatgttctcaaatgatttagttcaaatactgaaatacttaatgagcaattacttgatttttaatgatgacttcgaaggagtcatcactaggtgctttgtcctttttgtattctagttgcacccacctcttggattggatatagcaataacatttattggccgttgtgagctcttgatcccagtcattacccctgagaactaaaaatagatggttcttaattcaacttactgaaaatttccccaaacaatagcaaatctgacttttccctcttcagttgcctggtattaaggttggataaatgaagcatgcacagctacaggctttctacttaacttctgggtttgctattacaaatcctatttactctcatacccttctccttagtccttcatatttctctgcctctattcttctatactgcagatttttctcacctattgtacaaagaaattgcgatgtatattttcatgtaatttgattttggaattctgtcaccttatgtagtgagttcttccaaaatataattttttttcaataattgtcaagttgttggcttttattgtattgaatgaaggctataatactgagtgccagagaagtggtttaggaaaatctcaggttgattccttatgcaaatgaacttttaatacttgaaaatcacatggccatggcagtatatgtatttggttctatctagattcttctgtgaatctaaaagcattacaggggtaaatgctttgctatttgacgtatagatcccgtcactaacaatagtacacttggatgtgattaatgtttgagcttcaatatatttcatatcatacagttttctaaaacaacttcagcaaatggtaaaatgaacatgtgcagtgttaaaggcaggccttaggctccttcatgtttgttgtgaggttgtgtgtgggaagtagtctttggcttataagggatagaacttgagacagtagcagatgggacatggtgtttgattgtgagaatcagtgagaattcgtgcatctctgctctgtggggtttggagaaatgctttggcagaagagtgaaagaactcctgccaagagcccagacctctacaaacgttgtatgtccttttttaagcagaaataaaatggttgaggacgaaaaaaaaaaaaaaaaaaaaaaaaaaaaaa

SEQ ID NO: 1311 - protein, 170 aa, Homo sapiens; identical to SEQ ID NO: 1309

SEQ ID NO: 1312 - DNA, 931 bp, Rattus norvegicus; identical to SEQ ID NO: 1308
  misc_feature (1)..(931): n=a, c, g or t
  ref <308>: DATABASE ACCESSION NUMBER: EMBL / AF099093
  ref <309>: DATABASE ENTRY DATE: 2000-03-03

SEQ ID NO: 1313 - protein, 170 aa, Rattus norvegicus; identical to SEQ ID NO: 1309
  ref <308>: DATABASE ACCESSION NUMBER: SWISS-Prot / Q99462
  ref <309>: DATABASE ENTRY DATE: 2002-06-15

SEQ ID NO: 1314 - DNA, 2430 bp, Homo sapiens; identical to SEQ ID NO: 1310
  ref <308>: DATABASE ACCESSION NUMBER: Refseq / NM_003342
  ref <309>: DATABASE ENTRY DATE: 2002-11-05

SEQ ID NO: 1315 - protein, 170 aa, Homo sapiens; identical to SEQ ID NO: 1309

SEQ ID NO: 1316 - DNA, 931 bp, Rattus norvegicus; identical to SEQ ID NO: 1308
  misc_feature (1)..(931): n=a, c, g or t
  ref <308>: DATABASE ACCESSION NUMBER: EMBL / AF099093
  ref <309>: DATABASE ENTRY DATE: 2000-03-03

SEQ ID NO: 1317 - protein, 170 aa, Rattus norvegicus; identical to SEQ ID NO: 1309
  ref <308>: DATABASE ACCESSION NUMBER: SWISS-Prot / Q99462
  ref <309>: DATABASE ENTRY DATE: 2002-06-15

SEQ ID NO: 1318 - DNA, 2430 bp, Homo sapiens; identical to SEQ ID NO: 1310
  ref <308>: DATABASE ACCESSION NUMBER: Refseq / NM_003342
  ref <309>: DATABASE ENTRY DATE: 2002-11-05

SEQ ID NO: 1319 - protein, 170 aa, Homo sapiens; identical to SEQ ID NO: 1309

SEQ ID NO: 1320 - DNA, 931 bp, Rattus norvegicus; identical to SEQ ID NO: 1308
  misc_feature (1)..(931): n=a, c, g or t
  ref <308>: DATABASE ACCESSION NUMBER: EMBL / AF099093
  ref <309>: DATABASE ENTRY DATE: 2000-03-03

SEQ ID NO: 1321 - protein, 170 aa, Rattus norvegicus; identical to SEQ ID NO: 1309
  ref <308>: DATABASE ACCESSION NUMBER: SWISS-Prot / Q99462
  ref <309>: DATABASE ENTRY DATE: 2002-06-15

SEQ ID NO: 1322 - DNA, 2430 bp, Homo sapiens; identical to SEQ ID NO: 1310
  ref <308>: DATABASE ACCESSION NUMBER: Refseq / NM_003342
  ref <309>: DATABASE ENTRY DATE: 2002-11-05

SEQ ID NO: 1323 - protein, 170 aa, Homo sapiens; identical to SEQ ID NO: 1309

SEQ ID NO: 1324 - DNA, 7867 bp, Rattus norvegicus
  ref <308>: DATABASE ACCESSION NUMBER: EMBL / AF102552
  ref <309>: DATABASE ENTRY DATE: 1998-11-19
atggctcatgccgcttcccagttaaagaaaaacagggatttagaaatcaatgcggaagaagagaccgagaaaaaaaagaagcaccgtaaacggtcccgggatcgcaagaaaaagtcggatgccaatgcaagttacttgagagcagctcgggcggggcacctggaaaaggcccttgactacatcaaaaatggagtggacgtcaacatctgtaaccagaatgggttgaatgcgctccatcttgcttccaaagaaggccatgtggaagtggtctccgagctgctgcagagagaagccaacgtcgatgcagccacaaagaaaggaaacacagccttacacatcgcatccttggctggacaagcggaagtggtcaaggtcttggttacgaacggagcgaacgtcaacgcacagtctcagaatggcttcacgccgctgtatatggcggcccaggagaaccacctggaagtcgtcaggtttcttctggacaatggtgccagccaaagcctggctacagaggatggcttcacgccattggccgtggctcttcaacaaggtcacgaccaagtcgtatccctcctgctcgagaacgacacgaagggaaaagtgcgcctcccagccctccacatcgcggcccggaaagatgacaccaaagcggcagctctgctcctacagaacgacaccaatgcagacatagagtcaaagatggtggtgaatagagcaactgagagtggcttcacctcactccacatagctgcccactacgggaatatcaatgtggccacgttgctgttaaaccgagcggctgccgtggacttcaccgcacggaatgacatcactcctttgcatgttgcctcgaaacggggaaacgcaaatatggtaaagctgttgctcgaccggggtgcgaagatcgacgccaagaccagggacggtctgaccccgctgcactgcggggcgagaagtggccacgagcaggtggtagagatgttgctggacagagccgcccccatcctttcgaaaaccaagaatggactgtccccactgcacatggccacacaaggagaccatttaaactgcgtccaactcctcctccagcacaacgtgcccgtggatgacgtcaccaacgactacctgaccgccctccacgtggcggcccactgcggccattacaaagttgccaaggttcttttggataagaaagctaaccccaatgccaaagccctgaatggcttcacccctctccatatcgcctgcaaaaagaaccgaatccgagtaatggaactccttttgaagcacggtgcatctattcaagccgtaaccgagtcgggccttaccccaatccatgtcgctgccttcatgggacatgtaaatatcgtgtcacagctaatgcatcatggagcctccccaaacaccaccaacgtgagaggagaaacagcattgcatatggcggctcggtcggggcaagcagaagtggtgcggtatttggtacaagatggagctcaggtagaagcaaaagctaaggatgaccagaccccactccacatttcagcccgactcgggaaggctgacatagtgcaacaactgttacagcaaggagcgtccccgaatgcagcaacaacttccgggtacaccccccttcacctttcggccagagaggggcatgaggatgtagctgccttccttctggaccatggagcatctttatccataacaacaaagaagggattcacgcctctgcatgtggctgcaaagtatgggaagcttgaagtggcaagtctcctgctgcagaagagtgcgtctcctgatgccgctgggaagagcgggctaactccactgcatgtagcagcacattacgataatcagaaagtggcccttctgcttttggaccagggagcctcaccccacgcagctgcaaagaacggttatacgccactgcacatcgccgccaagaagaaccagatggacatagccacgtccctgctggagtacggtgctgatgcaaacccggttacccggcaagggattgcgtccgtccaccttgcagcgcaggaagggcacgtggacatggtgtcgctgctcctcagtagaaatgcgaacgtcaacttgagcaataagagcggcctcaccccactccacctggcggctcaagaagaccgagtgaacgtggctgaggtccttgtcaaccaaggggcccacgtggatgcacagacaaagatgggctacacgccgctccatgtgggctgtcactatggaaacatcaaaatagtcaattttctgctgcagcattctgcgaaagttaatgccaagacaaagaatggatacacgccactgcaccaggcagcccagcagggccacacacacatcatcaacgtcctgctccagaacaacgcttcccccaatgaactcactgtgaatgggaacacagccctggccatcgcccgacgccttggctacatctcggtggttgacaccctaaaggtcgtgacagaggaaattatgaccaccactaccatcacggagaagcacaaaatgaatgtcccagaaacaatgaatgaagtcctcgacatgtcagacgatgaagttggtaaagccagcgcccccgaaaagctcagtgatggggaatatatctcagatggtgaagaaggtgaagatgccatcacaggggacactgacaagtatctcgggccacaggacctcaaggagctgggcgatgactccctgcctgccgagggctatgtgggcttcagtctcggagcccgttctgccagccttcgctccttcagttcggataggtcctacaccctgaacagaagctcctatgcgcgggacagcatgatgatcgaggagcttctggtgccatccaaagagcagcaccttccattcacgagggagtttgactccgactccctcagacactacagttgggcagcagacacactggacaatgtgaacctggtctccagccctgtgcattctgggtttctggttagctttatggtggacgcgagagggggctccatgcgaggaagccgccaccacgggatgcggatcatcatccctccgcgcaagtgtacggcccccacccgcatcacttgccgcctggtaaagagacataaactggccaacccaccccccatggtggaaggagagggattagccagtaggctggtagaaatgggtcctgcgggggcacaatttttaggcccggtcatagtggaaatccctcattttgggtccatgagaggaaaggagagggaactcattgtcctccggagcgagaacggagagacctggaaggaacaccagtttgacagcaaaaacgaagacctctcggagctcctcaatggcatggacgaagaacttgacagcccagaagagttgggcacaaagcgcatctgcagaatcatcacgaaggatttcccccagtatttcgctgtggtttcccggattaagcaggaaagcaaccagattggtcccgaaggtgggattctgagcagcaccacggtccccctcgtccaggcgtctttcccagagggtgccttaaccaaaaggatccgtgtgggtctgcaggctcagcccgtaccagaggagactgtgaaaaagatccttggaaacaaagcaacgtttagcccaattgtcacggtggagccgaggaggaggaaattccataagccgatcaccatgaccatcccggtgcccccaccctcgggagaaggcgtgtccaatgggtacaagggggacaccacgcccagcctgcgactcctctgcagcattacaggagggacctcgccggctcagtgggaagacatcacaggcacaaccccgctgaccttcataaaggactgtgtgtctttcacaaccaatgtttcagccaggttctggctggcggactgccatcaggtgttagaaaccgtagggctagcctcgcagctgtacagagagttgatatgtgtcccctacatggccaagtttgttgtttttgccaaaacaaacgacccagtggaatcctccctaaggtgcttctgtatgacagacgacagagtggacaaaaccctggagcagcaggagaatttcgaggaggttgccagaagcaaagacatcgaggttctggaaggaaagcccatctatgttgattgctatggaaacctggctcctctgaccaaaggagggcagcagcttgtttttaacttctattctttcaaagaaaacagactgccattttccatcaaggttagagacaccagccaagagccctgcggccgtctgtctttcctgaaggagccgaaaacaacaaaaggattaccccaaacggctgtttgcaacttaaatattactctaccggcgcataaaaaggctgagaaggcagacagacgccagagcttcacatccctagccttacgtaagcgctacagctacttgactgagcccagcatgaaaacagttgaacggagttcaggaacagcaagatcccttcccactacttattcacacaagccattcttttctacaagaccataccagtcctggactacgactcccataacagtgcccgggccggccaaatcaggctccttatccagctccccctctaacacgccgtcagcgtctccgttaaaatccatatggtctgtttcaacgccttctccgatcaaatccacgctaggcgcctcaactacgtcatcagtcaaatccattagtgatgtggcgtctcctattagatctttccggacaatttcttcgccaataagaacggtggcatcgccgtctccatacaatacccaagtagcctctggtacccttgggagggtacccaccatcacagaggccacacctataaagggggtggctcccaactcaactttgtcctctcgaacttctcctgtgacgaccgcagggtctctgttggagaagtcgtccatcaccatgacaccccctgcctcccccaaagccaacatcaccatgtattcctccagcttgccatttaagtccattatcacgtcagcggcaccgctgatctcctcccctttaaagtcagtggtgtctccgaccaagtctgcagctgatgtcatctcaacagctaaagctgcgatggcatcgactctctcctcccccttaaagcagatgtctggacatgcagaagtagcgctagtcaatgggtctgtttctcctctgaagtatccttcctcttccgctttaattaacggatgcaaagccactgccacattacaggacaaaatttctacagccacaaatgctgtgagctcggtggtgagcgcggcccctgacacggtggagaaagcgctctccaccacaacagccatgcccttttccccactcaggtcttacgtttccgctgcagcgccctctgcttttcagtcccttagagctccctctgccagtgcactctacaactccctcgggccttcagtaggtgttactacctcatccgtaacttcatcgataatcacagtgccagtatactcggtaggcaatgttttggcagaaccagcattgaagaaacttccagactctaactcgctcacaaaatcggcagcggctttgctgtcgcccattaaaacattgactacggagacacgtcctcagccccatttcaatcgaacgtcatctcccgtcaagtcctctctgttcctggcatcctcggcccttaagccgtcagtaccatcttctttatcttccagtcaggagatcttaaaagatgtggccgagatgaaggaggacctcatgagaatgaccgccatactgcagacggatgtgcctgaggagaagccattccagaccgacctcccccgagaagggaggatagacgacgaagagcctttcaaaatcgttgagaaagtgaaggaagacttagtcaaagtcagtgagatactcaaaaaggacgtgtgtgtcgagagcaaagggccacccaagtccccaaagagtgacaaaggacactctccagaagatgactggacggaatttagttctgaggaaatacgagaagccaggcaggctgctgccagtcacgccccatccctgcccgagagagtacatggaaaggccaacctcaccagagtcatagactacctgaccaatgacatcgggagcagttcactgaccaacttaaagtacaagtttgaagaggctaagaaggaaggagaggagagacagaagagaattttaaagccagccatggccttgcaggagcataaactcaaaatgccgccagcctccatgagaccttccacctccgagaaggaactgtgcaagatggcggactccttttttggaacagatgccatcctagagtctcccgatgacttttctcaacatgaccaagacaaaagtcccttgtccgacagtggctttgaaacccgaagtgagaaaacaccttcagccccccaaagtgccgagagcaccggccctaagccactatttcatgaagtccccatcccccctgtcatcacagagacgagaactgaagtagtccacgtgatcaggagctacgagccctctactggggagatcccccagtcccagccagaggaccccgtgtctcccaaacctccccctacatttatggagttggaaccaaagcccaccgcccttagcattaaggaaaaagtgaaagcattccaaatgaaagccagtagcgaggaagaggaccacagtcgggttttaagcaaaggcatgcgtgtcaaagaagagactcacatcaccacaaccacgaggatggtgtatcactccccgcctggcagtgagtgtgcctccgagaggattgaggagaccatgtcagtccatgacattatgaaggcttttcagtccgggcgagacccttccaaagagctggcggggctgtttgaacacaagtcggccatgtctccggatgttgccaagtctgctgctgagacctcggcccagcacgcagagaaggacaaccaaatgaaacccaaactggagcgtattatagaggtccacatcgaaaaaggtccacagagtccttgtgagcggacggatatcaggatggcaatagtagccgatcacctgggacttagttggacagagctggcaagggaactgaatttttcagtggatgaaatcaaccaaatacgagtggaaaatcccaattctttaatttctcagagcttcatgttattaaaaaagtgggtgacgagagacgggaagaatgccacaactgatgccttaacttcggtcttaacaaaaattaaccgaatagacatagtaactctgctggaaggaccaatatttgattatgggaatatttcaggcaccagaagctttgcagatgaaaacaatgttttccatgacccagttgatggttggcagaacgagacgccaagtggaagcctagagtccccggcgcaagcgcgaagaataaccggtgggttactggaccgtctggacgacagctctgaccaggttcgggatcccattacctcatacctcacaggagaagctgggaagttcgaagcaaacggaaaccacgcagaagtcattccagaagcaaaggccaaggcctactttcctgaatcccaaaacgatatagggaaacagagcatcaaggagaacttgaaaccaaaaacacacggatgtggtcgcgctgaggaaccagtgtcgcccctcacagcctaccagaaatctctagaagaaaccagcaagcttgtcatagaagacgcacctaaaccctgtgtgcctgtcggcatgaaaaagatgaccaggactccggctgacggcaaagccaggctcaacctccaggaagaggaggggtccgccaggtcagagcctaagcagggagaaggctataaggtgaaaacaaagaaggaaatccggaatgtggagaagaaagcccact

SEQ ID NO: 1325 - protein, 2622 aa, Rattus norvegicus
  ref <308>: DATABASE ACCESSION NUMBER: SWISS-Prot / AAC78143
  ref <309>: DATABASE ENTRY DATE: 2003-02-01
MAHAASQLKKNRDLEINAEEETEKKKKHRKRSRDRKKKSDANASYLRAARAGHLEKALDYIKNGVDVNICNQNGLNALHLASKEGHVEVVSELLQREANVDAATKKGNTALHIASLAGQAEVVKVLVTNGANVNAQSQNGFTPLYMAAQENHLEVVRFLLDNGASQSLATEDGFTPLAVALQQGHDQVVSLLLENDTKGKVRLPALHIAARKDDTKAAALLLQNDTNADIESKMVVNRATESGFTSLHIAAHYGNINVATLLLNRAAAVDFTARNDITPLHVASKRGNANMVKLLLDRGAKIDAKTRDGLTPLHCGARSGHEQVVEMLLDRAAPILSKTKNGLSPLHMATQGDHLNCVQLLLQHNVPVDDVTNDYLTALHVAAHCGHYKVAKVLLDKKANPNAKALNGFTPLHIACKKNRIRVMELLLKHGASIQAVTESGLTPIHVAAFMGHVNIVSQLMHHGASPNTTNVRGETALHMAARSGQAEVVRYLVQDGAQVEAKAKDDQTPLHISARLGKADIVQQLLQQGASPNAATTSGYTPLHLSAREGHEDVAAFLLDHGASLSITTKKGFTPLHVAAKYGKLEVASLLLQKSASPDAAGKSGLTPLHVAAHYDNQKVALLLLDQGASPHAAAKNGYTPLHIAAKKNQMDIATSLLEYGADANPVTRQGIASVHLAAQEGHVDMVSLLLSRNANVNLSNKSGLTPLHLAAQEDRVNVAEVLVNQGAHVDAQTKMGYTPLHVGCHYGNIKIVNFLLQHSAKVNAKTKNGYTPLHQAAQQGHTHIINVLLQNNASPNELTVNGNTALAIARRLGYISVVDTLKVVTEEIMTTTTITEKHKMNVPETMNEVLDMSDDEVGKASAPEKLSDGEYISDGEEGEDAITGDTDKYLGPQDLKELGDDSLPAEGYVGFSLGARSASLRSFSSDRSYTLNRSSYARDSMMIEELLVPSKEQHLPFTREFDSDSLRHYSWAADTLDNVNLVSSPVHSGFLVSFMVDARGGSMRGSRHHGMRIIIPPRKCTAPTRITCRLVKRHKLANPPPMVEGEGLASRLVEMGPAGAQFLGPVIVEIPHFGSMRGKERELIVLRSENGETWKEHQFDSKNEDLSELLNGMDEELDSPEELGTKRICRIITKDFPQYFAVVSRIKQESNQIGPEGGILSSTTVPLVQASFPEGALTKRIRVGLQAQPVPEETVKKILGNKATFSPIVTVEPRRRKFHKPITMTIPVPPPSGEGVSNGYKGDTTPSLRLLCSITGGTSPAQWEDITGTTPLTFIKDCVSFTTNVSARFWLADCHQVLETVGLASQLYRELICVPYMAKFVVFAKTNDPVESSLRCFCMTDDRVDKTLEQQENFEEVARSKDIEVLEGKPIYVDCYGNLAPLTKGGQQLVFNFYSFKENRLPFSIKVRDTSQEPCGRLSFLKEPKTTKGLPQTAVCNLNITLPAHKKAEKADRRQSFTSLALRKRYSYLTEPSMKTVERSSGTARSLPTTYSHKPFFSTRPYQSWTTTPITVPGPAKSGSLSSSPSNTPSASPLKSIWSVSTPSPIKSTLGASTTSSVKSISDVASPIRSFRTISSPIRTVASPSPYNTQVASGTLGRVPTITEATPIKGVAPNSTLSSRTSPVTTAGSLLEKSSITMTPPASPKANITMYSSSLPFKSIITSAAPLISSPLKSVVSPTKSAADVISTAKAAMASTLSSPLKQMSGHAEVALVNGSVSPLKYPSSSALINGCKATATLQDKISTATNAVSSVVSAAPDTVEKALSTTTAMPFSPLRSYVSAAAPSAFQSLRAPSASALYNSLGPSVGVTTSSVTSSIITVPVYSVGNVLAEPALKKLPDSNSLTKSAAALLSPIKTLTTETRPQPHFNRTSSPVKSSLFLASSALKPSVPSSLSSSQEILKDVAEMKEDLMRMTAILQTDVPEEKPFQTDLPREGRIDDEEPFKIVEKVKEDLVKVSEILKKDVCVESKGPPKSPKSDKGHSPEDDWTEFSSEEIREARQAAASHAPSLPERVHGKANLTRVIDYLTNDIGSSSLTNLKYKFEEAKKEGEERQKRILKPAMALQEHKLKMPPASMRPSTSEKELCKMADSFFGTDAILESPDDFSQHDQDKSPLSDSGFETRSEKTPSAPQSAESTGPKPLFHEVPIPPVITETRTEVVHVIRSYEPSTGEIPQSQPEDPVSPKPPPTFMELEPKPTALSIKEKVKAFQMKASSEEEDHSRVLSKGMRVKEETHITTTTRMVYHSPPGSECASERIEETMSVHDIMKAFQSGRDPSKELAGLFEHKSAMSPDVAKSAAETSAQHAEKDNQMKPKLERIIEVHIEKGPQSPCERTDIRMAIVADHLGLSWTELARELNFSVDEINQIRVENPNSLISQSFMLLKKWVTRDGKNATTDALTSVLTKINRIDIVTLLEGPIFDYGNISGTRSFADENNVFHDPVDGWQNETPSGSLESPAQARRITGGLLDRLDDSSDQVRDPITSYLTGEAGKFEANGNHAEVIPEAKAKAYFPESQNDIGKQSIKENLKPKTHGCGRAEEPVSPLTAYQKSLEETSKLVIEDAPKPCVPVGMKKMTRTPADGKARLNLQEEEGSARSEPKQGEGYKVKTKKEIRNVEKKAH

SEQ ID NO: 1326 - DNA, 753 bp, Homo sapiens
  ref <308>: DATABASE ACCESSION NUMBER: Refseq / NM_021130
  ref <309>: DATABASE ENTRY DATE: 2000-11-02
gttttgcagacgccaccgccgaggaaaaccgtgtactattagccatggtcaaccccaccgtgttcttcgacattgccgtcgacggcgagcccttgggccgcgtctcctttgagctgtttgcagacaaggtcccaaagacagcagaaaattttcgtgctctgagcactggagagaaaggatttggttataagggttcctgctttcacagaattattccagggtttatgtgtcagggtggtgacttcacacgccataatggcactggtggcaagtccatctatggggagaaatttgaagatgagaacttcatcctaaagcatacgggtcctggcatcttgtccatggcaaatgctggacccaacacaaatggttcccagtttttcatctgcactgccaagactgagtggttggatggcaagcatgtggtgtttggcaaagtgaaagaaggcatgaatattgtggaggccatggagcgctttgggtccaggaatggcaagaccagcaagaagatcaccattgctgactgtggacaactcgaataagtttgacttgtgttttatcttaaccaccagatcattccttctgtagctcaggagagcacccctccaccccatttgctcgcagtatcctagaatctttgtgctctcgctgcagttccctttgggttccatgttttccttgttccctcccatgcctagctggattgcagagttaagtttatgattatgaaataaaaactaaataacaattgtc

SEQ ID NO: 1327 - protein, 164 aa, Homo sapiens
  ref <308>: DATABASE ACCESSION NUMBER: SWISS-Prot / P05092
  ref <309>: DATABASE ENTRY DATE: 2002-06-15
VNPTVFFDIAVDGEPLGRVSFELFADKVPKTAENFRALSTGEKGFGYKGSCFHRIIPGFMCQGGDFTRHNGTGGKSIYGEKFEDENFILKHTGPGILSMANAGPNTNGSQFFICTAKTEWLDGKHVVFGKVKEGMNIVEAMERFGSRNGKTSKKITIADCGQLE

SEQ ID NO: 1328 - DNA, 1215 bp, Rattus norvegicus
  ref <308>: DATABASE ACCESSION NUMBER: EMBL / AF106563
  ref <309>: DATABASE ENTRY DATE: 1998-12-11
gatatagtgattacaggccctatgaggatagtaaagtaaataatgattagggtgattgggtttgggctccttgctggctccttgctttgtgcatacttcgtcagcgagcgacggctacaggttggggactttgtgcttttggcacttatatcacccaactgtacatgcctctcaactggttcggcacctactacagaatgatccagactaacttcattgacatggagaacatgtttgacttgttgaaagaggaaacagaggtgaaggacgtccctggagcagggccccttcgttttcataagggccgggttgagtttgaaaatgtgcacttcagctacgctgatgggcgggagaccttacaagatgtgtccttcactgtgatgcctggacagacggtggctctggtaggcccatctggggcaggaaagagcacaattttacgcctgctgtttcgcttctatgacatcagctctggctgcatccgaatagatggacaggacatttcacaggtaacccagatctctctccggtctcacattggagttgtgcccaggacactgtctcttcaacgacaccattgccaacaatatccgctatggccgtgttacagctgggacagtgagatacaggctgctgctcaggctgcgggcatccatgatgccatcctgtctttccctgaagggtatgagacacaggttggggagcggggtctgaagctgagtggtggcgagaagcagcgagtggccattgcccgcaccatccttaaggctcctgacatcactctgctggatgaggcaacatcagcactggatacatctaatgagagagccatccaggcctctctggccaaagtctgcaccacccgcaaccaccatcgtagtagcacacaggctctcaactgtgtcaatgctgaccagattcttgtcatcaaggatggctgcatcatagagagaggaaggctcgaagccctgctatcccgaggtggcgtgtatgctgagatgtggcagctgcagcaccaaggacaagaaactgtccctgaagactcttaacctcaggacatggcgtagtaatgaaagggatgacctctttcctctctaaaggctaactcaggagtgaaagatgtcccctctccttggcttcagttcattctggtataggagtttggtgctagctattgtaatgggactgtgcagaaagcaccaaaggaaataaacg

SEQ ID NO: 1329 - protein, 294 aa, Rattus norvegicus
  ref <308>: DATABASE ACCESSION NUMBER: SWISS-Prot / AAC83936
  ref <309>: DATABASE ENTRY DATE: 2003-02-01
MPLNWFGTYYRMIQTNFIDMENMFDLLKEETEVKDVPGAGPLRFHKGRVEFENVHFSYADGRETLQDVSFTVMPGQTVALVGPSGAGKSTILRLLFRFYDISSGCIRIDGQDISQVTQISLRSHIGVVPRTLSLQRHHCQQYPLWPCYSWDSEIQAAAQAAGIHDAILSFPEGYETQVGERGLKLSGGEKQRVAIARTILKAPDITLLDEATSALDTSNERAIQASLAKVCTTRNHHRSSTQALNCVNADQILVIKDGCIIERGRLEALLSRGGVYAEMWQLQHQGQETVPEDS

SEQ ID NO: 1330 - DNA, 1725 bp, Homo sapiens
  ref <308>: DATABASE ACCESSION NUMBER: EMBL / AF070598
  ref <309>: DATABASE ENTRY DATE: 1999-06-30
ccttcctgtggatccgggtgcagcagttcacgtctcggcgggtggagctgctcatcttctcccacctgcacgagctctcactgcgctggcacctggggcgccgcacaggggaggtgctgcggatcgcggatcggggcacatccagtgtcacagggctgctcagctacctggtgttcaatgtcatccccacgctggccgacatcatcattggcatcatctacttcagcatgttcttcaacgcctggtttggcctcattgtgttcctgtgcatgagtctttacctcaccctgaccattgtggtcactgagtggagaaccaagtttcgtcgtgctatgaacacacaggagaacgctacccgggcacgagcagtggactctctgctaaacttcgagacggtgaagtattacaacgccgagagttacgaagtggaacgctatcgagaggccatcatcaaatatcagggtttggagtggaagtcgagcgcttcactggttttactaaatcagacccagaacctggtgattgggctcgggctcctcgccggctccctgctttgcgcatactttgtcactgagcagaagctacaggttggggactatgtgctctttggcacctacattatccagctgtacatgcccctcaattggtttggcacctactacaggatgatccagaccaacttcattgacatggagaacatgtttgacttgctgaaagaggagacagaagtgaaggaccttcctggagcagggccccttcgctttcagaagggccgtattgagtttgagaacgtgcacttcagctatgccgatgggcgggagactctgcaggacgtgtctttcactgtgatgcctggacagacacttgccctggtgggcccatctggggcagggaagagcacaattttgcgcctgctgtttcgcttctacgacatcagctctggctgcatccgaatagatgggcaggacatttcacaggtgacccaggcctctctccggtctcacattggagttgtgccccaagacactgtcctctttaatgacaccatcgccgacaatatccgttacggccgtgtcacagctgggaatgatgaggtggaggctgctgctcaggctgcaggcatccatgatgccattatggctttccctgaagggtacaggacacaggtgggcgagcggggactgaagctgagcggcggggagaagcagcgcgtcgccattgcccgcaccatcctcaaggctccgggcatcattctgctggatgaggcaacgtcagcgctggatacatctaatgagagggccatccaggcttctctggccaaagtctgtgccaaccgcaccaccatcgtagtggcacacaggctctcaactgtggtcaatgctgaccagatcctcgtcatcaaggatggctgcatcgtggagaggggacgacacgaggctctgttgtcccgaggtggggtgtatgctgacatgtggcagctgcagcagggacaggaagaaacctctgaagacactaagcctcagaccatggaacggtgacaaaagtttggccacttccctctcaaagactaacccagaagggaataagatgtgtctcctttccctggcttatttcatcctggtcttggggtatggtgctagctatggtaagggaaagggacctttccgaaaaacatcttttggggaaataaaaatgtggactgtgaaaaaaaaaaaaaaaaaaaaa

SEQ ID NO: 1331 - protein, 842 aa, Homo sapiens
  ref <308>: DATABASE ACCESSION NUMBER: SWISS-Prot / Q9NP58
  ref <309>: DATABASE ENTRY DATE: 2002-06-15
MVTVGNYCEAEGPVGPAWMQDGLSPCFFFTLVPSTRMALGTLALVLALPCRRRERPAGADSLSWGAGPRISPYVLQLLLATLQAALPLAGLAGRVGTARGAPLPSYLLLASVLESLAGACGLWLLVVERSQARQRLAMGIWIKFRHSPGLLLLWTVAFAAENLALVSWNSPQWWWARADLGQQVQFSLWVLRYVVSGGLFVLGLWAPGLRPQSYTLQVHEEDQDVERSQVRSAAQQSTWRDFGRKLRLLSGYLWPRGSPALQLVVLICLGLMGLERALNVLVPIFYRNIVNLLTEKAPWNSLAWTVTSYVFLKFLQGGGTGSTGFVSNLRTFLWIRVQQFTSRRVELLIFSHLHELSLRWHLGRRTGEVLRIADRGTSSVTGLLSYLVFNVIPTLADIIIGIIYFSMFFNAWFGLIVFLCMSLYLTLTIVVTEWRTKFRRAMNTQENATRARAVDSLLNFETVKYYNAESYEVERYREAIIKYQGLEWKSSASLVLLNQTQNLVIGLGLLAGSLLCAYFVTEQKLQVGDYVLFGTYIIQLYMPLNWFGTYYRMIQTNFIDMENMFDLLKEETEVKDLPGAGPLRFQKGRIEFENVHFSYADGRETLQDVSFTVMPGQTLALVGPSGAGKSTILRLLFRFYDISSGCIRIDGQDISQVTQASLRSHIGVVPQDTVLFNDTIADNIRYGRVTAGNDEVEAAAQAAGIHDAIMAFPEGYRTQVGERGLKLSGGEKQRVAIARTILKAPGIILLDEATSALDTSNERAIQASLAKVCANRTTIVVAHRLSTVVNADQILVIKDGCIVERGRHEALLSRGGVYADMWQLQQGQEETSEDTKPQTMER

SEQ ID NO: 1332 - DNA, 3288 bp, Rattus norvegicus
  ref <308>: DATABASE ACCESSION NUMBER: EMBL / AF109405
  ref <309>: DATABASE ENTRY DATE: 2000-03-03
ccggggcccgtgccggcgccattgcgcgggagccgcgggcaaagctcggcgccgggcggcgggccgggccaggccatgcgggccgagtgagctggcgcccgcagcccgcggcgcggcatggcttccccgccgagctccgggcagccccggccgccgccgccgccgccgccgcccgcgcgcctgctgctgcccctgctgctgtcgctgctgctgtggttggcgcccggggcctggggctggacgcggggcgccccccggccgccgcccagcagcccgccgctctccatcatgggcctcatgccgctcaccaaggaggtggccaagggcagcatcgggcgcggcgtgctccccgccgtggagctagccatcgagcagatccgcaacgagtcactcctgcgcccctacttcctggacctgcgactctatgacaccgagtgtgacaatgcaaagggactgaaagccttctatgacgcaataaagtatgggccgaaccatttgatggtgtttggaggcgtctgtccgtctgtcacatctattatcgcggagtccctccaaggctggaatctggtgcagctttccttcgccgccaccacgcctgttcttgcggataagaagaagtacccgtatttcttccggacggtgccgtcagacaacgcggtgaaccccgccatcctgaagctcctgaagcacttccgctggcggcgtgtgggcacactcacgcaggacgtgcagcgcttctccgaggtgaggaatgacctgactggggttctgtatggggaagatattgagatctcagacacagagagcttctccaatgatccctgcaccagcgtcaaaaagctcaaggggaatgacgtgcggatcatccttggccagtttgaccagaatatggcagcaaaagtcttctgttgtgccttcgaggagagcatgtttggcagcaagtaccagtggatcatcccgggatggtacgagcctgcgtggtgggagcaggtgcatgtggaggccaattcctcacgctgcctgcgcagaagcctcctggctgccatggaaggttacatcggagtggactttgagcccctgagctccaaacaaatcaagaccatttcagggaagactccacagcagtatgaaagagagtacaacagcaaacgttcaggcgtggggcccagcaagttccatgggtacgcctacgatgggatctgggtcatcgccaagaccctacagagggccatggagacactgcatgccagtagcaggcaccagcggatccaggacttcaactacacagaccacacgctgggcaaaatcatcctcaatgccatgaacgagaccaacttcttcggggtcacgggtcaagttgtgttccggaacggggagagaatgggaaccattaaatttactcaatttcaagacagcagagaggtgaaggtcggcgaatacaacgcggtggctgacacactggagatcatcaatgacaccataaggttccaggggtccgagccacccaaggacaagaccatcattctggagcagcttcggaagatctcgcttccactgtatagcatcctgtccgctctcaccatcctcggcatgatcatggccagcgccttcctcttcttcaacatcaagaaccggaaccaaaagctgattaagatgtcaagcccctacatgaacaacctcatcatcctgggaggaatgctgtcctatgcatccatcttcctctttggcctcgatgggtccttcgtctcagaaaagacctttgaaacactctgcacggtccggacctggattctcaccgtgggctacacaactgcctttggggccatgtttgcaaagacctggagggtccatgccatcttcaaaaatgtgaagatgaagaagaagatcatcaaagaccagaagctgcttgtgattgtggggggcatgctgctcatcgacctgtgcatcctgatctgttggcaggctgtggaccccctgcggaggacagtggagaggtacagcatggagccggacccagcaggccgggacatctccatccgcccattgctggaacactgcgaaaacacccacatgaccatctggcttggcattgtctacgcctacaaggggctcctcatgctattcggttgtttcttggcatgggaaacccgcaatgtgagcatccctgccctcaacgacagcaagtacatcggcatgagtgtgtacaatgtggggatcatgtgcatcatcggggctgctgtctccttcctgacgcgtgaccagcccaacgtgcagttctgcatcgtggccctggtcatcatcttctgcagcaccatcactctctgcctggtgtttgtgccaaagctcatcactctgaggacaaaccctgacgcagccactcagaacaggcggttccagttcacacagaaccagaagaaagaagattcgaagacctccacttcagtcaccagcgtgaaccaggcgagcacgtcacgcctggagggactgcagtcagaaaaccaccgccttcgaatgaagatcacagagctggacaaagacttggaagaagtcaccatgcagctacaagacacaccagagaagaccacatacatcaaacagaatcactaccaagagctcaacgacatcctcagcttgggcaacttcacagagagcacagatggaggaaaggccattctaaaaaatcacctcgatcaaaacccccagctccagtggaacacgacagagccctcaagaacatgcaaagaccccatagaagacatcaactccccggagcacatccagcgccggctgtcgctccagctccccatccttcaccacgcctacctcccatccatcggaggcgtggatgccagctgcgtcagcccctgtgtcagccctaccgccagccctcgccacagacacgtaccaccctccttccgagtcatggtctcgggcctgtaggggtgggaggcctggggccggggcctccccgggacagcaccatgctgggccaaggcgcctgccacaggcacactgacggcggcgagaagctgggcaccatgctgcctctccagactgctggaatggcgctcaggcagagcgggactcggcaccgacctcgagccttatctgtgaaggtcttactctcacagaggagaggaatgacaatgacttctccttcttggcgtctgcaaacaaagaggagttgggatgtctgaaacttgcaaaaacaaatcaaactctagacaaaggagagaggcctcggactcctgctgtcctcgccaagtggccagagcaagggctctgcag

SEQ ID NO: 1333 - protein, 940 aa, Rattus norvegicus
  ref <308>: DATABASE ACCESSION NUMBER: SWISS-Prot / O88871
  ref <309>: DATABASE ENTRY DATE: 2001-10-16
MASPPSSGQPRPPPPPPPPARLLLPLLLSLLLWLAPGAWGWTRGAPRPPPSSPPLSIMGLMPLTKEVAKGSIGRGVLPAVELAIEQIRNESLLRPYFLDLRLYDTECDNAKGLKAFYDAIKYGPNHLMVFGGVCPSVTSIIAESLQGWNLVQLSFAATTPVLADKKKYPYFFRTVPSDNAVNPAILKLLKHFRWRRVGTLTQDVQRFSEVRNDLTGVLYGEDIEISDTESFSNDPCTSVKKLKGNDVRIILGQFDQNMAAKVFCCAFEESMFGSKYQWIIPGWYEPAWWEQVHVEANSSRCLRRSLLAAMEGYIGVDFEPLSSKQIKTISGKTPQQFEREYNSKRSGVGPSKFHGYAYDGIWVIAKTLQRAMETLHASSRHQRIQDFNYTDHTLGKIILNAMNETNFFGVTGQVVFRNGERMGTIKFTQFQDSREVKVGEYNAVADTLEIINDTIRFQGSEPPKDKTIILEQLRKISLPLYSILSALTILGMIMASAFLFFNIKNRNQKLIKMSSPYMNNLIILGGMLSYASIFLFGLDGSFVSEKTFETLCTVRTWILTVGYTTAFGAMFAKTWRVHAIFKNVKMKKKIIKDQKLLVIVGGMLLIDLCILICWQAVDPLRRTVERYSMEPDPAGRDISIRPLLEHCENTHMTIWLGIVYAYKGLLMLFGCFLAWETRNVSIPALNDSKYIGMSVYNVGIMCIIGAAVSFLTRDQPNVQFCIVALVIIFCSTITLCLVFVPKLITLRTNPDAATQNRRFQFTQNQKKEDSKTSTSVTSVNQASTSRLEGLQSENHRLRMKITELDKDLEEVTMQLQDTPEKTTYIKQNHYQELNDILSLGNFTESTDGGKAILKNHLDQNPQLQWNTTEPSRTCKDPIEDINSPEHIQRRLSLQLPILHHAYLPSIGGVDASCVSPCVSPTASPRHRHVPPSFRVMVSGL

SEQ ID NO: 1334 - DNA, 465 bp, Homo sapiens
  ref <308>: DATABASE ACCESSION NUMBER: EMBL / AB015334
  ref <309>: DATABASE ENTRY DATE: 1998-12-14
gacgcgtgggccagcgtcggctgtccctccagctccccatcctccaccacgcctacctcccatccatcggaggcgtggacgccagctgtgtcagcccctgcgtcagccccaccgccagcccccgccacagacatgtgccaccctccttccgagtcatggtctcgggcctgtaagggtgggaggcctgggcccggggcctcccccgtgacagaaccacactgggcagaggggtctgctgcagaaacactgtcggctctggctgcggagaagctgggcaccatggctggcctctcaggaccactcggatggcactcaggtggacaggacggggcagggggagacttggcacctgacctcgagccttatttgtgaagtccttatttcttcacaaagaagaggaacggaaatgggacgtcttccttaacatctgcaaacaaggaggcgctgggatatcaaacttgcaat

SEQ ID NO: 1335 - protein, 941 aa, Homo sapiens
  ref <308>: DATABASE ACCESSION NUMBER: SWISS-Prot / O75899
  ref <309>: DATABASE ENTRY DATE: 2002-06-15
MASPRSSGQPGPPPPPPPPPARLLLLLLLPLLLPLAPGAWGWARGAPRPPPSSPPLSIMGLMPLTKEVAKGSIGRGVLPAVELAIEQIRNESLLRPYFLDLRLYDTECDNAKGLKAFYDAIKYGPNHLMVFGGVCPSVTSIIAESLQGWNLVQLSFAATTPVLADKKKYPYFFRTVPSDNAVNPAILKLLKHYQWKRVGTLTQDVQRFSEVRNDLTGVLYGEDIEISDTESFSNDPCTSVKKLKGNDVRIILGQFDQNMAAKVFCCAYEENMYGSKYQWIIPGWYEPSWWEQVHTEANSSRCLRKNLLAAMEGYIGVDFEPLSSKQIKTISGKTPQQYEREYNNKRSGVGPSKFHGYAYDGIWVIAKTLQRAMETLHASSRHQRIQDFNYTDHTLGRIILNAMNETNFFGVTGQVVFRNGERMGTIKFTQFQDSREVKVGEYNAVADTLEIINDTIRFQGSEPPKDKTIILEQLRKISLPLYSILSALTILGMIMASAFLFFNIKNRNQKLIKMSSPYMNNLIILGGMLSYASIFLFGLDGSFVSEKTFETLCTVRTWILTVGYTTAFGAMFAKTWRVHAIFKNVKMKKKIIKDQKLLVIVGGMLLIDLCILICWQAVDPLRRTVEKYSMEPDPAGRDISIRPLLEHCENTHMTIWLGIVYAYKGLLMLFGCFLAWETRNVSIPALNDSKYIGMSVYNVGIMCIIGAAVSFLTRDQPNVQFCIVALVIIFCSTITLCLVFVPKLITLRTNPDAATQNRRFQFTQNQKKEDSKTSTSVTSVNQASTSRLEGLQSENHRLRMKITELDKDLEEVTMQLQDTPEKTTYIKQNHYQELNDILNLGNFTESTDGGKAILKNHLDQNPQLQWNTTEPSRTCKDPIEDINSPEHIQRRLSLQLPILHHAYLPSIGGVDASCVSPCVSPTASPRHRHVPPSFRVMVSGL

SEQ ID NO: 1336 - DNA, 2597 bp, Rattus norvegicus
  ref <308>: DATABASE ACCESSION NUMBER: EMBL / AJ000556
  ref <309>: DATABASE ENTRY DATE: 1997-07-30
cattctccaaagaagcagaaaaatggctatgagaagaaaagggttccagaagcaaccccactccttgatgccagttcactggagtatctgtttgcgcagggacagtatgatttgatcaaatgcctggctcccattcgggaccccaagacagagcaagatggacatgatattgagaatgagtgcctgggcatggctgtcctggccatctcacactatgccatgatgaagaagatgcagttgccagagcttcccaaagacatcagctacaagcgatatattccagaaacattgaataaatccatcagacagaggaatcttcttaccaggatgcgaataaataatgttttcaaggatttcttgaaggaatttaacaacaagaccatctgtgacagcagtgtgtctacacacgacctgaaggtgaagtacctggctaccttggaaaccttaaccaagcattatggagccgagatatttgagacttctatgctcctgatttcatcagaaaatgagccgagtcggtgccattccaacgacagtggcaatgttctctatgaagtcatggtaacaggaaatctcgggatccagtggcggcagaaaccaaatgttcttcctgttgaaaaggaaaaaaataaactgaagcggaaaaaactggactatattaaacacaagaaggaggatgccagaaacaaactccgggaagagtggaacagtttttcctatttccccgagattacccacattgttatcaaggagtctgtggtcagcattaacaaacaggacaacaagaacatggaactaaagctctcttctcatgagggagccttgtccttcgtgtccctggtagatggctacttccggctcactgcagatgctcaccattacctctgtactgatgtggctcccccgctgattgtccacaacatacagaatggctgtcacggtccaatctgcacagatattgcattcaataagctgcggcaggaggggagtgaggaggggatgtacgtgctgaggtggagctgcaccgactttgacaacattcttattgctgtcagctgcttcgaaaagtccgaggtattgggtaatcagaagcagttcaagaactttcagattgaggtgcagaagggccgctacagcctgcatggctctgttgaccactttcccagcctgagagacctcatgaaccacctcaagaagcagatcctgcgcacggacaatataagctttgtgctgaaacgctgctgtcagtctaagcctcgagaaatctccaacctactagtagccactaagaaagcccaggagtggcagcctgtctactctatgagccagctgagtttcgatcggatccttaagaaagatattatccaaggtgagcaccttggcagaggcacaagaacacatatctattctgggaccctgctggattacaaggacgatgaaggaattgctgaagaaaagaagataaaagtgattctcaaagtcctagaccctagccaccgggacatttcactggccttctttgaggcagccagcatgatgagacaggtttcccacaaacacatcgtgtacctctacggcgtctgtgtccgagatgtagaaaatatcatggtggaagagtttgtggagggggggccattggatctcttcatgcaccggaaaagtgatgcacttactaccccttggaagtttaaagttgccaaacagctggccagcgccctgagttacttggaagataaagacctcgttcatggaaatgtgtgcactaaaaacctcctcctggcccgtgagggcattgacagtgacattggcccgttcatcaagcttagtgaccttggcatcccagtctctgtgctgaccaggcaagagtgcatagagcgaaatccctggatcgctcctgagtgtgttgaagactccaagaacctgagtgtggctgctgacaagtggagctttggaaccacactctgggaaatccgctacgatggcgagatcccactcaaggacaagaccctcattgagaaagagaggttttatgaaagccgctgcaggccagtgacaccatcttgcaaggagctagctgacctcatgactcgctgcatgaactatgatcccaaccagagacctttcttccgagccatcatgagggacattaacaagctggaggagcagaatccagacattgtttcagaaaagcacccaataacagaggtggatcccactcattttgaaaagcgtttcctaaagaggattcgtgacttgggagagggtcactttgggaaggttgagctctgcagatatgatcctgagggagacaacacaggggaacaggtagctgtcaagtccctgaagcctgagagtggaggtaaccacatagctgatctgaagaaggagatagagatcttacggaacctctaccacgagaacattgtgaagtataaaggaatctgcatggaagacggggggaatggtatcaagctcatcatggagtttctgccttcgggaagcctaaaggaatatctgccaaagaataagaacaaaatcaacctcaaacagcagctaaaatatgccatccagatttgtaaggggatggactatctggg

SEQ ID NO: 1337 - protein, 866 aa, Rattus norvegicus
  ref <308>: DATABASE ACCESSION NUMBER: SWISS-Prot / CAA04187
  ref <309>: DATABASE ENTRY DATE: 2003-02-01
HSPKKQKNGYEKKRVPEATPLLDASSLEYLFAQGQYDLIKCLAPIRDPKTEQDGHDIENECLGMAVLAISHYAMMKKMQLPELPKDISYKRYIPETLNKSIRQRNLLTRMRINNVFKDFLKEFNNKTICDSSVSTHDLKVKYLATLETLTKHYGAEIFETSMLLISSENEPSRCHSNDSGNVLYEVMVTGNLGIQWRQKPNVLPVEKEKNKLKRKKLDYIKHKKEDARNKLREEWNSFSYFPEITHIVIKESVVSINKQDNKNMELKLSSHEGALSFVSLVDGYFRLTADAHHYLCTDVAPPLIVHNIQNGCHGPICTDIAFNKLRQEGSEEGMYVLRWSCTDFDNILIAVSCFEKSEVLGNQKQFKNFQIEVQKGRYSLHGSVDHFPSLRDLMNHLKKQILRTDNISFVLKRCCQSKPREISNLLVATKKAQEWQPVYSMSQLSFDRILKKDIIQGEHLGRGTRTHIYSGTLLDYKDDEGIAEEKKIKVILKVLDPSHRDISLAFFEAASMMRQVSHKHIVYLYGVCVRDVENIMVEEFVEGGPLDLFMHRKSDALTTPWKFKVAKQLASALSYLEDKDLVHGNVCTKNLLLAREGIDSDIGPFIKLSDLGIPVSVLTRQECIERNPWIAPECVEDSKNLSVAADKWSFGTTLWEIRYDGEIPLKDKTLIEKERFYESRCRPVTPSCKELADLMTRCMNYDPNQRPFFRAIMRDINKLEEQNPDIVSEKHPITEVDPTHFEKRFLKRIRDLGEGHFGKVELCRYDPEGDNTGEQVAVKSLKPESGGNHIADLKKEIEILRNLYHENIVKYKGICMEDGGNGIKLIMEFLPSGSLKEYLPKNKNKINLKQQLKYAIQICKGMDYLG

SEQ ID NO: 1338 - DNA, 3030 bp, Rattus norvegicus
  ref <308>: DATABASE ACCESSION NUMBER: EMBL / AJ001029
  ref <309>: DATABASE ENTRY DATE: 1998-01-09
cggacactagactgtagaggtgagaccaaggataggagccctcgggcaacgggaggaagaacatagaatagccttgaagggcagaaaagggggagggggtcttttctcagtggggaagagtgactgagggacttcactacatccagggctgagaccctttcccaggagaggaagagctcagcatggaagtgagacccctccccccaacccaatgtcctcctcacccttcttgaagagtacccactcccctccccctccttccttccccagccgtctgcagcggctcagtcgctcagtcagtctcgggctgtccagccagggtgtttggtggtgaggattcaggctccgtccagacaaggcagtggcctgaggctcagggccccccagcccctccctcccagtccatcagcgtcactccccagccccgagctggaccgcacaccttgggacacggttttccacttcctcaggacgagccccagactggaggagaggtcggaggaggtgggcgttgggctcttcacgaggaccccggcggcgggcccgggggaggcggccgaagcggcggcggccgggagcgacatggccgaggagcaagacctatcagaggtggagctgagccccgtgggctcggaggaacctcgctgcctgtccccaagcagcgcgccgtcgctgggacccgacggcggcggcggtggctcaggcctgcgagccagcccagggcccggcgaattgggcaaggtcaagaaggaacagcaggacggcgaggcagacgatgacaagttcccggtgtgcatccgcgaggcggtcagccaggtgctcagcggctacgactggacgctggtgcccatgcccgtgcgggtcaacggtgccagcaagagcaagccgcacgtcaaacggcccatgaacgcctttatggtgtgggcacaggcggcacgcagaaagttagccgaccagtacccgcacctccacaatgctgagctcagcaagacgctgggcaagctctggaggttgctgaacgagagtgacaagcgccccttcattgaggaggccgagcggctccggatgcagcacaaaaaagaccatccggactacaagtaccaacctcggcggcggaagaatgggaaggcagcccagggggaggcagagtgcccaggcggggagaccgaccaaggaggggctgctgctatccaggctcactacaagagtgcccacctggaccaccggcacccagaagaaggctcccccatgtcagatgggaacccagagcacccctcaggccagagccatggccctcctacccctccaaccaccccaaagacagagctgcagtccggcaaggcagatcccaaaagggatgggcgctccttgggggagggcgggaagccccacatcgacttcggcaatgtggacatcggggagatcagccatgaggtaatgtccaacatggagacctttgatgtgactgagctggaccaatacctgccgcccaatgggcacccaggccacgtgggcagctactcggcagctggctacgggctgagcagtgccctggctgtggccagtggacactctgcctggatctccaagccaccaggtgtggctctgcccacggtctcgccccctgctgtggatgccaaagcccaggtgaagacagagaccacagggccccagggacccccacactacaccgaccagccgtccacttcccagatcgcctacacctccctcagtctgccccactacggctccgccttcccctccatctcacgcccccagtttgactactctgaccatcagccctcaggaccctattatggccacgcaggccaggcctctggcctctactcagctttttcctacatgggcccctctcagcggcccctctacacggccatctctgaccccagcccctcagggccccagtcccacagtcccacacactgggaacagccagtatatacgactctatcccgaccttagaggggccctgtcaccattggtgcccacgtggcccagggccccttcccccagcctgtgtgccctgctcctcatcagcctcatgcccagcagtggcagtggaggaggctgcagaggctgacagcagcaggcaggcttctgccagctcctgccctgatgacctccacccaccctggctcgggaggccaagccctgactgagctggcaaaggaggagtttggtggccatcccagactgagggtgaggggccacccatccccagaaataaccctctatcccaggacctgagaagtcgttctcaagtctttcagggaggcagaaaagggtatggtgggaaacctcactgctcctgttctctcctgggagagcaaggggctcaagggcctgtgtgccactgtgtcactgtgcctaaaagctaggctgcctagggacctgcttcaaagcctggagctggctctgtcctgtcactaaggactcactgaggacagctttgaacagctttgtgaagagcagggtgggacactcaatggacactctgatcctttcacccccctcctcacctgaatgggaactggccgaggtccccagatccagttctgcattagtaacctcatccctcacctaactgaggagagtcctcatgttcttccccacgacctccactcctcaaggcccaccccaggtgaggaggcaggggctccaggaaagaatcagaggtgtccagccttcctctcgccttctgtcagcctcagttagcactgcacgggccctagccccagagcccagtacctgggttgctggcagcaggctggacactaaaccccttccatgtacagtctacctttgcctcgcaccctttgctccagcgatatcttaataaagtacgtagctctgtctccccatctcctgtctgcagcccagtccacacgtaacacatcgctgcccctttatctccacagtcaccatgttcccatccctctagctactccagccccaattaacttgcattaagcactccaagtaataaaatcaaagcttctggttgcctgc

SEQ ID NO: 1339 - protein, 466 aa, Rattus norvegicus
  ref <308>: DATABASE ACCESSION NUMBER: SWISS-Prot / O55170
  ref <309>: DATABASE ENTRY DATE: 1999-07-15
MAEEQDLSEVELSPVGSEEPRCLSPSSAPSLGPDGGGGGSGLRASPGPGELGKVKKEQQDGEADDDKFPVCIREAVSQVLSGYDWTLVPMPVRVNGASKSKPHVKRPMNAFMVWAQAARRKLADQYPHLHNAELSKTLGKLWRLLNESDKRPFIEEAERLRMQHKKDHPDYKYQPRRRKNGKAAQGEAECPGGETDQGGAAAIQAHYKSAHLDHRHPEEGSPMSDGNPEHPSGQSHGPPTPPTTPKTELQSGKADPKRDGRSLGEGGKPHIDFGNVDIGEISHEVMSNMETFDVTELDQYLPPNGHPGHVGSYSAAGYGLSSALAVASGHSAWISKPPGVALPTVSPPAVDAKAQVKTETTGPQGPPHYTDQPSTSQIAYTSLSLPHYGSAFPSISRPQFDYSDHQPSGPYYGHAGQASGLYSAFSYMGPSQRPLYTAISDPSPSGPQSHSPTHWEQPVYTTLSRP

SEQ ID NO: 1340 - DNA, 2882 bp, Homo sapiens
  ref <308>: DATABASE ACCESSION NUMBER: EMBL / BC007595
  ref <309>: DATABASE ENTRY DATE: 2001-07-13
gtccggccagggtggttggtggtaaggattcaggctccgtcctaacgaggccgtggcctgaggctcagggccccccgcccctccctcccagcccaccagcgtcacctcccagccccgagctggaccgcacaccttgggacacggttttccacttcctaaggacgagccccagactggaggagaggtccgaggaggtgggcgttggactctttgcgaggaccccggcggctggcccgggggaggcggccgaggcggcggcggcggcggccgggggcgacatggcggaggagcaggacctatcggaggtggagctgagccccgtgggctcggaggagccccgctgcctgtccccggggagcgcgccctcgctagggcccgacggcggcggcggcggatcgggcctgcgagccagcccggggccaggcgagctgggcaaggtcaagaaggagcagcaggacggcgaggcggacgatgacaagttccccgtgtgcatccgcgaggccgtcagccaggtgctcagcggctacgactggacgctggtgcccatgcccgtgcgcgtcaacggcgccagcaaaagcaagccgcacgtcaagcggcccatgaacgccttcatggtgtgggctcaggcagcgcgcaggaagctcgcggaccagtacccgcacctgcacaacgctgagctcagcaagacgctgggcaagctctggaggctgctgaacgaaagtgacaagcgccccttcatcgaggaggctgagcggctccgtatgcagcacaagaaagaccacccggactacaagtaccagcccaggcggcggaagaacgggaaggccgcccagggcgaggcggagtgccccggtggggaggccgagcaaggtgggaccgccgccatccaggcccactacaagagcgcccacttggaccaccggcacccaggagagggctcccccatgtcagatggtaaccccgagcacccctcaggccagagccatggcccacccacccctccaaccaccccgaagacagagctgcagtcgggcaaggcagacccgaagcgggacgggcgctccatgggggagggcgggaagcctcacatcgacttcggcaacgtggacattggtgagatcagccacgaggtaatgtccaacatggagacctttgatgtggctgagttggaccagtacctgccgcccaatgggcacccaggccatgtgagcagctactcagcagccggctatgggctgggcagtgccctggccgtggccagtggacactccgcctggatctccaagccaccaggcgtggctctgcccacggtctcaccacctggtgtggatgccaaagcccaggtgaagacagagaccgcggggccccaggggcccccacactacaccgaccagccatccacctcacagatcgcctacacctccctcagcctgccccactatggctcagccttcccctccatctcccgcccccagtttgactactctgaccatcagccctcaggaccctattatggccactcgggccaggcctctggcctctactcggccttctcctatatggggccctcgcagcggcccctctacacggccatctctgaccccagcccctcagggccccagtcccacagccccacacactgggagcagccagtatatacgacactgtcccggccctaaagggggccctgtcgccaccaccccccgcccagcccctgcccccagcctgtgtgccctgttccttgcccacctcaggcctggtggtggcagtggaggaggctgaggaggctgaagaggctgacaggtcggggggctttctgtctggctcactgccctgatgacccacccgccccatccaggctccagcagcaaagccccaggagaacaggctggacagaggagaaggaggttgactgttgcacccacactgaaagatgaggggctgcaccttcccccaggaatgaccctctatcccaggacctgagaagggcctgctcaccctcctcggggaggggaagcaccagggttggtggcatcggaggccttaccactcctatgactcctgttttctctctcacagatagtgagggtctgacatgcccatgccacctatgccacagtgcctaagggctaggccacccagagactgtgcccggagctggccgtgtctcccactcaggggctgagagtagctttgaggagcctcattggggagtggggggttcgagggacttagtggagttctcatcccttcaatgccccctccctttctgaaggcaggaaggagttggcacagaggccccctgatccaattctgtgccaataacctcattctttgtctgagaaacagcccccagtcctcctccactacaacctccatgaccttgagacgcatcccaggaggtgacgaggcaggggctccaggaaaggaatcagagacaattcacagagcctccctccctgggctccttgccagctccctcttcccttactaggctctatggcccctgctcagtcagccccactccctgggcttcccagagagtgacagctgctcaggccctaacccttggctccaggagacacagggcccagcacccaggttgctgtcggcaggctgaagacactagaatcctgacctgtacattctgcccttgcctcttaccccttgcctcccagtggtatttgaataaagtatgtagctatatctgcccctattttcctgttctgcagccccccaaatccacatgtaactcattactgtctcctgttatttatctcagtagtcccctctcctagccactctagcccctattaactctgcattaagcattccacataataaaattaaaggttccggttaaaaaaaaaaaaaaaaaaaaa

SEQ ID NO: 1341 - protein, 466 aa, Homo sapiens
  ref <308>: DATABASE ACCESSION NUMBER: SWISS-Prot / P56693
  ref <309>: DATABASE ENTRY DATE: 2002-06-15
MAEEQDLSEVELSPVGSEEPRCLSPGSAPSLGPDGGGGGSGLRASPGPGELGKVKKEQQDGEADDDKFPVCIREAVSQVLSGYDWTLVPMPVRVNGASKSKPHVKRPMNAFMVWAQAARRKLADQYPHLHNAELSKTLGKLWRLLNESDKRPFIEEAERLRMQHKKDHPDYKYQPRRRKNGKAAQGEAECPGGEAEQGGTAAIQAHYKSAHLDHRHPGEGSPMSDGNPEHPSGQSHGPPTPPTTPKTELQSGKADPKRDGRSMGEGGKPHIDFGNVDIGEISHEVMSNMETFDVAELDQYLPPNGHPGHVSSYSAAGYGLGSALAVASGHSAWISKPPGVALPTVSPPGVDAKAQVKTETAGPQGPPHYTDQPSTSQIAYTSLSLPHYGSAFPSISRPQFDYSDHQPSGPYYGHSGQASGLYSAFSYMGPSQRPLYTAISDPSPSGPQSHSPTHWEQPVYTTLSRP

SEQ ID NO: 1342 - DNA, 1214 bp, Rattus norvegicus
  ref <308>: DATABASE ACCESSION NUMBER: EMBL / AJ001290
  ref <309>: DATABASE ENTRY DATE: 2000-11-14
aagtattaaaaagctggacacttctgtcattcggacatttttactcacaagttcccagaatgagggctgcgctggagacagcagacattgccatagtggccctgtattttgtcctggtcgtgtgcattggtttctttgccatgtggaaatctaatagaagcactgtgagtggatacttcctggccgggcgctctatgacctgggtggccattggtgcctctctgtttgtgagcaatattgggagtgaacacttcattgggctggtagggactggagctgcaagtggatttgcagtgggcgcatgggagttcaatgccttgctgctcttgcaacttctgggatgggttttcatccctatttacatccgctcaggggtgtacaccatgcctgaatatttgtccaagaggttcggtggccataggattcaggtctattttgcggccttgtccctgctcctctatatcttcaccaagctctcggtggatctgtactcaggggccctctttatccaggagtccttgggttggaacctttatgtgtctgtcatcctgctcattggcatgactgctctgctgaccgtcactggaggccttgttgcagtgatctacacagacactctccaggctctgctcatgatcattggggcactgacacttatggttattagcatgatgaaggttggagggtttgaggaagttaagagaaggtacatgttggcctcacccaatgttgcttccattttgttgacacacaacctttccaacacaaattcttgtatggtgcatcctaagcaagatgccctaaagatgttgagagatccaacagatgaagacgtcccatggcctggattcattcttgggcagaccccagcctcggtatggtactggtgtgctgaccaggtcatcgtgcagagggttctagcagccaaaaacattgctcatgccaaaggttctactctgatggctggcttcttgaagctcctaccaatgtttatcatagtcgtacccggaatgatttccaggatactgtttgttgatgatatagcttgcatcaacccagaacactgcatgcaagtgtgtggaagcagagctgggtgctccaatattgcttacccacgcctggtgatggagttggttcccgtgggccttcggggcctgatgatggcagtgatgattgcagctctgatgagcgacttggcctccatcttcaacagt

SEQ ID NO: 1343 - protein, 385 aa, Rattus norvegicus
  ref <308>: DATABASE ACCESSION NUMBER: SWISS-Prot / CAA04650
  ref <309>: DATABASE ENTRY DATE: 2002-06-01
MRAALETADIAIVALYFVLVVCIGFFAMWKSNRSTVSGYFLAGRSMTWVAIGASLFVSNIGSEHFIGLVGTGAASGFAVGAWEFNALLLLQLLGWVFIPIYIRSGVYTMPEYLSKRFGGHRIQVYFAALSLLLYIFTKLSVDLYSGALFIQESLGWNLYVSVILLIGMTALLTVTGGLVAVIYTDTLQALLMIIGALTLMVISMMKVGGFEEVKRRYMLASPNVASILLTHNLSNTNSCMVHPKQDALKMLRDPTDEDVPWPGFILGQTPASVWYWCADQVIVQRVLAAKNIAHAKGSTLMAGFLKLLPMFIIVVPGMISRILFVDDIACINPEHCMQVCGSRAGCSNIAYPRLVMELVPVGLRGLMMAVMIAALMSDLASIFNS

SEQ ID NO: 1344 - DNA, 7516 bp, Rattus norvegicus
  ref <308>: DATABASE ACCESSION NUMBER: EMBL / AJ001320
  ref <309>: DATABASE ENTRY DATE: 1998-03-26
gccgcgggctccagttccctggctacgcgtgagcgttcccgccacaccgagctcttggggccgtggttaaagcggagaggagccgagcgctctacccaccctgggagtctcctccaggccggcgagcaggagtctccttttagttggtgtttggcatcattatagtttggcatcttgaagaagatgttggaaaccatagacaaaaaccgggccctgcaggcagcagagcgcttgcaaagcaagctgaaggaacgcggggatgttgcaaatgaagacaaattgagcctcctgaagtctgtcctgcagagtccactcttcagtcagatcctgagccttcagacttctctacagcagctgaaagaccaggtaaacgttgctactttggcaactgcaaatgctgaccatgcccacacaccgcagttcagctctgccatcatctctaatctgcaaagtgagtcacttttgctgtctccaagtaatgggaacctcgaagcaatttctggacctggtgctccacctgccatggatggaaagcctgcctgtgaagaacttgatcagctcatcaaaagtatggcccagggtcgccatgtggaaatatttgagctcctcaaacctccatgtggaggcctcggcttcagtgtcgttgggctcagaagtgaaaacaggggagagctggggatttttgttcaggagattcaagagggcagtgtggctcacagagatggcagacttaaggagactgaccagatccttgccattaatggccaggtcctagatcagacgatcacacaccagcaggccatcagcatcctgcagaaggccaaagacactatacagcttgttattgccagggggtctttgccgcatatctccagcccacgaatttcccgttctccatctgcagccagcacagtttcagcccactcgaatccaactcactggcagcatgtggaaactatcgaacttgtgaatgatgggtctggtctgggatttggcatcataggaggaaaagcaactggtgtgatagtcaagacaattttgcctggaggagtagctgaccagcatggtcgactatgcagtggagaccacattctgaagattggtgacacggacctagcagggatgagcagtgagcaagtagcacaagtcctcaggcagtgtggaaacagagttaaactgatgattgccagaggcgctgtagaagaaactccagcaccttcctctttgggcatcaccctctcctcttccacatctacttcagagatgcgagttgatgcttctactcagaaaaatgaagaaagtgagacgttcgatgtggaactcactaaaaatgtccaaggattaggaattaccattgctggctatattggagataaaaaattagagccttcaggaatctttgtaaagagcattacaaagagcagtgctgtggagcttgatggaagaatccagattggagaccaaattgtagcagtcgatggcaccaaccttcagggttttaccaatcaacaagcagtagaggtgttacgtcacacgggacagacagtgcgtctgacactgatgaggaagggagccagccaggaagcagagattacgtcaagagaagacaccgcaaaagatgtggacctcccagctgaaaattatgaaaaagatgaagagtctttgtcactgaagagaagtaccagcatactgccgattgaagaggaaggatatccactgttgtcaactgagctggaagaaactgaagatgtgcagcaagaagctgccttgctgacaaagtggcagaggattatgggaattaactatgaaatagtggtggctcatgtgagcaagtttagtgagaacagtgggctgggaataagtctggaagcaacagtgggccaccacttcatccggtctgtgctaccagaaggccctgtgggacacagcgggaagctcttcagtggagatgagctattggaagtcaatggtataaatttgcttggggaaaaccatcaagatgtggtcaatattttaaaagaacttcctatcgatgtgacaatggtatgttgccgtcggactgtgccaccgaccgccctgtcagaagtggatagcctggacatacatgatcttgaactaacagagaagcctcatatagacctaggagagttcattggatcctcggagacagaggatcccatgctggcgatgtccgatgtggatcagaatgccgaggagattcagaccccgctggccatgtgggaggcaggcattcaggccatagagctggagaaagggagcaggggcctgggcttcagcatcttagactaccaggaccccatcgatccagcaaacacagtaatagtcattcgttctctggtgcctggcggcattgctgaaaaggatggacggctttttccaggagacaggctcatgtttgtcaatgacattaacctggaaaacagcactctggaagaggccgtggaagccttgaagggagcgccctcagggatggtgcgtataggagtagccaagcctttgcctctttcaccagaagaagggtatgtttctgccaaggaagacacttttctctgctcaccgcacacctgcaaggagatgggcctgtctgacaaagccctcttcagggctgacttggctctgatagatacacctgatgctgagtccgtagcagaatcaagatttgagtctcagttctctcctgataacgacagtgtctactctacacaagcctctgtcttatctcttcatgatggtgcttgtagtgatggcatgaactacggcccctctctgccctcatctcctcccaaggacgtgaccaacagttctgacctagtgctcggtctgcatttgtccctggaagaactctacacacagaacctccttcagagacagcatgctggctctcctcccacagacatgagcccagcagccacctctggtttcaccgtcagtgactacacacctgcaaatgctgttgaacaaaaatatgagtgtgcaaacacagtagcgtggactccctcgcagttgccaagtggcctaagcaccacagagctcgctcctgcactgcctgctgtggctccgaagtatttaacagagcagagctctctggtgtctgatgctgagtctgtcaccctgcagagcatgtcccaggaagcctttgagaggacggttactatagcaaaaggcagctccagtctaggcatgacagtaagtgctaataaagatggcctgggagtgattgtgcgaagcattattcacggaggcgccattagtcgggatggccgaattgctgttggtgactgcattttgtccattaatgaagaatccaccatcagtttaaccaatgcccaggcacgggccatgctgagaagacattctctaattggacctgacataaaaattacttacgtgcctgcagaacatttggaagagttcagagtaagttttggtcaacaagccggaggaataatggcactggatattttttcttcatacactggcagagatattccagaactcccagagcgagaagaaggagaaggggaagaaagtgaactgcagaatgctgcttatagcagctggagccagccccggagggtggaactttggagagagcccagcaagtccttgggcatcagcattgttggtggtcgggggatggggagccggctgagcaacggcgaggtgatgaggggcatcttcattaaacatgttcttgaagacagtccagctggcaaaaatggaactttgaagccgggagacagaatagttgaggtggatgggatggacctcagagatgcaagccatgaacaagctgtggaagccattcggaaagcaggcagccctgtagtgtttatggtacagagcattgtaaacagaccaaggaaatcccctttgccttccttgccgcacagcctttaccctaagtgcagcttcagcagcactaacccatttgcagagtctctccagctcacctctgacaaggcacccagccagtcagaatccgagtcggagaaggccacattgtgcagtgtcccttcctcctctccttcagtgttctcagaaatgagcagtgattatgcacagccatctgcaaccacagtcgcagaagatgaggacaaagaggatgagtttgggtacagctggaaaaatatccaagagcgttatggaacccttacaggccagctccatatgattgagctggagaaaggtcatagcggtttgggtctaagtcttgctgggaacaaagaccgaaccagaatgagtgtgtttatagtggggattgatcctactggagcagcagggagagatggccgactacagattgccgacgagcttttagagatcaatggccaaatattatatggcagaagtcatcagaatgcttcatcaatcattaaatgtgctccatctaaagtaaaaatcatttttatcagaaatgcagatgcagtgaatcagatggctgtatgtccaggaagtgcagcagaccctctaccttctacctcagaaagtcctcaaaataaggaggtggaaccaagtattactacatctgcttcagctgtggacctcagctcacttacaaatgtgtaccatctggagcttcccaaggatcaaggaggcttaggcattgctatctgtgaggaagacacactcaatggagtcacgatcaagagcctaactgagcgtgggggagcagccaaggatggaaggctcaaacctggggatcgcatcttggctgtagatgatgaacttgttgctggctgtcctattgaaaagttcatcagtcttctgaagacggcaaagacaactgtaaaactgactgttggagctgagaacccgggctgtcaggctgtcccttcagcagctgtcacagccagcggagaaaggaaagacagctcccagacccctgcagtcccagctccagacctggaacccattccaagtacgagcaggtcatccacaccagcaatttttgcttctgaccctgccacctgccccatcatccctggctgtgaaacaacaattgagatttccaaaggccaaacaggcctgggactgagcattgtcggggggtcagacacgttgctgggtgctattattatccatgaagtttatgaagagggagcagcatgtaaagatggaagactgtgggctggagaccagattttagaggtaaatgggattgacctgagaaaggctacacatgatgaagcaatcaatgtcctgaggcagactccgcaaagagtacggctgacgctctaccgagatgaggccccatacaaagaggaggatgtatgtgacaccttcactgtcgagctgcagaagaggccgggcaaaggccttgggttgagtattgttggcaaaagaaatgacactggagtgtttgtatcagacattgttaaaggaggcattgcagacgccgatgggagactgatgcaaggggaccagattttaatggtgaatggagaagatgtccgtaatgccacccaggaagcagttgctgccctgctcaagtgttccctaggcacagtaaccctcgaggttggaagaatcaaagccgctccattccactcagagaggaggccttctcaaagcagtcaggtgagtgagagcagcctgtcatccttcagtctcccacgttctggaatacatacatcagaatcgtcagaaagtagtgccaagaagaatgcgttagcatctgaaattcagggattaaggacagtcgaaataaaaaaggggcctgctgacgcgctgggactcagcattgccggaggagtgggcagcccgctcggcgacgtcccgatatttattgccatgatgcacccaaatggtgttgcagctcaaacccaaaaactcagagttggggataggattgtcaccatctgtggcacatccactgatgggatgactcacacacaggcggttaacttgatgaaaaatgcctcaggctccattgaagtgcaggtggttgctggaggagatgtgagtgtggtcacgggtcatcagcaagagcttgccaatccttgccttgctttcactgggctgacttccagcactatatttccggatgacttaggccctccacagtctaagaccataacactagaccgaggaccagatggcttaggcttcagcattgtaggtggctatggcagccctcatggagacttaccaatttatgttaaaacagtgttcgcaaagggagcagcggcagaagatgggcgtctaaagaggggtgatcagatcattgctgtcaacgggcaaagtctagaaggcgtgacccatgaagaagctgttgccatccttaagcggacaaagggcactgtcaccctcatggttctctcttgaattggctgtcagagccgaagcagccagctacgtgcccacctcctactgtaacggagtggaactgttcacatgacctgttgattggggaagactacgcggggccgagaaacacactgatttgttcctaacaaccaaacagcatttttcctttaccgtggcatttcatagtcttatgctcaaacagaagggaggtttgcagaggtaaacctcagttttatcttgaagatatctaacaatttatagtcatgtggacagaattattgtatgctcattttgttagtatggaaacaaaataatgcaaagttagccaagggagatggcttcagaaaaattaagataaaaggtggaaatttagaaaaaagaaggcagtcttgagtcttatagaacttccccaatctagaagtctacaaaaagaaaataaagtgcccgcagtactcttgaatagtccactgttttaaaattgtgaacattgtgatgtactggttctccttacctcttatgcgtattttttctgctaaaattgttcagcagtcttcataagctttaaaaagaaattgtgtttaatgcatatctcagtgttcttttttagttttgacctgctatattttcatgttgttgtatgtaaaataatgttgctaccctgtgttggccgcagttcttctaagaaacatccactccacgtagtcatggaagacagagaagaagcccagaaccttctaatgctgatttaacggactgatacaacgttgaaaacacgttcagtaccatgctattgtttttacattagtattaatcttaatgacatagaaaaagacaatgtgttagtaattattttggttgtatgccattagtaaattgacagaaaaattaagggggttaatgtgacttcatttcactgctgtatattaacatcttacaatacaatagtttaagtctaagggaaacagatggagctgtttaccgagcaactggtgaggaattatgtgttcaatcccattttagagcgtgaaactcctacattagaatagataaagtcactttaaatattatctatatttgtaacagaagtcgtatacatatattttattatagcattcttgtgtaaatgcagaattaaagtgaataaataagttttttgtggtgtacagcaaaaaaaaaaaaaaaaaaa

SEQ ID NO: 1345 - protein, 2054 aa, Rattus norvegicus
  ref <308>: DATABASE ACCESSION NUMBER: SWISS-Prot / CAA04681
  ref <309>: DATABASE ENTRY DATE: 2003-02-01
MLETIDKNRALQAAERLQSKLKERGDVANEDKLSLLKSVLQSPLFSQILSLQTSLQQLKDQVNVATLATANADHAHTPQFSSAIISNLQSESLLLSPSNGNLEAISGPGAPPAMDGKPACEELDQLIKSMAQGRHVEIFELLKPPCGGLGFSVVGLRSENRGELGIFVQEIQEGSVAHRDGRLKETDQILAINGQVLDQTITHQQAISILQKAKDTIQLVIARGSLPHISSPRISRSPSAASTVSAHSNPTHWQHVETIELVNDGSGLGFGIIGGKATGVIVKTILPGGVADQHGRLCSGDHILKIGDTDLAGMSSEQVAQVLRQCGNRVKLMIARGAVEETPAPSSLGITLSSSTSTSEMRVDASTQKNEESETFDVELTKNVQGLGITIAGYIGDKKLEPSGIFVKSITKSSAVELDGRIQIGDQIVAVDGTNLQGFTNQQAVEVLRHTGQTVRLTLMRKGASQEAEITSREDTAKDVDLPAENYEKDEESLSLKRSTSILPIEEEGYPLLSTELEETEDVQQEAALLTKWQRIMGINYEIVVAHVSKFSENSGLGISLEATVGHHFIRSVLPEGPVGHSGKLFSGDELLEVNGINLLGENHQDVVNILKELPIDVTMVCCRRTVPPTALSEVDSLDIHDLELTEKPHIDLGEFIGSSETEDPMLAMSDVDQNAEEIQTPLAMWEAGIQAIELEKGSRGLGFSILDYQDPIDPANTVIVIRSLVPGGIAEKDGRLFPGDRLMFVNDINLENSTLEEAVEALKGAPSGMVRIGVAKPLPLSPEEGYVSAKEDTFLCSPHTCKEMGLSDKALFRADLALIDTPDAESVAESRFESQFSPDNDSVYSTQASVLSLHDGACSDGMNYGPSLPSSPPKDVTNSSDLVLGLHLSLEELYTQNLLQRQHAGSPPTDMSPAATSGFTVSDYTPANAVEQKYECANTVAWTPSQLPSGLSTTELAPALPAVAPKYLTEQSSLVSDAESVTLQSMSQEAFERTVTIAKGSSSLGMTVSANKDGLGVIVRSIIHGGAISRDGRIAVGDCILSINEESTISLTNAQARAMLRRHSLIGPDIKITYVPAEHLEEFRVSFGQQAGGIMALDIFSSYTGRDIPELPEREEGEGEESELQNAAYSSWSQPRRVELWREPSKSLGISIVGGRGMGSRLSNGEVMRGIFIKHVLEDSPAGKNGTLKPGDRIVEVDGMDLRDASHEQAVEAIRKAGSPVVFMVQSIVNRPRKSPLPSLPHSLYPKCSFSSTNPFAESLQLTSDKAPSQSESESEKATLCSVPSSSPSVFSEMSSDYAQPSATTVAEDEDKEDEFGYSWKNIQERYGTLTGQLHMIELEKGHSGLGLSLAGNKDRTRMSVFIVGIDPTGAAGRDGRLQIADELLEINGQILYGRSHQNASSIIKCAPSKVKIIFIRNADAVNQMAVCPGSAADPLPSTSESPQNKEVEPSITTSASAVDLSSLTNVYHLELPKDQGGLGIAICEEDTLNGVTIKSLTERGGAAKDGRLKPGDRILAVDDELVAGCPIEKFISLLKTAKTTVKLTVGAENPGCQAVPSAAVTASGERKDSSQTPAVPAPDLEPIPSTSRSSTPAIFASDPATCPIIPGCETTIEISKGQTGLGLSIVGGSDTLLGAIIIHEVYEEGAACKDGRLWAGDQILEVNGIDLRKATHDEAINVLRQTPQRVRLTLYRDEAPYKEEDVCDTFTVELQKRPGKGLGLSIVGKRNDTGVFVSDIVKGGIADADGRLMQGDQILMVNGEDVRNATQEAVAALLKCSLGTVTLEVGRIKAAPFHSERRPSQSSQVSESSLSSFSLPRSGIHTSESSESSAKKNALASEIQGLRTVEIKKGPADALGLSIAGGVGSPLGDVPIFIAMMHPNGVAAQTQKLRVGDRIVTICGTSTDGMTHTQAVNLMKNASGSIEVQVVAGGDVSVVTGHQQELANPCLAFTGLTSSTIFPDDLGPPQSKTITLDRGPDGLGFSIVGGYGSPHGDLPIYVKTVFAKGAAAEDGRLKRGDQIIAVNGQSLEGVTHEEAVAILKRTKGTVTLMVLS

SEQ ID NO: 1346 - DNA, 3034 bp, Homo sapiens
  ref <308>: DATABASE ACCESSION NUMBER: EMBL / AK058011
  ref <309>: DATABASE ENTRY DATE: 2001-10-31
ggcagctaaaggctaattatttttaaacacagaaagaatttagcatattatttgagtgtcagtgggaatatgtctaaaaaatagactttttttggaatacagtatcagtagtctagttctcatgaaatatgacatgggtaacatggctactataggatgtggggtcaccaggtcatcataaaaaccaccattaatgaaccctaaactctgtgccttgggaagaccatacaaagaccgtctaatccaataccctgtttctaaagatgggaaagcggaggatcaaatggtgaaatgatttgatgtcatgaccttggcaagaacaagtgatacagttcagcttttactatatatttctatttatggttatcttcgtatctttagaagttttgggttttttttttatagttttgtgaaagaaaggatgggaataagatttgtgtttattttgcataaacctatctcgtgtggaagatgtgtaatgatttcaaataaaagacatcacagcaatggtacttagattttgagttaataaatggtgtttagtttgagatacacatctgttatgattttcagtaatattaatgatggtgatagcaacatttatgtaaccacaagttaatattattcaaagctccattctgatttggaaagaacagcagattttgcatccaaggactgactcttaagtcttacttttgccacttagtagccgagtgacccataaaatgagaatggtaatacacgcttctactcagtgtatataaatgatgaagaataaatatgcttattggagatcattttaatctatgaagcactgtaagacataagctgttatttatcaaaaaatataattctaatgttgccccagtgttgctccaaataacaaaacttttaaagtcataaaaacaagtaaaaattttgggtaaaaacgtaactttttattaaataagcattgcattacagttgagcaaaagataatgttgaaattcaaaattgtgtgtagaaacgatactggagtatttgtgtcagacattgtcaaaggaggaattgcagatgccgatggaagactgatgcagggagaccagatattaatggtgaatggggaagacgttcgtaatgccacccaagaagcggttgccgctttgctaaaggtgagtgaaggcagcctgtcatctttcacttttccactctctggatccagtacatctgagtcactggaaagtagctcaaagaagaatgcattggcatctgaaatacagggattaagaacagtcgaaatgaaaaaggttggggataggattgtcaccatctgtggcacatccactgagggcatgactcacacccaagcagttaacctactgaaaaatgcatctggctccattgaaatgcaggtggttgctggaggagacgtgagtgtggtcacaggtcatcagcaggagcctgcaagttccagtctttctttcactgggctgacgtcaagcagtatatttcaggatgatttaggacctcctcaatgtaagtctattacactagagcgaggaccagatggcttaggcttcagtatagttggaggatatggcagccctcatggagacttacccatttatgttaaaacagtgtttgcaaagggagcagcctctgaagacggacgtctgaaaaggggcgatcagatcattgctgtcaatgggcagagtctagaaggagtcacccatgaagaagctgttgccatccttaaacggacaaaaggcactgtcactttgatggttctctcttgaattggctgccagaattgaaccaacccaacccctagctcacctcctactgtaaagagaatgcactggtcctgacaatttttatgctgtgttcagccgggtcttcaaaactgtaggggggaaataacacttaagtttctttttctcatctagaaatgctttccttactgacaacctaacatcatttttcttttcttcttgcattttgtgaacttaaagagaaggaatatttgtgtaggtgaatctcgtttttatttgtggagatatctaatgttttgtagtcacatgggcaagaattattacatgctaagctggttagtataaagaaagataattctaaagctaaccaaagaaaatggcttcagtaagttaggatgaaaaatgaaaatataaaataaagaagaaaatctcggggagtttaaaaaaaatgcctcaatttggcaatctacctcctccccccaccccaaactaaaaaaagaaaaaaaggttttctaatgaaaatctttaaaaatactgtcagtattttaaaattttcaacagtattataaaaacattgcatctccccacctctaatatgcatatatatttttcctgctaaaattggtttctacaattgagtaaatggcaaatacatgaagcaatgtccctaaattttataaagaaattatatttaatgcacatttcaattttcattcttatttttgaccttttgtaaaatattttcatgttgctataagtaaatgatgatgccaccccatgttgactatggtttttctagaaagcaactatgctgctaaccatagaggaacatagaagggttccagaatctttagtgctggttttaacaaccgatgcaacattaaaaatgtgttagtgtgctgtgcaattggttttcaattcatattaatcttaatgacagagaacaatgtgttactaattattttggttgtatgccattagtaaattgatagaaaaattaaggggattaacataacttcatttcattgccttatattaacatcttataatacaatagtttaagactaagggaaacagatggagctgtttattgagacaactggtgaggaattatcatgtgttcattcccattttagagcgtgaaactcctacattagaatatataaagtcactttaaatatctatatttgtaacagaagtagtgtacagatattttattacagcatttttgtgtaaatgcagaattaaagtgaataaataagaattttcagtggtgcacaaat

SEQ ID NO: 1347 - protein, 2042 aa, Homo sapiens
  ref <308>: DATABASE ACCESSION NUMBER: Refseq / NP_003820
  ref <309>: DATABASE ENTRY DATE: 2002-11-05
MLEAIDKNRALHAAERLQTKLRERGDVANEDKLSLLKSVLQSPLFSQILSLQTSVQQLKDQVNIATSATSNIEYAHVPHLSPAVIPTLQNESFLLSPNNGNLEALTGPGIPHINGKPACDEFDQLIKNMAQGRHVEVFELLKPPSGGLGFSVVGLRSENRGELGIFVQEIQEGSVAHRDGRLKETDQILAINGQALDQTITHQQAISILQKAKDTVQLVIARGSLPQLVSPIVSRSPSAASTISAHSNPVHWQHMETIELVNDGSGLGFGIIGGKATGVIVKTILPGGVADQHGRLCSGDHILKIGDTDLAGMSSEQVAQVLRQCGNRVKLMIARGAIEERTAPTALGITLSSSPTSTPELRVDASTQKGEESETFDVELTKNVQGLGITIAGYIGDKKLEPSGIFVKSITKSSAVEHDGRIQIGDQIIAVDGTNLQGFTNQQAVEVLRHTGQTVLLTLMRRGMKQEAELMSREDVTKDADLSPVNASIIKENYEKDEDFLSSTRNTNILPTEEEGYPLLSAEIEEIEDAQKQEAALLTKWQRIMGINYEIVVAHVSKFSENSGLGISLEATVGHHFIRSVLPEGPVGHSGKLFSGDELLEVNGITLLGENHQDVVNILKELPIEVTMVCCRRTVPPTTQSELDSLDLCDIELTEKPHVDLGEFIGSSETEDPVLAMTDAGQSTEEVQAPLAMWEAGIQHIELEKGSKGLGFSILDYQDPIDPASTVIIIRSLVPGGIAEKDGRLLPGDRLMFVNDVNLENSSLEEAVEALKGAPSGTVRIGVAKPLPLSPEEGYVSAKEDSFLYPPHSCEEAGLADKPLFRADLALVGTNDADLVDESTFESPYSPENDSIYSTQASILSLHGSSCGDGLNYGSSLPSSPPKDVIENSCDPVLDLHMSLEELYTQNLLQRQDENTPSVDISMGPASGFTINDYTPANAIEQQYECENTIVWTESHLPSEVISSAELPSVLPDSAGKGSEYLLEQSSLACNAECVMLQNVSKESFERTINIAKGNSSLGMTVSANKDGLGMIVRSIIHGGAISRDGRIAIGDCILSINEESTISVTNAQARAMLRRHSLIGPDIKITYVPAEHLEEFKISLGQQSGRVMALDIFSSYTGRDIPELPEREEGEGEESELQNTAYSNWNQPRRVELWREPSKSLGISIVGGRGMGSRLSNGEVMRGIFIKHVLEDSPAGKNGTLKPGDRIVEVDGMDLRDASHEQAVEAIRKAGNPVVFMVQSIINRPRKSPLPSLLHNLYPKYNFSSTNPFADSLQINADKAPSQSESEPEKAPLCSVPPPPPSAFAEMGSDHTQSSASKISQDVDKEDEFGYSWKNIRERYGTLTGELHMIELEKGHSGLGLSLAGNKDRSRMSVFIVGIDPNGAAGKDGRLQIADELLEINGQILYGRSHQNASSIIKCAPSKVKIIFIRNKDAVNQMAVCPGNAVEPLPSNSENLQNKETEPTVTTSDAAVDLSSFKNVQHLELPKDQGGLGIAISEEDTLSGVIIKSLTEHGVAATDGRLKVGDQILAVDDEIVVGYPIEKFISLLKTAKMTVKLTIHAENPDSQAVPSAAGAASGEKKNSSQSLMVPQSGSPEPESIRNTSRSSTPAIFASDPATCPIIPGCETTIEISKGRTGLGLSIVGGSDTLLGAIIIHEVYEEGAACKDGRLWAGDQILEVNGIDLRKATHDEAINVLRQTPQRVRLTLYRDEAPYKEEEVCDTLTIELQKKPGKGLGLSIVGKRNDTGVFVSDIVKGGIADADGRLMQGDQILMVNGEDVRNATQEAVAALLKCSLGTVTLEVGRIKAGSSTSESLESSSKKNALASEIQGLRTVEMKKGPTDSLGISIAGGVGSPLGDVPIFIAMMHPTGVAAQTQKLRVGDRIVTICGTSTEGMTHTQAVNLLKNASGSIEMQVVAGGDVSVVTGHQQEPASSSLSFTGLTSSSIFQDDLGPPQCKSITLERGPDGLGFSIVGGYGSPHGDLPIYVKTVFAKGAASEDGRLKRGDQIIAVNGQSLEGVTHEEAVAILKRTKGTVTLMVLS

SEQ ID NO: 1348 - DNA, 7516 bp, Rattus norvegicus; identical to SEQ ID NO: 1344
  ref <308>: DATABASE ACCESSION NUMBER: EMBL / AJ001320
  ref <309>: DATABASE ENTRY DATE: 1998-03-26

SEQ ID NO: 1349 - protein, 2054 aa, Rattus norvegicus; identical to SEQ ID NO: 1345
  ref <308>: DATABASE ACCESSION NUMBER: SWISS-Prot / CAA04681
  ref <309>: DATABASE ENTRY DATE: 2003-02-01

SEQ ID NO: 1350 - DNA, 3034 bp, Homo sapiens; identical to SEQ ID NO: 1346
  ref <308>: DATABASE ACCESSION NUMBER: EMBL / AK058011
  ref <309>: DATABASE ENTRY DATE: 2001-10-31

SEQ ID NO: 1351 - protein, 2042 aa, Homo sapiens; identical to SEQ ID NO: 1347
  ref <308>: DATABASE ACCESSION NUMBER: Refseq / NP_003820
  ref <309>: DATABASE ENTRY DATE: 2002-11-05

SEQ ID NO: 1352 - DNA, 8575 bp, Rattus norvegicus
  ref <308>: DATABASE ACCESSION NUMBER: EMBL / AJ001713
  ref <309>: DATABASE ENTRY DATE: 1998-12-02
gaattcggcacgagggcaggacagggagggactgcggcggagatacgggtcccacgggcaagagcagagaccgcgatttaggcggccgttccaacgcgtgctctctgggcggggtgcggcgggggatgtgcctacccaggccgggcggagtctctctgacagggcgggggatgcgcggccgccgctctctcggaccctgaggcggctgggcccaccctcgaggaaccatcctacccccggcggccttggcctctgctttctccggcctgaccctggaaaccgaggcggggaagcggataccgccgaagaggaaggggctgtggtggccaccgcggcgcagccagagttcttttgccaagaaaatggtttgcccagtcctgaacacatactgtcctttctgatgggacaagatccaatatgaatgtaagtgatggaggaagacgacgctttgaggataatgaacacacattgcgaatatatcctgggacaatttcagaaggaacaatttactgtccaattcctgccagaaaaaactccacagctgctgaggtgattgactcccttataaacagacttcacctagacaagacaaaatgctacgttttagcagaggtaaaggaatttggtggagaagaatggattctcaatccaaccgactgtccagttcagcgaatgatgctgtggccccgaatggctttggaaaatcgcctaagtggggaggactatcgctttcttctgagagaaaaaaacctcgatggatcaattcattatggtagcctccagtcatggctacgggtaaccgaagaacgccgaaggatgatggagcggggttttcttccacagcctcaacagaaagactttgatgatttatgtagcttgcctgatttgaatgagaaaactctcttagaaaacctacggaatcgctttaagcatgaaaaaatttatacttatgttggcagtattctaatagctattaatccattcaaatttcttcctatttataaccccaaatatgtcaaaatgtatgataaccaccagctgggaaaacttgaaccccacatatatgctgtggcggatgttgcttatcatgccatgcttcagcgcaaaaagaatcagtgtattgtgatttcaggagagagtggttctgggaagactcaaagcacaaactttcttattcatcaccttactgccctcagccagaaaggatttgccagtggagtagaacagattattcttggagctggaccagtacttgaggcctttggaaatgcaaagacagctcataataacaattcaagtcgttttggcaagtttattcaagtaaattaccaagaaacaggcactgtacttggggcctatgttgaaaaatatcttctggaaaaatctagacttgtttatcaagagcataatgaacggaactatcatgtattctattacctccttgcaggagcaagtgaagaagagaggttagcattccaccttaagcagcctgaggagtatcattttctcaaccagataacaaagaaacccctcagacagagctgggatgattattgctatgattctgagccggattgcttcacagtggagggagaagatttgaggcatgattttgaacgcttacaattggccatggaaatggtaggatttcttcccaagacacgaagacagattttctcactgctctcagcaatactacatttgggtaatatctcatataaaaagaagacctatcgagatgactctattgatatctgtaatcctgaagtactgcctattgtctcagaattactagaagttaaagaagagatgctatttgaagcattggttacaaggaagacggtgacagtgggtgaaaagcttattttaccatataaactggcagaggctgtgacagtgagaaactccatggctaaatctttatatagtgctctgtttgactggatagtgtttcgtattaatcatgcacttctgaatagtaaagatttggaaaaagatactaagactttgtccattggtgtacttgatatttttgggtttgaagattatgaaaacaatagttttgaacagttctgtattaattttgctaatgaacgtttacagcactactttaatcagcatatctttaagttggagcaagaggaatatagaactgaaggtatcagttggcacaacattgattatattgataatacttgttgtataaatcttattagcaaaaaaccaacaggactgctccaccttttggatgaagaaagcaactttccacaggctacaaatcaaacattacttgacaagtttaaacatcaacatgaagagaattcttacattgaatttccagctgtaatggagcctgcttttatcataaaacattacgctggaaaagtaaaatatggagtaaaggattttcgggaaaaaaatacagatcatatgcgtccagacattgtggctcttctgagaagtagcaggaatgcttttgtttctgggatgactggcattgatcccgtagctgttttccgatgggcagttctccgagcattttttagagctgtggttgctttcagggaagctgggaaaagacatattcagagaaaaagtggacatgatgatacaacaccatgtacaattttgaaaagtatggatagttttagctttctccaacacccagtccaccagaggagcttagagattctgcagaggtgcaaggaagagaagtacagtataacccggaaaaacccaagaacacctctttctgatcttcaaggcatgaacactctgaatgaaaaaaatcaacatgatacatttgatattgcctggaatgtcagaactggaattcgccaaagcagactaccaactaacaatacttccttgcttgataaagatgggatatttgctaattcagcaagcagcaaactcctggaaagagctcatggaattctcacgagaaacaaaaatttcaggtcaaaacctgttcttccaaagcacttgctggaggtaaattctttgaaacatctgaccagactgacccttcaggatcgaattaccaaatctcttcttcatttgcataagaagaagaaacctcccagtatcagcgcccagtttcaggtctccttaagcaagctgatggagacacttgatcaagcagaaccatattttgtaaaatgcattcgctcaaatgctgaaaagctgcccttaagattcagtgatgccttggtactaagacagcttcggtacactgggatgctggagacagttagaattcgccaatctggatatagctccaaatattctttccaggattttgtgagccactttcatgtacttcttccccaacatattatcccatcaaaatttaacattcaagatttcttcagaaaaataaatatcaatcctgataattatcaagttggaaaaaccatggtgttcctaaaggagcatgaacgacagcacttacaggatctgcttcatcaggaagtgcttcgcagaatcatactgctgcagcggtggttcagggtcttgctctctaggcagcagttccttcacttgagacaggcgtctgttattattcagcgattctggaggaactatctaaatcagaagcaagttagaaatgcggctgtggagaaagatgctttcatcatggctagtgcagcttcccttcttcaagcgtcctggcgtgctcacttagagaggcagcggtacttggagttacgagctgcagctgtcattatccagcagagatggagggaactctgtaggcgtagacacagggctgctacctgtatacagtcaagatggaggggctacaggcaaagtaagaagtacaaagaacaaaggaataaaattatcctgttacagtcaatatatagaggattcagagcacgacaaagatataaggctttaaaagaggaaaggctgaaagaaacaaaactagagcatggattggcgcagatcaagacatgtggacctctagaaatccagggttcagacccttctgagtgggaggatcgttcctttgccaacagagtgaaagccatagaagaatgtaaatctgtgatagagagtaatcgaattagccgggagagttcaatggacttctcaaaggagtctccagacaagcaacaggagagaggcaggagccaaagtggtacagatttacagggggatgtgattgtaagacagaggcccaagtcattggaagatctacatcagaaaaaagtaggtcgggccaaaagagaaagtcggagaatgagagaattagaacaagctatatttagcttagaattgctcaaagtccgttctcttggtggcatgtctccttcagaggaacgtagatggtctacagaattgatgcctgaaggccttcaatctccacagggtacacctgatagtgagagctctcaagggagcttagaacttttaacctgtgatgagaaccaaaagagcaaaccagagtccctcattttagatgatggagaattgaaaatttcatcacccagtacatttaccaatccaaaatttgattcacaaaataatgccctcagtgcctcaagtgagacaagctctacgttttctggaaaaggagcatcctctgactcagagcatttgaagaatggaactgcagaggaaaagcttgtctatagttctcaacccatcacttgtaaatctcagctgagagactcttttgtttcaagtagtctgcctacatttttttatattcctcatcaagaacctctgaaaacaagctcccaactagatacaagtatccaaagaaacaaactaccagaaagagaaaccactttgaagacaactcttactctggatattaacagagaagccaggaagtgtcagttttcaggtcaggtgactcctttgaatccagattcttcatgtactgtgcttaagaagctagaaaagctgaatattgaaaaggagaaaaggcaaaagcagttacagcagcagaatgaaaaagaaatgatggaacagattcgtcagcagacagatattttagagaaggaacgcaaggctttcaagacaattgaacagtcacgaactgaggcctctctcttggcaccatccttttaccagtcaagacaaaaagtagagaggccatcttctctgcatatccaaaatactccaagtaagggagaagctggtgtactaggttccccatcagctcttgccacaaaagatagtccctccattcatttacccccaaaagaccgacctgttaccctgttctttgaaagaaaaggaagcccatgccaatctagaactgtcaaggaattaaccaagacagaaagaatgggtacccaacatgatgctgcctgtagactctccaataatcacaatacagaaagagaacactttaagtcaactcactcttacagccacagatctgatgacccttccagagagggaagttcgagacctattttcttcacaccaaaagacaatgtgattactccccttgtacacagtggaaatcctcaagtccacaaacaagatgaaccagcttggaaatctaagttagcagggcctgggcaacgagaggttgccagaccggcccataaaaagaaagctcgaatggcgcggacgcgctccgatttcttgactagaggtacttttgccgatggggagggggatacagaggaagatgattacgatgacattattgagccccttctctcccttgaccaagcttctcactctgagctagggcctgtatccagcctgggtcaggcctctcacagtgactccgaaatgacgtcacaacgattttcttcagttgatgaacaagcaaggcttcataaggctatgtctcaaggagagattacaaaattggcaggacgacagaagtcttcagatttggacataagaccccagagagcgaagatgagattctgggccaaagggaaacaaggagagaagaagactactagagtaaaacctgctccccagtcggaggtctcatcactctttgctggctcagatgtgacacctgttcatccattttctgatgagttaactcagtaccacccaacacctcctttgagtccagaactgcccgggagttgtcgaaaagagttcaaagagaataaggaaccatcgccaaaggcaaaacgcaagagaggtgtgaaaatcagcagtgtggccttggactctatgcactggcaaaatgactctgtccaaatcatagcaagtgccaacgatttaaaaagtatggatgagtttcttctgaaaaagatgaatgacctagataatgaagacagcaagaaggatacattagtggatgttgtatttaaaaaagccctcaaagaatttcggcaaaatatcttcagctcttactcgtctgcactggcgatggatgatgggaaaagcatacgctataaagatctgtatgcgctatttgaacagatcctggaaaagaccatgaggtttgagcaacgtgattggaatgaatctccagtgagagtttgggttaacacttttaaggtgtttttagatgaatacatgaatgaattcaagactttggatagcacagccccaaaggtgcttaaaacagaaagaaagaaaaggaggaaaaaggaaactgatttggtggaagagcacaatggccacatgtttaaggccacccagtacagcatccctacctactgtgaatactgttcttccttgatatggataatggacagagcctctgtttgcaaattgtgtaagtacgcttgccataagaagtgctgtctgaaaaccacagccaagtgttctaagaagtatgatccagagctgtcatctcggcaatttggggttgagctgtcccgtctgactagtgaagaccgagctgttcctttagtggtagagaagctcataaactacattgaaatgcatggactttatacagagggtatttaccgaaagtctggttcaactaataaaatcaaggagcttcgacaaggtctagatacagatgctgaaagtgtaaacctagatgactataacatacatgtcattgcaagtgtattcaaacaatggcttcgtgatttgcccaatccactcatgacttttgaactctatgaagaattccttcgagctatgggccttcaggaaagaaaggagacaatccgtggtgtgtactctgtaattgatcagctctcccggactcacctcagtacactggaacgccttatctttcatctagttaggattgctctacaggaagacactaatagaatgtctgctaatgctttggccatcgtgtttgcaccttgcattctccgttgccctgacactactgacccactacaaagtgttcaagatatcagtaagactaccacatgtgtggaactgatagttgtagaacaaatgaataaatacaaggctcgtctcaaagacatcagtagcctggaatttgctgaaaataaagcaaagaccagactatcactgattcgtagatcaatgaaacctgtcctaattgcagttagatttatgagcattacccgcagttcagtctcgggaaaggggcgtctacatcgaggaagccatccaaatccatcctcccctgttatagtccgattgccttccatgtctgatgtcccagaagagaccttgactagtgagacagccatggacactgacgtcacagaccagcagcaagcagcaatgcagcaggaggagaaagtactgactgagcagattgagaacctacagaaagaaaaggaagaactaacatttgagatgcttgtattggagcctcgtgcctctgatgatgaagcccttgagtctgaggcttctattgggactgctgatagctcggaaaatttgaatatggatcctgaagagagaagcttagcccttagctccctgaaagcagctggcaagtctgagccttcaagcaagtttcgaaagcagctaagaaagcagccagactctttggactcagtcagctcctccgtttcttcatgtctatcaaacactacatcatctcatggcactagaaagcgatttcagatttattccaagtctccattttaccgagctgcctcagcttgtgaggcccagggaatggaaggaccactaggccaagccaaatccctagaagacaggcctcagttcatcagcagaggaaccttcaaccctgaaaagggcaaacaaaaactaaagaatgtgaaaaactcacctcagaaaaccaaagagaccccagaggggacggtttcatctggccgaaagaaaactgtggactcagactgcagctccacacagcaactaccactgtttggaaataatgagtttatggtctaaatggacagaaatgtctccacatctcatctttggggcctcttctggtcaccttgtttgtaacagtcagtcctaatggtcctaccttgtcttcagctgacagtttgtgtgctggaacactgcacttctggcaaaagtggcctctttgaagtttgctagggatgggccagctgtgccttggctgctgtatttgatttgagattccactaaacaaagccacctgagacctgggtgattttggccaacagtagttgctctcgtgccgaattcgatatcagct

SEQ ID NO: 1353 - protein, 2627 aa, Rattus norvegicus
  misc_feature (1)..(2627): Xaa=Unknown amino acid
MNVSDGGRRRFEDNEHTLRIYPGTISEGTIYCPIPARKNSTAAEVIDSLINRLHLDKTKCYVLAEVKEFGGEEWILNPTDCPVQRMMLWPRMALENRLSGEDYRFLLREKNLDGSIHYGSLQSWLRVTEERRRMMERGFLPQPQQKDFDDLCSLPDLNEKTLLENLRNRFKHEKIYTYVGSILIAINPFKFLPIYNPKYVKMYDNHQLGKLEPHIYAVADVAYHAMLQRKKNQCIVISGESGSGKTQSTNFLIHHLTALSQKGFASGVEQIILGAGPVLEAFGNAKTAHNNNSSRFGKFIQVNYQETGTVLGAYVEKYLLEKSRLVYQEHNERNYHVFYYLLAGASEEERLAFHLKQPEEYHFLNQITKKPLRQSWDDYCYDSEPDCFTVEGEDLRHDFERLQLAMEMVGFLPKTRRQIFSLLSAILHLGNISYKKKTYRDDSIDICNPEVLPIVSELLEVKEEMLFEALVTRKTVTVGEKLILPYKLAEAVTVRNSMAKSLYSALFDWIVFRINHALLNSKDLEKDTKTLSIGVLDIFGFEDYENNSFEQFCINFANERLQHYFNQHIFKLEQEEYRTEGISWHNIDYIDNTCCINLISKKPTGLLHLLDEESNFPQATNQTLLDKFKHQHEENSYIEFPAVMEPAFIIKHYAGKVKYGVKDFREKNTDHMRPDIVALLRSSRNAFVSGMTGIDPVAVFRWAVLRAFFRAVVAFREAGKRHIQRKSGHDDTTPCTILKSMDSFSFLQHPVHQRSLEILQRCKEEKYSITRKNPRTPLSDLQGMNTLNEKNQHDTFDIAWNVRTGIRQSRLPTNNTSLLDKDGIFANSASSKLLERAHGILTRNKNFRSKPVLPKHLLEVNSLKHLTRLTLQDRITKSLLHLHKKKKPPSISAQFQVSLSKLMETLDQAEPYFVKCIRSNAEKLPLRFSDALVLRQLRYTGMLETVRIRQSGYSSKYSFQDFVSHFHVLLPQHIIPSKFNIQDFFRKININPDNYQVGKTMVFLKEHERQHLQDLLHQEVLRRIILLQRWFRVLLSRQQFLHLRQASVIIQRFWRNYLNQKQVRNAAVEKDAFIMASAASLLQASWRAHLERQRYLELRAAAVIIQQRWRELCRRRHRAATCIQSRWRGYRQSKKYKEQRNKIILLQSIYRGFRARQRYKALKEERLKETKLEHGLAQIKTCGPLEIQGSDPSEWEDRSFANRVKAIEECKSVIESNRISRESSMDFSKESPDKQQERGRSQSGTDLQGDVIVRQRPKSLEDLHQKKVGRAKRESRRMRELEQAIFSLELLKVRSLGGMSPSEERRWSTELMPEGLQSPQGTPDSESSQGSLELLTCDENQKSKPESLILDDGELKISSPSTFTNPKFDSQNNALSASSETSSTFSGKGASSDSEHLKNGTAEEKLVYSSQPITCKSQLRDSFVSSSLPTFFYIPHQEPLKTSSQLDTSIQRNKLPERETTLKTTLTLDINREARKCQFSGQVTPLNPDSSCTVLKKLEKLNIEKEKRQKQLQQQNEKEMMEQIRQQTDILEKERKAFKTIEQSRTEASLLAPSFYQSRQKVERPSSLHIQNTPSKGEAGVLGSPSALATKDSPSIHLPPKDRPVTLFFERKGSPCQSRTVKELTKTERMGTQHDAACRLSNNHNTEREHFKSTHSYSHRSDDPSREGSSRPIFFTPKDNVITPLVHSGNPQVHKQDEPAWKSKLAGPGQREVARPAHKKKARMARTRSDFLTRGTFADGEGDTEEDDYDDIIEPLLSLDQASHSELGPVSSLGQASHSDSEMTSQRFSSVDEQARLHKAMSQGEITKLAGRQKSSDLDIRPQRAKMRFWAKGKQGEKKTTRVKPAPQSEVSSLFAGSDVTPVHPFSDELTQYHPTPPLSPELPGSCRKEFKENKEPSPKAKRKRGVKISSVALDSMHWQNDSVQIIASANDLKSMDEFLLKKMNDLDNEDSKKDTLVDVVFKKALKEFRQNIFSSYSSALAMDDGKSIRYKDLYALFEQILEKTMRFEQRDWNESPVRVWVNTFKVFLDEYMNEFKTLDSTAPKVLKTERKKRRKKETDLVEEHNGHMFKATQYSIPTYCEYCSSLIWIMDRASVCKLCKYACHKKCCLKTTAKCSKKYDPELSSRQFGVELSRLTSEDRAVPLVVEKLINYIEMHGLYTEGIYRKSGSTNKIKELRQGLDTDAESVNLDDYNIHVIASVFKQWLRDLPNPLMTFELYEEFLRAMGLQERKETIRGVYSVIDQLSRTHLSTLERLIFHLVRIALQEDTNRMSANALAIVFAPCILRCPDTTDPLQSVQDISKTTTCVELIVVEQMNKYKARLKDISSLEFAENKAKTRLSLIRRSMKPVLIAVRFMSITRSSVSGKGRLHRGSHPNPSSPVIVRLPSMSDVPEETLTSETAMDTDVTDQQQAAMQQEEKVLTEQIENLQKEKEELTFEMLVLEPRASDDEALESEASIGTADSSENLNMDPEERSLALSSLKAAGKSEPSSKFRKQLRKQPDSLDSVSSSVSSCLSNTTSSHGTRKRFQIYSKSPFYRAASACEAQGMEGPLGQAKSLEDRPQFISRGTFNPEKGKQKLKNVKNSPQKTKETPEGTVSSGRKKTVDSDCSSTQQLPLFGNNEFMVX

SEQ ID NO: 1354 - DNA, 2257 bp, Homo sapiens
  ref <308>: DATABASE ACCESSION NUMBER: EMBL / AK001923
  ref <309>: DATABASE ENTRY DATE: 2002-08-06
aaagaaaagaaggaaaaaggaaactgatttggtggaagaacacaatggtcacatctttaaagccacccaatatagcatccctacatactgtgaatactgttcttctttgatatggataatggaccgagcctctgtttgcaaattatgcaagtatgcttgccataagaagtgctgtctgaaaaccacagccaagtgctctaaaaagtatgatccagagctgtcatctcgacaatttggggttgaactgtcccgtttgaccagtgaagaccgaactgttcctttagtagtggaaaagctcataaactacattgaaatgcatggactgtatacagaaggtatttatcgaaagtctggttcgactaataaaatcaaggagcttcggcagggtctagatacagatgctgagagtgtaaatctagatgactataacatacacgtcattgcaagtgtattcaaacaatggcttcgagatttgcccaatcctctcatgacctttgaactctatgaggaatttcttcgagctatgggccttcaggagaggaaggagacaatccgtggtgtatactctgtgattgatcaactctcccgaactcatctcaatacactggaacgcctcatctttcatctagtcaggattgctctgcaggaagacactaatcgaatgtctgctaatgctttggccattgtgtttgcgccctgcattctccgctgccctgacaccactgacccactacaaagtgtacaggacatcagtaagactaccacttgtgtggaactgattgttgtggaacaaatgaataaatacaaggctcgtctcaaagatatcagtagcttggaatttgctgagaataaggcaaagaccaggttgtcactgattcgtagatcaatgggaaaggggcgtattcgtcgaggaaactatccaggtccatcgtctcctgttgtagttcggttgccttctgtgtctgatgtctcagaggagaccttgactagtgaggcagccatggagactgacatcacagaacagcagcaagcagctatgcagcaggaggagagagtactgactgagcagattgagaacctacagaaggagaaggaggagctaacatttgagatgcttgtactggaaccccgtgcctctgatgatgaaacccttgagtctgaggcctccattgggactgctgatagctcagagaatttgaatatggagtctgaatatgctatctctgagaaatcagaaagaagcttagcccttagctccctgaagacagctggcaagtctgaaccttccagcaagttgcgaaagcaacttaaaaagcagcaagactctttagatgtcgtggactcttcggtctcctctttatgtctgtctaacacggcatcatctcatgggaccagaaaactatttcagatttattccaaatctccattctaccgagctgcctcaggtaatgaggccctgggaatggaaggaccattgggccagaccaaattcctggaagacaagcctcagttcatcagcagaggaaccttcaacccggaaaagggcaaacaaaaattaaagaatgtgaaaaactcacctcagaaaaccaaagagaccccagaggggacagtcatgtctggccgcagaaaaactgtggacccagactgcacctccaaccaacagctagcactctttggaaataatgaatttatggtctgaaccggcagatgtgtgtccctccgtggctacagagtggtaaacaaatctcacctttggggctgcgtttcatcacctcgtccacaatagtcaatcctaattgtggtcctgcctcttttctaagcatatggctaagactgtatgtgctgaattcctgggcctcctgcagaagcagaaagcctgctggggatggtgccagctgtgccttggctgttgtatttgaattgagatttttactatacaaagccacctagggcctggggatttgggtcagttgtagttgcctctcccccaccctcttttcccttcccaaaggtgggtgttgaactaggggggatattgctgtcctgagggaccctctcatttctgacatttgaagaaaacgtataaatctttcttaaccgtgaaagcaaaagcctttgggtttattttgggatagttaggagctagggtagaatataatttttttccaaaaacttacttacaaacaaaaagcctaatccctctattttaagatttctggaaaaacactccatgttatattctggggaaagcaaaaac

SEQ ID NO: 1355 - protein, 2548 aa, Homo sapiens
  ref <308>: DATABASE ACCESSION NUMBER: Refseq / NP_008832
  ref <309>: DATABASE ENTRY DATE: 2000-11-02
MNINDGGRRRFEDNEHTLRIYPGAISEGTIYCPIPARKNSTAAEVIESLINKLHLDKTKCYVLAEVKEFGGEEWILNPTDCPVQQMMLWPRMALENRLSGEDYRFLLREKNLDGSIHYGSLQSWLRVTEERRRMMERGFLPQPQQKDFDDLCSLPDLNEKTLLENLRDRFKHEKIYTYVGSILIVINPFKFLPIYNPKYVKMYDNHQLGKPEPHIYAVADVAYHAMLQRKKNQCIVISGESGSGKTQSTNFLIHHLTALSQKGFASGVEQIILGAGPVLEAFGNAKTAHNNNSSRFGKFIQVNYQETGTVLGAYVEKYLLEKSRLVYQEHNERNYHVFYYLLAGASEDERSAFHLKQPEEYHYLNQITKKPLRQSWDDYCYDSEPDCFTVEGEDLRHDFERLQLAMEMVGFLPKTRRQIFSLLSAILHLGNICYKKKTYRDDSIDICNPEVLPIVSELLEVKEEMLFEALVTRKTVTVGEKLILPYKLAEAVTVRNSMAKSLYSALFDWIVFRINHALLNSKDLEHNTKTLSIGVLDIFGFEDYENNSFEQFCINFANERLQHYFNQHIFKLEQEEYRTEGISWHNIDYIDNTCCINLISKKPTGLLHLLDEESNFPQATNQTLLDKFKHQHEDNSYIEFPAVMEPAFIIKHYAGKVKYGVKDFREKNTDHMRPDIVALLRSSKNAFISGMIGIDPVAVFRWAILRAFFRAMVAFREAGKRNIHRKTGHDDTAPCAILKSMDSFSFLQHPVHQRSLEILQRCKEEKYSITRKNPRTPLSDLQGMNALNEKNQHDTFDIAWNGRTGIRQSRLSSGTSLLDKDGIFANSTSSKLLERAHGILTRNKNFKSKPALPKHLLEVNSLKHLTRLTLQDRITKSLLHLHKKKKPPSISAQFQASLSKLMETLGQAEPYFVKCIRSNAEKLPLRFSDVLVLRQLRYTGMLETVQIRQSGYSSKYSFQDFVSHFHVLLPRNIIPSKFNIQDFFRKINLNPDNYQVGKTMVFLKEQERQHLQDLLHQEVLRRIILLQRWFRVLLCRQHFLHLRQASVIIQRFWRNYLNQKQVRDAAVQKDAFVMASAAALLQASWRAHLERQRYLELRAAAIVIQQKWRDYYRRRHMAAICIQARWKAYRESKRYQEQRKKIILLQSTCRGFRARQRFKALKEQRLRETKPEVGLVNIKGYGSLEIQGSDPSEWEDCSFDNRIKAIEECKSVIESNRISRESSVDCLKESPNKQQERAQSQSGVDLQEDVLVRERPRSLEDLHQKKVGRAKRESRRMRELEQAIFSLELLKVRSLGGISPSEDRRWSTELVPEGLQSPRGTPDSESSQGSLELLSYEESQKSKLESVISDEGDLQFPSPKISSSPKFDSRDNALSASNETSSAEHLKDGTMKEMVVCSSESITCKPQLKDSFISNSLPTFFYIPQQDPLKTNSQLDTSIQRNKLLENEDTAGEALTLDINRETRRYHCSGKDQIVPSLNTESSNPVLKKLEKLNTEKEERQKQLQQQNEKEMMEQIRQQTDILEKERKAFKTIEKPRIGECLVAPSSYQSKQRVERPSSLLSLNTSNKGELNVLGSLSLKDAALAQKDSSSAHLPPKDRPVTVFFERKGSPCQSSTVKELSKTDRMGTQLNVACKLSNNRISKREHFRPTQSYSHNSDDLSREGNARPIFFTPKDNMSIPLVSKEALNSKNPQLHKEDEPAWKPVKLAGPGQRETSQRFSSVDEQAKLHKTMSQGEITKLAVRQKASDSDIRPQRAKMRFWAKGKQGEKKTTRVKPTTQSEVSPLFAGTDVIPAHQFPDELAAYHPTPPLSPELPGSCRKEFKENKEPSPKAKRKRSVKISNVALDSMHWQNDSVQIIASVSDLKSMDEFLLKKVNDLDNEDSKKDTLVDVVFKKALKEFRQNIFSFYSSALAMDDGKSIRYKDLYALFEQILEKTMRLEQRDSLGESPVRVWVNTFKVFLDEYMNEFKTSDCTATKVPKTERKKRRKKETDLVEEHNGHIFKATQYSIPTYCEYCSSLIWIMDRASVCKLCKYACHKKCCLKTTAKCSKKYDPELSSRQFGVELSRLTSEDRTVPLVVEKLINYIEMHGLYTEGIYRKSGSTNKIKELRQGLDTDAESVNLDDYNIHVIASVFKQWLRDLPNPLMTFELYEEFLRAMGLQERKETIRGVYSVIDQLSRTHLNTLERLIFHLVRIALQEDTNRMSANALAIVFAPCILRCPDTTDPLQSVQDISKTTTCVELIVVEQMNKYKARLKDISSLEFAENKAKTRLSLIRRSMGKGRIRRGNYPGPSSPVVVRLPSVSDVSEETLTSEAAMETDITEQQQAAMQQEERVLTEQIENLQKEKEELTFEMLVLEPRASDDETLESEASIGTADSSENLNMESEYAISEKSERSLALSSLKTAGKSEPSSKLRKQLKKQQDSLDVVDSSVSSLCLSNTASSHGTRKLFQIYSKSPFYRAASGNEALGMEGPLGQTKFLEDKPQFISRGTFNPEKGKQKLKNVKNSPQKTKETPEGTVMSGRRKTVDPDCTSNQQLALFGNNEFMV

SEQ ID NO: 1356 - DNA, 3166 bp, Rattus norvegicus
  ref <308>: DATABASE ACCESSION NUMBER: EMBL / AJ001929
  ref <309>: DATABASE ENTRY DATE: 1999-01-21
tagaattcagcggccgctaaattctaggtggccacggaatcctgcggcgtggagctccggggaaaactcagtcaaccatggacctgcgtcagtttcttatgtgcctgtccctgtgcacggcctttgctttgagcaagcctacagaaaagaaggaccgagtacaccatgaacctcagctcagcgacaaagttcacaacgatgctcagaatttcgactatgaccatgatgccttcttgggagcagaagaggcaaagagttttggtcagctgacaccagaagagagcaaggaaaagcttggaatgattgtagataaaatagacaccgataaagatgggtttgtgaccgagggcgagctgaagagccggatcaagcacgcccagaagaaatacatatatgacaatgttgaaaaccagtggcaggagtttgatatgaatcaagacggcttaatctcctgggatgagtacagaaacgtgacttatggcacttacctggatgatccagaccctgatgatggatttaattataaaccgattatggttagagatgagcggaggttcaaaatggccgaccaagatggagaccttattgccacaaaggaggagtttaccgcttttctgcaccctgaggaatatgactacatgaaagacatagtcctgcaggaaaccatggaggatatagaccagaatgctgatggttttattgatctagaagagtatattggtgacatgtacagtcatgatgggaatgctgatgaaccccagtgggttaagacagagcgggagcagttcgttgagtttcgagataagaaccgggatggaaagatggacaaggaagagaccaaagactggatcctcccttcagactatgaccatgcagaggccgaagccaggcatctcgtctatgagtccgaccaagacaaggatggcaagctcaccaaggaggagattgtcgacaagtatgatttatttgtgggcagccaggccacagatttcggggaggccttagtacgacacgatgagttctaagctgcaaacagaggagccttcatttcttcaaaagtaatttatttttacaggtctggtttcacataaaattgtttgcgctactgagactgttattacaaactttttaagacgtgaaaaggcatatcgagatagtgaaatcacccgcccccattcctcctccctctgaggggctggaaggaacccatgcttctgaggaacaactctgattagtacacttgtgtctgtaggtttacactttgtataatgtataacatggtgtgtttatttttgtattgttctctagttgggagtataatatgaaggatggagatcctcaacccacacttgtaggcatacattagccatttacactttctcaatcccttaccacattttttttttaataattctcacttaactaattttttaaagcctaagatcaataagaaatgttcaggagagaaaaagcagaaggaaagcatgtacttcgtgatttacgttcagagagagaatgcttcatcttgcttgttgagaagtctcatttcatgagtagctgttcagttgtcacaggcccagccacggagcctgccattgtctgggcaaggacagagtcctccgctgtaagacagcgtcacgcagctccacttcactcttcccctcaggactagctgtttgctaattttgtcaagcacagctgtggtaggaagaattagggcccagtgtcttgaaaaatcaaccaagtagtgtgtatgatgtcttcacagggctatttctagctctttctagagctgtttctaaccagaaacagctggaaaacaaaaagaacaaagtgtatgcagggcatgcatctcattcttagtgaaatcactacaaggacccatcccagcccctttctaagtcttaaccttgggttttactgcagtttaaattgattcttttcccatcatgacattgaaagttgccctttaacaggaaaaatggtcaccgaatgagaattgggactcaagaataacgaatttggggcgcccttacgttgaaagcatttgaacctccctgataccgaaggggattcccctccccgcctttttctcttgtaaacaggaagtaaatagcattattagttaaagcttggttgcagtgttcttatcttgtgggctggtttctaaaacctcatgctgctgatttgaccagggcatcctcatacctcagatgcaaaccactcttctaccgggcctctgtttaccggagctttgcctcaaggatagaaggctgtacagaggggctctttggtttgaggaccactgctcacccttcctgtcattaacctgtcacaccccattttatcatctccctttctctctgacacacaaaggtggggtacgtgggagggtcgtggattattcttattaaaaaacaaaatcatctgttgccaaccccatttacccatctttggtctcttactgatgggcctcttaagaattattgtattccaagtctttaaccctcatgttactaatgtaaatatacatctgggcagtctttattacttcctgtatctctgagtaatacatcaagctggtgctgggtgatggtcatatctgaacctagacctccccgtgggtcttccacaatcctgttgatgtgggctgcttggtgtggtaaaaagcccagtcgtggtgtaacttaaccttggcgattgcatcaagcttcttgatagcagatacactctaaggttttagccccagtagaggtgaaatgaacatccctcactgccttccccagatcctcaactctccattgttaaggagaccagagataattaatgccaccaaccctggcttagaaagggtacgtcatacactgtgtagcaagagggcattacagagcctaacgctggcgtgaaaatcatgtacttagccagcaagtgagtctgcgagggtggcgtagtctggacagggtgttcagcatcgggaactgtgctctcaggtccataagctccacatagtgttggggtttgggtttgggtttctggttgaatttgagtatttgttctttttttatagagtgtaaaccaagttttatattctgtaatgcaaacaggtacctgtcgttttttgaataaaactgtttacatccaaaaaaaaaaaaaaaaaaaaaaaaaa

SEQ ID NO: 1357 - protein, 315 aa, Rattus norvegicus
  ref <308>: DATABASE ACCESSION NUMBER: SWISS-Prot / CAA05100
  ref <309>: DATABASE ENTRY DATE: 2003-02-01
MDLRQFLMCLSLCTAFALSKPTEKKDRVHHEPQLSDKVHNDAQNFDYDHDAFLGAEEAKSFGQLTPEESKEKLGMIVDKIDTDKDGFVTEGELKSRIKHAQKKYIYDNVENQWQEFDMNQDGLISWDEYRNVTYGTYLDDPDPDDGFNYKPIMVRDERRFKMADQDGDLIATKEEFTAFLHPEEYDYMKDIVLQETMEDIDQNADGFIDLEEYIGDMYSHDGNADEPQWVKTEREQFVEFRDKNRDGKMDKEETKDWILPSDYDHAEAEARHLVYESDQDKDGKLTKEEIVDKYDLFVGSQATDFGEALVRHDEF

SEQ ID NO: 1358 - DNA, 891 bp, Homo sapiens
  ref <308>: DATABASE ACCESSION NUMBER: EMBL / AF257659
  ref <309>: DATABASE ENTRY DATE: 2000-06-23
aagcctacagaaaagaaggaccgtgtacatcatgagcctcagctcagtgacaaggttcacaatgatgctcagagttttgattatgaccatgatgccttcttgggtgctgaagaagcaaagacctttgatcagctgacaccagaagagagcaaggaaaggcttggaatgattgtagataaaatagacgcggataaagatgggtttgtgacggagggggagctgaaatcctggattaagcacgcccagaagaaatacatatatgacgatgttgaaaaccaatggcaggagtttgatatgaatcaagacggcttaatctcctgggatgagtacagaaacgtgacttatggcacttacctggatgatccagatcctgatgatggatttaactataaacagatgatggttagagatgagcggaggtttaaaatggcagacaaggatggagacctcattgccaccaaggaggagttcacagctttcctgcaccctgaggagtatgactacatgaaagatatagtagtacaggaaacaatggaagatatagataagaatgctgatggtttcattgatctagaagagtatattggtgacatgtacagccatgatgggaatactgatgagccagaatgggtaaagacagagcgagagcagtttgttgagtttcgggataagaaccgtgatgggaagatggacaaggaagagaccaaagactggatccttccctcagactatgatcatgcagaggcagaagccaggcacctggtctatgaatcagaccaaaacaaggatggcaagcttaccaaggaggagatcgttgacaagtatgacttatttgttggcagccaggccacagattttggggaggccttagtacgacacgatgagttctaa

SEQ ID NO: 1359 - protein, 315 aa, Homo sapiens
  ref <308>: DATABASE ACCESSION NUMBER: SWISS-Prot / O43852
  ref <309>: DATABASE ENTRY DATE: 2002-06-15
MDLRQFLMCLSLCTAFALSKPTEKKDRVHHEPQLSDKVHNDAQSFDYDHDAFLGAEEAKTFDQLTPEESKERLGKIVSKIDGDKDGFVTVDELKDWIKFAQKRWIYEDVERQWKGHDLNEDGLVSWEEYKNATYGYVLDDPDPDDGFNYKQMMVRDERRFKMADKDGDLIATKEEFTAFLHPEEYDYMKDIVVQETMEDIDKNADGFIDLEEYIGDMYSHDGNTDEPEWVKTEREQFVEFRDKNRDGKMDKEETKDWILPSDYDHAEAEARHLVYESDQNKDGKLTKEEIVDKYDLFVGSQATDFGEALVRHDEF

SEQ ID NO: 1360 - DNA, 2036 bp, Rattus norvegicus
  ref <308>: DATABASE ACCESSION NUMBER: EMBL / AJ004858
  ref <309>: DATABASE ENTRY DATE: 1998-09-24
gacttttttgcagaagaagggcgcgcgcctgggagtgctttggggtcccggcgcttgcggcggctgccaggagttggagagcgagaaattaaagcgattgagagagagagcgcgcgcggttccgggcccgccgccgcttcttttccggtcgccgcagccgccgccgcagcagggaacgggaccgggggggaggggggcagccgcggacccgcggggccaaggactttgcaacttgccggagaaggtggaggggcgggagggggaggggcgcccgcgcaggagaccgagcgcccagccccgccgcggaccatggtgcagcaggccgagagctcggaagccgagagcaacctgccccgggacgcgctggacaccgaggagggcgagttcatggcgtgcagcccggtggccctggatgagagcgacccggactggtgcaagacggcgtcgggccacatcaaacggcccatgaacgccttcatggtgtggtccaagatcgagcgcaggaagatcatggagcagtcgcccgacatgcataacgccgagatctccaagaggctgggcaagcgttggaagatgctgaaggacagcgagaagatcccgttcatccgggaggcggagcgcctgcgcctcaagcacatggctgattatcccgactacaagtaccggccgcgcaaaaagcccaagacggacccagccgccaagcccagcgcgggccagagcccggacaagagcgcggcgggcgctaaggcagccaagggcccgggcaagaagtgcgccaagctcaaggcgcctgcgggcaaggcgggcgcaggcaaggcggcgcagcctggggactgcggcgcgggcaaggcagccaagtgcgtcttcctggacgacgatgatgaagaggacgacgaggacgacgagctgcagctacggcccaagccggacgcagacgacgacgacgacgagcccgcgcactcgcacctgctgccgccaccggcgcagcagcagccccctcagctgctgaggcgctacagcgtggccaaggtgcccgccagccccacgctcagcagtgccgccgagtcccccgagggcgcgagcctttacgacgaagtgcgcgcgggcggccggctctactacagcttcaagaacatcaccaagcagcagcctccgcccgcgcctcccgcgctgtcgcccgcgtcctcgcgctgcgtgtccacctcctcatccagcggcagcagcagcggcagcggcgccgaggatgccgacgacctcatgttcgacctgagcttgaatttctcccagggcgcgcacagcgcctgcgagcagccactgggcgcgggagcggcggggaacctgtccctgtcgctggtggataaggacctggattccttcagcgagggcagcctgggctcccacttcgagttccccgactactgcacgccggagctgagcgagatgatcgcgggggactggctggaggcgaacttctccgacctggtgttcacgtattgaggggcacagggctcctcgggaggcagtcgtggcggtcaggataaagaggatggtggggggagggggagaagatgctcatggtcagagatgtggcgcagagaaattggaaacggtgatgaaatgttggagttaaagtgaaatgagtagttttaaacagattttccaggtttttttttttaatcttttaatttttaaaaaaattttttggtctccccactcttcccttcctttatcgtgtctcaaggtagttgcacacctagtctggattgtgatttcccccacccgtaaaaaaatcgtgttttgtaatttctatttctttttcctgaaattcgtgattgcaacaaaggcggaggggaccgggcgggggaggggaggaggccccgctccggaaggcgctgtttgaagctcgtggctctttgaagtctgaaagacgtcggcagaggaccctttagacggcacaactgttactctagggagttgatatttttttttcttaagagatttaaaaaggaactggtgatttaaaaaaaaaaaaaaaa

SEQ ID NO: 1361 - protein, 396 aa, Rattus norvegicus
  misc_feature (1)..(396): Xaa=Unknown amino acid
MVQQAESSEAESNLPRDALDTEEGEFMACSPVALDESDPDWCKTASGHIKRPMNAFMVWSKIERRKIMEQSPDMHNAEISKRLGKRWKMLKDSEKIPFIREAERLRLKHMADYPDYKYRPRKKPKTDPAAKPSAGQSPDKSAAGAKAAKGPGKKCAKLKAPAGKAGAGKAAQPGDCGAGKAAKCVFLDDDDEEDDEDDELQLRPKPDADDDDDEPAHSHLLPPPAQQQPPQLLRRYSVAKVPASPTLSSAAESPEGASLYDEVRAGGRLYYSFKNITKQQPPPAPPALSPASSRCVSTSSSSGSSSGSGAEDADDLMFDLSLNFSQGAHSACEQPLGAGAAGNLSLSLVDKDLDSFSEGSLGSHFEFPDYCTPELSEMIAGDWLEANFSDLVFTYX

SEQ ID NO: 1362 - DNA, 177 bp, Homo sapiens
  ref <308>: DATABASE ACCESSION NUMBER: EMBL / X73039
  ref <309>: DATABASE ENTRY DATE: 1993-06-16
atggtgtggagctccgctcagcgccgccagatggcgcacgagaaccccaagatgcacaactccgagatctccaagcgcctgggcgcgcagtggaagctgctggacgaggacgagaagcggcccttcgtggaggaggccaagcggctccgcgcccgacacctgcgcgactatccagac

SEQ ID NO: 1363 - protein, 441 aa, Homo sapiens
  ref <308>: DATABASE ACCESSION NUMBER: PIR / S34118
  ref <309>: DATABASE ENTRY DATE: 1999-09-24
MVQQAESLEAESNLPREALDTEEGEFMACSPVALDESDPDWCKTASGHIKRPMNAFMVWSKIERRKIMEQSPDMHNAEISKRLGKRWKMLKDSEKIPFIREAERLRLKHMADYPDYKYRPRKKPKMDPSAKPSASQSPEKSAAGGGGGSAGGGAGGAKTSKGSSKKCGKLKAPAAAGAKAGAGKAAQSGDYGGAGDDYVLGSLRVSGSGGGGAGKTVKCVFLDEDDDDDDDDDELQLQIKQEPDEEDEEPPHQQLLQPPGQQPSQLLRRYNVAKVPASPTLSSSAESPEGASLYDEVRAGATSGAGGGSRLYYSFKNITKQHPPPLAQPALSPASSRSVSTSSSSSSGSSSGSSGEDADDLMFDLSLNFSQSAHSASEQQLGGGAAAGNLSLSLVDKDLDSFSEGSLGSHFEFPDYCTPELSEMIAGDWLEANFSDLVFTY

SEQ ID NO: 1364 - DNA, 1314 bp, Rattus norvegicus
  ref <308>: DATABASE ACCESSION NUMBER: EMBL / AJ004912
  ref <309>: DATABASE ENTRY DATE: 1999-06-21
atgtctggtttgtctggcccactatcctggcctggccctctcctatccgccttgctctttctgttccttctcggccccagctcggtcctcggcatctccttccatctacccgtgaactctcgcaagtgtctccgcgaggagatccacaaagacttgctggttacgggcgcgtacgagatcaccgaccagtctgggggcgctggcggcctgcgcacccacctcaagatcacagattctgctggccatattctgtatgccaaagaggatgcaactaaagggaagtttgcctttaccacagaagactatgacatgtttgaagtatgctttgagagcaagggaacagggcggatacctgaccaactagtgattctagacatgaagcatggagtagaggcgaaaaattatgaagagatcgcaaaagttgagaaactcaaaccactggaggtggagctacggcgcctcgaggacctttcagagtctattgttaacgactttgcctacatgaagaagcgggaagaggagatgagggacaccaacgagtccacaaacacccgcgtcctgtacttcagcatcttttccatgttctgcctcattggactagccacctggcaggtcttctacctgcgtcgcttcttcaaggccaagaagttgatagagtaatgaggctcagtcttctgtcccctggagccagcagaacatcgctgggacgtgcctggcctagcccaaggccaagttactaacagtatatcaaggcgcacgtgagcatcttgccagaactgatccttctggtgtgggagagcatgggcaccacccacacccagcaagtcagagaggactttttaatgcagtaggatttggactggtttgcaacaagattattaaagtcgcctatggaaaaacaaaacaaaacaaaacaacaaacaggggttacctagataacgccaaagccagcattcgtcctgggtcgcctcacaggatcggtttgagctgtttgctttttctctcccacttgctcaccgccttggtcctccactctagttctcctccaagatttctctgacctcggtcagctccttcatatcagttgtctctttggtttccttgtgaaacaccttgaacttctcttggtccttagatgaaatgtttacagagcttctggtgatatccttcataattttatgtcttctaaaagggtcatgggtgggacacaaaacaaagtgagctttgaactgtagataatctcttaaaagaaaatctcattttagaccattaaaatgtttgtgctcaaaaaaaaaaaaaaaaaaaaaaaaaaaa

SEQ ID NO: 1365 - protein, 203 aa, Rattus norvegicus
  ref <308>: DATABASE ACCESSION NUMBER: SWISS-Prot / Q63584
  ref <309>: DATABASE ENTRY DATE: 2001-10-16
ALLFLFLLGPSSVLGISFHLPVNSRKCLREEIHKDLLVTGAYEITDQSGGAGGLRTHLKITDSAGHILYAKEDATKGKFAFTTEDYDMFEVCFESKGTGRIPDQLVILDMKHGVEAKNYEEIAKVEKLKPLEVELRRLEDLSESIVNDFAYMKKREEEMRDTNESTNTRVLYFSIFSMFCLIGLATWQVFYLRRFFKAKKLIE

SEQ ID NO: 1366 - DNA, 690 bp, Homo sapiens
  ref <308>: DATABASE ACCESSION NUMBER: EMBL / X97442
  ref <309>: DATABASE ENTRY DATE: 1996-08-16
tctccagcaccatgtctggtttgtctggcccaccagcccggcgcggcccttttccgttagcgttgctgcttttgttcctgctcggccccagattggtccttgccatctccttccatctgcccattaactctcgcaagtgcctccgtgaggagattcacaaggacctgctagtgactggcgcgtacgagatctccgaccagtctgggggcgctggcggcctgcgcagccacctcaagatcacagattctgctggccatattctctactccaaagaggatgcaaccaaggggaaatttgcctttaccactgaagattatgacatgtttgaagtgtgttttgagagcaagggaacagggcggatacctgaccaactcgtgatcctagacatgaagcatggagtggaggcgaaaaattacgaagagattgcaaaagttgagaagctcaaaccattagaggtagagctgcgacgcctagaagacctttcagaatctattgttaatgactttgcctacatgaagaagagagaagaggagatgcgtgataccaacgagtcaacaaacactcgggtcctatacttcagcatcttttcaatgttctgtctcattggactagctacctggcaggtcttctacctgcgacgcttcttcaaggccaagaaattgattgagtaatgaatgaggtgcctggcct

SEQ ID NO: 1367 - protein, 219 aa, Homo sapiens
  ref <308>: DATABASE ACCESSION NUMBER: SWISS-Prot / P49755
  ref <309>: DATABASE ENTRY DATE: 2002-06-15
MSGLSGPPARRGPFPLALLLLFLLGPRLVLAISFHLPINSRKCLREEIHKDLLVTGAYEISDQSGGAGGLRSHLKITDSAGHILYSKEDATKGKFAFTTEDYDMFEVCFESKGTGRIPDQLVILDMKHGVEAKNYEEIAKVEKLKPLEVELRRLEDLSESIVNDFAYMKKREEEMRDTNESTNTRVLYFSIFSMFCLIGLATWQVFYLRRFFKAKKLIE

SEQ ID NO: 1368 - DNA, 1282 bp, Rattus norvegicus
  ref <308>: DATABASE ACCESSION NUMBER: EMBL / AJ005046
  ref <309>: DATABASE ENTRY DATE: 1998-11-02
ccttgagagagcaaggattcctacgagagaaaggagctttgaagtttcacttgccacaatgacggacagaagcccctttgagacagacatgctgaccctgacccgttacgttatggaaaaggggcgacaggccaaagggaccggagaactcacccagctgctcaactcgatgctgactgccatcaaagccatctcttccgctgtgcgaaaggccggcctggccaacctgtatgggattgcgggaagcgtgaatgtgacaggggatgaggtgaagaaactggatgtgctgtccaattccctggtgatcaacatgcttcagtcctcctacagcacctgtgtgcttgtctcagaagagaataaagaggctgtgatcacagccaaggagaggagggggaaatatgtggtttgctttgacccactggatggatcttcaaacattgactgcctggcttccattggaactatatttgctatctacagaaagaccacagaggatgagccttccgagaaggatgccttgcagcctggacgcaatatcgtggctgcaggttatgcactgtatggtagtgcaaccctggtggctctttctacagggcaaggagtggatctcttcatgctggacccggctcttggagaattcgtgctagtggaaaaagatatccggattaagaagaaagggaaaatttttagcctcaatgagggctatgccaagtattttgatgctgctaccgctgagtatgtacagaaaaagaagttccctgaggatggcagtgcaccttacggggcaaggtacgtgggttccatggtggctgatgtgcatcgcaccctggtctatggaggaatcttcatgtacccagccaaccagaagagtcctaatggcaagctccggctcctgtatgaatgcaatcctgtagcctatatcattgagcaggcaggaggcatggcaaccacaggcacccagccggtactggatgtaaagcctgagagcattcaccagcgagtccccctcattctggggtccccggaagatgtgcaagaatatctcagctgtgtgcaaagaaaccaggcaggcaggtagtgatcctgaactcatgagcccacttccctttgtctttgacaaatgaaaaactagatgaatggagatgggggtaaagacaagcatgccacgctcaacaggttaccttcagaacagcgcttagctggcaagcacagggttagaagccagaggtaaagatatgattgaagggctaaaataaaaatatgaatgtgaaaaaaaaaaaaa

SEQ ID NO: 1369 - protein, 339 aa, Rattus norvegicus
  ref <308>: DATABASE ACCESSION NUMBER: SWISS-Prot / CAA06313
  ref <309>: DATABASE ENTRY DATE: 2001-12-01
MTDRSPFETDMLTLTRYVMEKGRQAKGTGELTQLLNSMLTAIKAISSAVRKAGLANLYGIAGSVNVTGDEVKKLDVLSNSLVINMLQSSYSTCVLVSEENKEAVITAKERRGKYVVCFDPLDGSSNIDCLASIGTIFAIYRKTTEDEPSEKDALQPGRNIVAAGYALYGSATLVALSTGQGVDLFMLDPALGEFVLVEKDIRIKKKGKIFSLNEGYAKYFDAATAEYVQKKKFPEDGSAPYGARYVGSMVADVHRTLVYGGIFMYPANQKSPNGKLRLLYECNPVAYIIEQAGGMATTGTQPVLDVKPESIHQRVPLILGSPEDVQEYLSCVQRNQAGR

SEQ ID NO: 1370 - DNA, 1332 bp, Homo sapiens
  ref <308>: DATABASE ACCESSION NUMBER: Refseq / NM_003837
  ref <309>: DATABASE ENTRY DATE: 2002-11-05
gctgcagccctcagaagtaagcaaggtttcctgccgggagaaaaggatttgaagcattccagccaaaatgacggacagaagccccttcgaaaccgacatgctcaccctgacccgctacgttatggaaaaggggcgtcaggccaaagggactggggagctcacccagctgctgaactcaatgctgacggccatcaaagccatctcctcggctgtgcgcaaggccggtctggcccacctgtatggaatcgcaggaagcgttaacgtgacgggagatgaggtgaagaaactggatgtgctatccaattccctggtgatcaacatgctccaatcctcctatagtacctgcgtcctggtctcagaagagaataaggacgccatcatcaccgccaaggagaagcgggggaaatacgtggtctgctttgacccactggatggatcttccaatattgactgcctggcctccatcggaaccatctttgccatctatagaaagacctcagaggatgagccttctgaaaaggatgccctgcagtgtggccgcaatattgtggccgcaggttatgcgctgtacggtagtgcaaccctggtggctctctccacagggcaaggcgtggacctcttcatgcttgacccggctcttggtgaatttgtcctggtggaaaaagatgtcaagattaagaagaaaggaaagatttacagcctgaatgagggctatgccaagtattttgatgcggccaccactgaatatgtgcagaaaaagaaattccctgaggatggcagtgctccctatggggccaggtatgtgggctccatggtggctgacgtgcaccgcaccctggtctatggaggaatcttcctgtacccagccaaccagaagagccctaagggcaagctccggctcctgtatgaatgcaatcccgtggcctacatcattgagcaggcaggaggcttggcgaccacggggacccagcctgtactggacgtgaagcccgaggcaattcaccagcgagtccccctcattctggggtcaccagaggatgtgcaggaatatctcacctgtgtgcagaaaaatcaggcaggcagctagcgagtttgaccccacatgccctcttctgtttgttttgcaccttgtctaaggaccctaaatgaacgataaacagagatggtagctatgagtatgcaaaaggtaaatccacttaatcacatacagaagagcaacaacaaactgcttacgacaggtttggaagccacaggcgattctatggtcaatgtgaaggactagaaataaaaacccacatgtggaaaaaaaaaaaaaaaaaaaaaaaaaaaaaa

SEQ ID NO: 1371 - protein, 339 aa, Homo sapiens
  ref <308>: DATABASE ACCESSION NUMBER: SWISS-Prot / O00757
  ref <309>: DATABASE ENTRY DATE: 2002-06-15
MTDRSPFETDMLTLTRYVMEKGRQAKGTGELTQLLNSMLTAIKAISSAVRKAGLAHLYGIAGSVNVTGDEVKKLDVLSNSLVINMLQSSYSTCVLVSEENKDAIITAKEKRGKYVVCFDPLDGSSNIDCLASIGTIFAIYRKTSEDEPSEKDALQCGRNIVAAGYALYGSATLVALSTGQGVDLFMLDPALGEFVLVEKDVKIKKKGKIYSLNEGYAKYFDAATTEYVQKKKFPEDGSAPYGARYVGSMVADVHRTLVYGGIFLYPANQKSPKGKLRLLYECNPVAYIIEQAGGLATTGTQPVLDVKPEAIHQRVPLILGSPEDVQEYLTCVQKNQAGS

SEQ ID NO: 1372 - DNA, 3933 bp, Rattus norvegicus
  ref <308>: DATABASE ACCESSION NUMBER: EMBL / AJ005113
  ref <309>: DATABASE ENTRY DATE: 1999-01-07
gaattcggcctaggagtaaggcacggcctcttctacgctagcccctttgccatgggtttcctgaaactgattgagattgagaactttaaatcgtacaagggtcgacaaattatcggaccatttcagaggttcaccgccatcattggacccaatggctctggtaagtcaaatctcatggatgccatcagctttgtgcttggtgaaaaaaccagcaacctgagggtaaagaccctgagggacctgatacacggagctcctgtgggcaagccggctgccaaccgagcctttgtcagcatggtctactccgaggagggtgctgaggaccgcacctttgcccgagtcattgtagggggctcttctgagtacaagatcaataacaaagttgtccagctacatgaatacagtgaagagttagagaagttgggcattctcatcaaagctcgtaacttcctcgtcttccagggtgcagtggaatctattgccatgaagaaccccaaggagaggacagctttatttgaagaaattagtcgctctggggaacttgcacaggagtatgacaagcgaaagaaagaaatggtgaaggctgaagaagacacacagtttaattatcatcgcaagaaaaatattgcagctgaacgcaaggaggccaaacaagaaaaggaagaggctgaccgctaccaggccctgaaggatgaggtagtacgcgcacaggtacaattgcagctttttaaactctaccacaacgaagtggagattgagaagctcaacaaggaactggcctcgaagaacaaggaaattgagaaggacaaaaagcggatggacaaggtagaggatgaactgaaggagaagaagaaagagctgggcaaaatgatgcgggaacagcagcagattgagaaggagatcaaggaaaaggactcagaattgaatcagaagaggcctcagtacatcaaagcaaaagagaatacatcccacaaaatcaagaagcttgaagcagccaagaaatctctgcagaatcgtcagaaacattataagaaacgtaaaggtgacatggatgagctggagaaagagatgctgtcagtggagaaggcccgacaggagtttgaagagcggatggaggaagagagtcagagtcaaggcagagacttgaccctggaggagaaccaggtaaagaaataccaccgattaaaagaggaagctagcaagagagcagccactttggctcaggagctggagaagtttaatcgagaccagaaagctgaccaggaccgtctagatctagaagagcggaagaaagtagagacagaggccaagatcaagcaaaaactgcgggagattgaagagaatcagaaacggattgagaagctagaggaatatattaccactagcaagcagtctctagaggaacagaagaagctagagggagaattgacagaagaagtagagatggccaagcgtcgtattgatgagatcaataaggagctgaaccaggtgatggagcaattgggggatgcgcgcattgaccggcaggagagcagccgccagcagaggaaggcagaaataatggaaagcatcaagcgtctctaccctggttctgtgtatggccgcctcattgacctctgccagcctacacaaaagaagtatcagattgctgtgaccaaggttttaggaaagaacatggatgctattattgtagactccgagaagacaggtcgggattgtattcagtatatcaaggagcaacgtggagagcctgagaccttcttgcctcttgactacctggaggtgaaacctactgatgagaaactccgagaactgaagggggccaagctagtgattgatgtgattcgctatgagccacctcacatcaaaaaagctctgcagtatgcttgtggcaatgcccttgtttgtgacaatgtggaggatgcgcgacgaattgcctttggaggtcaccaacgccacaagacagtggcattggatggcaccctgttccagaagtcaggagttatctctggtggagccagtgatctcaaggcaaaggcacgacgctgggatgagaaggcagtagacaaactaaaagaaaaaaaagaacgtttgacggaggagctaaaagagcagatgaaggcaaaacgaaaagaggcagagctgcgtcaggtgcagtctcaggcccatgggctacaaatgcggctgaagtactcacagagtgacctagaacagactaagacaaggcatcttgccctgaatctccaggaaaaatctaagctggagagtgaactagccaacttcgggcctcgaattaatgatatcaagagaatcatacagagccgagagagggaaatgaaagacttgaaggagaagatgaaccaggtggaagatgaggtgtttgaagagttttgtcgggagattggtgtgcgtaacatccgcgaatttgaggaagaaaaggtgaagcggcagaatgaaattgccaagaaacgcttggaatttgagaatcagaagactcgcttgggcatccagttggattttgaaaagaatcagttgaaggaggaccaggataaagtacacatgtgggagcagacagtaaaaaaggatgaaaatgagatagaaaagcttaagaaggaggagcaaagacacatgaagataatagatgaaaccatggctcagctccaagaccttaagaatcagcacctggccaaaaagtcagaagtgaatgacaagaatcatgagatggaagaaattcgcaagaagcttgggggtgccaataaggaaatgactcacttacagaaggaagtgacagccattgagaccaagcttgaacagaagcgcagtgaccgccacaacctgctacaggcctgtaagatgcaggacatcaaattgccactgtcaaagggcaccatggatgatattagtcaggaagaaggtggctcccagggagaagagtcagtgagtggttcccagagaacatctagtatctatgcacgagaggccctcattgagattgactacggtgacctgtgtgaagatctgaaggatgcacaggcggaagaagaaatcaagcaagagatgaacacactccagcaaaagctgaatgagcagcagagtgtgcttcagaggattgctgcccctaacatgaaggccatggaaaagctggaaagtgtccgagacaagttccaggagacctcagatgaatttgaggcagcacgaaagcgagcaaagaaagccaagcaggcatttgaacagataaagaaggagcgctttgaccgattcaatgcttgttttgaatctgtggctaccaatattgatgagatctacaaggctctgtcccgtaacagcagtgcccaggcattcttgggccccgagaatcctgaagagccctatttggatggtatcaactacaactgtgtagctcctggcaaacgtttccggcctatggacaatttgtcaggcggggagaagacagttgccgcactggccttgctttttgccattcacagctacaagccagcccccttcttcgtcctggatgagattgatgctgccttggataacaccaacattggcaaggtggcaaattacatcaaggagcagtcaacttgcaacttccaggccattgttatctctctcaaggaggaattctacaccaaggctgagagcctcattggagtctatcctgagcaaggagactgtgtgatcagcaaagtcctgaccttcgacctcaccaagtatccagatgccaaccctaaccccaatgaacaatagcaggaattctgtcttcttgtctggatccctgaactgcccttctatccatcttctctcctggatctcatcacccactatcatggatcgcctggcaccatacccccttatgtttgtgtgcatgtgtgattgattgtgtgcatgttaatttgtttgcaaaaataaatactggagactggtttt

SEQ ID NO: 1373 - protein, 1233 aa, Rattus norvegicus
  ref <308>: DATABASE ACCESSION NUMBER: SWISS-Prot / CAA06377
  ref <309>: DATABASE ENTRY DATE: 2003-02-01
MGFLKLIEIENFKSYKGRQIIGPFQRFTAIIGPNGSGKSNLMDAISFVLGEKTSNLRVKTLRDLIHGAPVGKPAANRAFVSMVYSEEGAEDRTFARVIVGGSSEYKINNKVVQLHEYSEELEKLGILIKARNFLVFQGAVESIAMKNPKERTALFEEISRSGELAQEYDKRKKEMVKAEEDTQFNYHRKKNIAAERKEAKQEKEEADRYQALKDEVVRAQVQLQLFKLYHNEVEIEKLNKELASKNKEIEKDKKRMDKVEDELKEKKKELGKMMREQQQIEKEIKEKDSELNQKRPQYIKAKENTSHKIKKLEAAKKSLQNRQKHYKKRKGDMDELEKEMLSVEKARQEFEERMEEESQSQGRDLTLEENQVKKYHRLKEEASKRAATLAQELEKFNRDQKADQDRLDLEERKKVETEAKIKQKLREIEENQKRIEKLEEYITTSKQSLEEQKKLEGELTEEVEMAKRRIDEINKELNQVMEQLGDARIDRQESSRQQRKAEIMESIKRLYPGSVYGRLIDLCQPTQKKYQIAVTKVLGKNMDAIIVDSEKTGRDCIQYIKEQRGEPETFLPLDYLEVKPTDEKLRELKGAKLVIDVIRYEPPHIKKALQYACGNALVCDNVEDARRIAFGGHQRHKTVALDGTLFQKSGVISGGASDLKAKARRWDEKAVDKLKEKKERLTEELKEQMKAKRKEAELRQVQSQAHGLQMRLKYSQSDLEQTKTRHLALNLQEKSKLESELANFGPRINDIKRIIQSREREMKDLKEKMNQVEDEVFEEFCREIGVRNIREFEEEKVKRQNEIAKKRLEFENQKTRLGIQLDFEKNQLKEDQDKVHMWEQTVKKDENEIEKLKKEEQRHMKIIDETMAQLQDLKNQHLAKKSEVNDKNHEMEEIRKKLGGANKEMTHLQKEVTAIETKLEQKRSDRHNLLQACKMQDIKLPLSKGTMDDISQEEGGSQGEESVSGSQRTSSIYAREALIEIDYGDLCEDLKDAQAEEEIKQEMNTLQQKLNEQQSVLQRIAAPNMKAMEKLESVRDKFQETSDEFEAARKRAKKAKQAFEQIKKERFDRFNACFESVATNIDEIYKALSRNSSAQAFLGPENPEEPYLDGINYNCVAPGKRFRPMDNLSGGEKTVAALALLFAIHSYKPAPFFVLDEIDAALDNTNIGKVANYIKEQSTCNFQAIVISLKEEFYTKAESLIGVYPEQGDCVISKVLTFDLTKYPDANPNPNEQ

SEQ ID NO: 1374 - DNA, 5825 bp, Homo sapiens
  ref <308>: DATABASE ACCESSION NUMBER: EMBL / D80000
  ref <309>: DATABASE ENTRY DATE: 2002-05-12
atggggttcctgaaactgattgagattgagaactttaagtcgtacaagggtcgacagattatcggaccatttcagaggttcaccgccatcattggacccaatggctctggtaagtcaaatctcatggatgccatcagctttgtgctaggtgaaaaaaccagcaacctgcgggtaaagaccctgcgggacctgatccatggagctcctgtgggcaagccagctgccaaccgggcctttgtcagcatggtctactctgaggagggtgctgaggaccgtacctttgcccgtgtcattgtaggaggttcttctgagtacaagatcaacaacaaagtggtccaactacatgagtacagtgaggaattagagaagttgggcattctcatcaaagctcgtaacttcctcgttttccagggtgctgtggaatctattgccatgaagaaccccaaagagaggacagctctatttgaagagattagtcgttctggggagctggcgcaggagtatgacaagcgaaagaaggaaatggtgaaggctgaagaggacacacagtttaattaccatcgcaagaaaaatattgcggctgaacgcaaggaagcaaagcaggagaaagaagaggctgaccggtaccagcgcctgaaggatgaggtagtacgggctcaggtacagctgcagctctttaagctttaccataatgaagtggaaattgagaagctcaacaaggaactggcctcaaagaacaaggagatcgagaaggacaagaagcgtatggacaaggtggaggatgaactgaaggagaagaagaaggagctgggcaaaatgatgcgggagcagcagcagattgagaaggagatcaaggagaaggactcagaattgaaccagaagcggcctcagtacatcaaagccaaggagaacacctcccacaaaatcaagaagctggaagcagccaagaagtctctgcagaatgctcagaagcactacaagaagcgtaaaggtgacatggatgagctggagaaggagatgctgtcagtggagaaggctcggcaggagtttgaagaacggatggaagaagagagtcagagtcagggcagagatttgacgttggaggagaatcaggtgaagaaataccaccggttgaaagaagaagccagcaagagagcagctaccctggcccaggagctggagaaattcaatcgagaccagaaagctgaccaggaccgtctggatctggaagaacggaagaaagtagagacagaggccaagatcaagcaaaagctgcgggaaattgaagagaatcagaagcggattgagaaactggaggaatacatcaccactagcaagcagtccctagaagagcagaagaagctagagggggagctgacagaggaggtggagatggccaagcggcgtattgatgaaatcaataaggagctgaaccaggtgatggagcagctaggggatgcccgcatcgaccgccaggagagcagccgccagcagcgaaaggcagagataatggaaagcatcaagcgcctttaccctggctctgtgtacggccgcctcattgacctatgccagcccacacaaaagaagtatcagattgctgtaaccaaggttttgggcaagaacatggatgccattattgtggactcggagaagacaggccgggactgtattcagtatatcaaggagcagcgtggggagcctgagaccttcttgcctcttgactacctggaggtgaagcctacagatgagaaactccgggagctgaagggggccaagctagtgattgatgtgattcgctatgagccacctcatatcaaaaaggccctgcagtatgcttgtggcaatgcccttgtctgtgacaacgtggaagatgcccgccgcattgcctttggaggccaccagcgccacaagacagtggcactggatggaaccctattccagaagtcaggagtgatctctggtggggccagtgacctgaaggccaaggcacggcgctgggatgagaaagcagtagacaagttgaaagagaagaaggagcgcttgacagaggagctgaaagagcagatgaaggcaaaacggaaagaggcagagctgcgtcaggtgcagtctcaggcccatggactgcagatgcggctcaagtactcccagagtgacctagaacagaccaagacacgacatctagccctgaatctgcaggaaaaatccaagctggagagtgagctagccaactttgggcctcgcattaatgatatcaagaggatcattcagagccgagagagggaaatgaaagacttgaaggagaagatgaaccaggtagaggatgaggtgtttgaagagttttgtcgggagattggtgtgcgcaacatccgggagtttgaggaagaaaaggtgaaacggcagaatgaaatcgccaagaagcgtttggagtttgagaatcagaagactcgcttgggcattcagttggattttgaaaagaaccaactgaaggaggaccaagataaagtacacatgtgggagcagacagtgaaaaaagatgaaaatgagatagaaaagctcaaaaaggaggaacaaagacacatgaagatcatagatgagaccatggctcagctacaagacctgaagaatcagcatctggccaagaagtcggaagtgaatgacaagaatcatgagatggaggagattcgtaagaaactcgggggcgccaacaaggaaatgacccatttacagaaggaggtgacagccattgagaccaagcttgaacagaagcgcagtgaccgtcacaacttgctacaggcctgtaagatgcaggacattaagttgccactgtcaaaaggcaccatggatgatattagtcaggaagagggtagctcccagggggaggactcagtgagtggttcacagagaatttccagtatctatgcacgagaggccctcattgagattgactacggtgatctgtgtgaggatctgaaggatgcccaggctgaggaagagatcaagcaagagatgaacacactgcagcagaagctgaatgagcagcagagtgtgcttcagcgtattgccgcccccaacatgaaggccatggaaaagctggaaagtgtccgagacaagttccaggagacctcagatgagtttgaagcagcccgaaagcgagcaaagaaggccaagcaggcattcgaacagatcaagaaggagcgctttgaccgcttcaatgcttgttttgaatctgtggctaccaacattgatgagatctataaggccctgtcccgcaatagcagtgcccaggcattcctgggccctgagaaccctgaagagccctacttggatggcatcaactacaactgtgtggctcctgggaaacgcttccggcctatggacaacttgtcaggcggggagaagacagtggcagctctggccctgctctttgccatccacagctacaagccagcccccttcttcgtcctggatgagattgatgctgccttggataacaccaacattggcaaggtggcaaattacatcaaggagcagtcgacttgcaacttccaggccatcgtcatctctctcaaggaggagttctacaccaaggccgagagcctcattggagtctatcctgagcaaggggactgtgtgatcagcaaagtcctgaccttcgacctcaccaagtacccagatgccaaccccaaccccaatgagcagtagcagtatttttgccctcccgccctgtctggatccctaagctgtccctctcccaatctctggatatttgactcccaaccttccccctacctcctggccctttttggtgtagtcatgggatttaggcactgctaatcaagcatgaagaggaacagaggtgatgttaggtctggagcaaaaattcctgaacgacagggagtattctggcctctgaaaggaggtgctgagctgaacagggccatctgttcatcacacacacccccttcctccccctcatcacccataatcgtgggccccttgggcctcttgcccactgtgtgtgtgggtatgtatgtgtgtatgtatgtatccgcatgtgtgcatgtgagtatgtttgcaaaataataaaggatattggagacctgttttagaaggagcctaggctgaatttgattccaagagagcttaggatgacagcacccctgagctgggcaaaggtactcaggacctcataggagtcttaggcagttacctgaaactgccttcattcactcatttgtgtattcattcatttatgtattcatcagacacataccgaacaccctctatttgtcaggctctgtgcttggaatacagagttgaatcagacatgatctctaccctcctagtaaggagatacagtgggttcatgaatgactatagttagctgaatgtcatatgtactttgaatttgagaagtgggtgatcccctctaggcttcctggaggtcacatttaagctagaccttgacaaattggtaggatttggtcaggcactaggagtggagcatgagctctggggacagacagttatgggttctggtcccactttttatcacttactagttgtttgaccttgggcaagtcatttgaccttctgtgcctcagtttcctcatctgtaaaatggggctaacaatattacctacctcataggatttaatgatgtcaagctcctcactggaggccttatcccttcgtggagcccactaggtgccgacccctcagaatataaccctcatgcctggacccctgagagcttctgatcccagctattagggacagaagaagcctccaaatctggaaggtgctgaatgccctgctgactgggaaagtttcagggcactgatggggtctacctggtaagcggagggcctgaggaaacctgtagcttcaatcatgtctggtaaccgggtgcctgagccccaatctgggttgtgaggaaataggggagaggtatcctgggccacatcccagcctaacacctgtgaggttcattttaggaactaacctcattagctataaggatcatgcagaggcagcaaagccgggtgcgatgagctcagcctttactcattcacatacaccatcacactttaattccaatctgtatattgctttttaaaagttaagtccattctaattacccaaatatgcatgaattcattctccttttgagaagttagattgttaaagatagtctcattcagctaccaaccactccttgatccttcccttcttagtggctgttgtttgttgtacttccgtttagactttgttttaatgcttgtacgtacatatgtgaactcattggaaatattgtgtgtttaatgcaaatgatatattgaattgtttagcaatttgttttctttgcttaacgatgtttttgagatctgtgcatgttacttaatgtagctcaatccatcttctgtaattgctgtatagattgtcatcatatgattaccacattttacttacgcatttcttttgtgatggacattaagactgtttttaggttttgctattacaaaatactacacaggagcatcactatgcctgtgtgaaagtatatgtatgaaagtttacctagggttgattcctagaagtggaattgcaaagtcataggatatttatatattggtttttaataatacttccaaattgccctcctgtactatttactcagtatttttcttgaggttgatctgaggtctaacattgttatcctatatcattttcatcccaagtagtgatatctgtgaaatcacaggtttgatgtgtgctaattatgtattcttctaatacatattaaaagacataactatcaaaac

SEQ ID NO: 1375 - protein, 1233 aa, Homo sapiens
  ref <308>: DATABASE ACCESSION NUMBER: Refseq / NP_006297
  ref <309>: DATABASE ENTRY DATE: 2001-12-19
MGFLKLIEIENFKSYKGRQIIGPFQRFTAIIGPNGSGKSNLMDAISFVLGEKTSNLRVKTLRDLIHGAPVGKPAANRAFVSMVYSEEGAEDRTFARVIVGGSSEYKINNKVVQLHEYSEELEKLGILIKARNFLVFQGAVESIAMKNPKERTALFEEISRSGDVAQEYDKRKKEMVKAEEDTQFNYHRKKNIAAERKEAKQEKEEADRYQRLKDEVVRAQVQLQLFKLYHNEVEIEKLNKELASKNKEIEKDKKRMDKVEDELKEKKKELGKMMREQQQIEKEIKEKDSELNQKRPQYIKAKENTSHKIKKLEAAKKSLQNAQKHYKKRKGDMDELEKEMLSVEKARQEFEERMEEESQSQGRDLTLEENQVKKYHRLKEEASKRAATLAQELEKFNRDQKADQDRLDLEERKKVETEAKIKQKLREIEENQKRIEKLEEYITTSKQSLEEQKKLEGELTEEVEMAKRRIDEINKELNQVMEQLGDARIDRQESSRQQRKAEIMESIKRLYPGSVYGRLIDLCQPTQKKYQIAVTKVLGKNMDAIIVDSEKTGRDCIQYIKEQRGEPETFLPLDYLEVKPTDEKLRELKGAKLVIDVIRYEPPHIKKALQYACGNALVCDNVEDARRIAFGGHQRHKTVALDGTLFQKSGVISGGASDLKAKARRWDEKAVDKLKEKKERLTEELKEQMKAKRKEAELRQVQSQAHGLQMRLKYSQSDLEQTKTRHLALNLQEKSKLESELANFGPRINDIKRIIQSREREMKDLKEKMNQVEDEVFEEFCREIGVRNIREFEEEKVKRQNEIAKKRLEFENQKTRLGIQLDFEKNQLKEDQDKVHMWEQTVKKDENEIEKLKKEEQRHMKIIDETMAQLQDLKNQHLAKKSEVNDKNHEMEEIRKKLGGANKEMTHLQKEVTAIETKLEQKRSDRHNLLQACKMQDIKLPLSKGTMDDISQEEGSSQGEDSVSGSQRISSIYAREALIEIDYGDLCEDLKDAQAEEEIKQEMNTLQQKLNEQQSVLQRIAAPNMKAMEKLESVRDKFQETSDEFEAARKRAKKAKQAFEQIKKERFDRFNACFESVATNIDEIYKALSRNSSAQAFLGPENPEEPYLDGINYNCVAPGKRFRPMDNLSGGEKTVAALALLFAIHSYKPAPFFVLDEIDAALDNTNIGKVANYIKEQSTCNFQAIVISLKEEFYTKAESLIGVYPEQGDCVISKVLTFDLTKYPDANPNPNEQ

SEQ ID NO: 1376 - DNA, 3933 bp, Rattus norvegicus; identical to SEQ ID NO: 1372
  ref <308>: DATABASE ACCESSION NUMBER: EMBL / AJ005113
  ref <309>: DATABASE ENTRY DATE: 1999-01-07

SEQ ID NO: 1377 - protein, 1233 aa, Rattus norvegicus; identical to SEQ ID NO: 1373
  ref <308>: DATABASE ACCESSION NUMBER: SWISS-Prot / CAA06377
  ref <309>: DATABASE ENTRY DATE: 2003-02-01

SEQ ID NO: 1378 - DNA, 5825 bp, Homo sapiens; identical to SEQ ID NO: 1374
  ref <308>: DATABASE ACCESSION NUMBER: EMBL / D80000
  ref <309>: DATABASE ENTRY DATE: 2002-05-12

SEQ ID NO: 1379 - protein, 1233 aa, Homo sapiens; identical to SEQ ID NO: 1375
  ref <308>: DATABASE ACCESSION NUMBER: Refseq / NP_006297
  ref <309>: DATABASE ENTRY DATE: 2001-12-19

SEQ ID NO: 1380 - DNA, 1126 bp, Rattus norvegicus
  ref <308>: DATABASE ACCESSION NUMBER: EMBL / AJ005394
  ref <309>: DATABASE ENTRY DATE: 2002-02-28
ctgcaaggaccttcaactctgccatcctgatttcccagacggcgaatactgggtcgatcccaaccaagggtgctccagggactccttcaaagtctactgcaatttcacagctggagggtccacgtgcgtcttccctgacaagaagtctgagggagccagaatcacttcttggcccaaagaaaacccaggttcctggttcagtgaattcaagcgtgggaaactgctctcctatgtggatgctgaaggcaaccctgtgggcgtggtacaaatgaccttcctgcggctgctgagtgcctctgcccagcagaacatcacctacaactgctaccagtccgtggcctggcaggatgccgccacaggcagctacgataaggctatccgcttcttgggctccaacgatgaggaaatgtcttatgataacaacccctacatccgtgccctggtggatggctgtgctaccaagaaaggctaccagaagacggtgctggagattgacacgcccaaagttgagcaagtccccattgtggacatcatgttcaccgactttggtgaagcctcacagaaatttggatttgaagtagggccaccttgcttcctaggctaggagctgctgagcccaccggtctccagagcaacctcgtgacctcagcaccccacctgtgggcgtcctgtgcacggcccatcccggacagtgaacctttctcacccctgcctgcctgactcatctgtgcctcggagcctccgtggcgttggaccccatgcccagagagaacaaagggaaagagccgtgtccccacggagccgaatcacatgacctagccacaccacagcctcttgccacgcttcagctctccggataggttcatcgaaggtgttaatggaccgttggccgggagtggggcgggacagtatttgaaaatcactttttaaaaaaattcaacttgaagatatgtattccccctgaccttcaaaagatgttctgaggtggtcttgtaaaggtcaccaaagcctccatttaaaaaagaaaaaaaaaaaaaaaaccaaccctcaacatatccactcagaggccaaatgtcattccacatgtgcctttccgatggattaaaggtgcttatgtttttgtgag

SEQ ID NO: 1381 - protein, 200 aa, Rattus norvegicus
  ref <308>: DATABASE ACCESSION NUMBER: SWISS-Prot / CAA06509
  ref <309>: DATABASE ENTRY DATE: 2003-02-01
CKDLQLCHPDFPDGEYWVDPNQGCSRDSFKVYCNFTAGGSTCVFPDKKSEGARITSWPKENPGSWFSEFKRGKLLSYVDAEGNPVGVVQMTFLRLLSASAQQNITYNCYQSVAWQDAATGSYDKAIRFLGSNDEEMSYDNNPYIRALVDGCATKKGYQKTVLEIDTPKVEQVPIVDIMFTDFGEASQKFGFEVGPPCFLG

SEQ ID NO: 1382 - DNA, 2377 bp, Homo sapiens
  ref <308>: DATABASE ACCESSION NUMBER: EMBL / BC008760
  ref <309>: DATABASE ENTRY DATE: 2001-07-13
ggcacgaggatgggccccccgggtccccctggcccccgaggaccctccggagctccaggtgctgatggcccacaaggtcccccaggtggaataggaaaccctggtgcagtgggagagaagggcgagcctggcgaagcaggtgagcctggccttccgggagaaggcggccccccgggacccaaaggagaaaggggagagaagggcgagtcaggcccttcaggtgctgccggaccccctggacccaaaggccctcccggagatgatggtcccaaaggcagccctggcccagtgggttttcctggagatcctggcccccccggagagcctggccccgcgggtcaagatggtccccctggtgacaaaggagatgatggtgaacccgggcagacaggatcccccggccctactggtgaaccaggtccatcggggcctccaggaaaaaggggtcccccaggccccgcaggccccgaaggcagacagggagagaaaggggccaagggagaagccggcttggaaggccctcctgggaagactggccccatcggcccccagggggcccctgggaagcccggaccggatggccttcgagggatccctggccctgtgggagaacaaggtctcccaggatccccaggcccggacggtccccccggccccatgggtcccccaggacttcccggcctcaaaggagattctggtcccaaaggtgaaaagggtcatccaggcctgatcgggctcatcggtcctcccggtgaacagggtgagaagggcgaccgtggtctccctggcccccagggctcctccggtcctaagggagaacagggtatcactggtccttctggcccgattgggcctcctgggccccctggcctgccgggtccgcctggtccaaaaggtgctaagggctcctcgggtccaactggcccgaagggtgaggcaggccacccaggacccccaggccccccgggccccccgggagaggtcatccagcccctgccaatccaggcatccaggacgcggcggaacatcgacgccagccagctgctggacgacgggaatggcgagaactacgtggactacgcggacggcatggaagagatcttcggctctctcaactctctgaagctggagattgagcagatgaaacggcccctgggcacgcagcagaaccccgcccgcacctgcaaggacctgcagctctgccaccccgacttcccagatggtgaatactgggtcgatcctaaccaaggatgctccagggattccttcaaggtttactgcaacttcacagccggggggtcgacatgcgtcttccctgacaagaagtccgaaggggccagaatcacttcttggcccaaagaaaacccgggctcctggttcagtgaattcaagcgtgggaaactgctctcctatgtggacgccgagggcaaccctgtgggtgtggtacagatgaccttcctgcggctgctgagcgcctctgcccaccagaacgtcacctaccactgctaccagtcagtggcctggcaggacgcagccacgggcagctacgacaaggccctccgcttcctgggctccaacgacgaggagatgtcctatgacaacaacccctacatccgcgccctggtggacggctgtgctaccaagaaaggctaccagaagacggttctggagatcgacacccccaaagtggagcaggtgcccatcgtggacatcatgttcaatgacttcggtgaagcgtcacagaaatttggatttgaagtggggccggcttgcttcatgggctaggagccgccgagcccgggctcccgagagcaacctcgtgacctcagcatgccattcgttcgtgagtgtcccgtgcacgtcctgatcctggacagtgaaggcttctccctcccctcccacctgacttcatctacgcctcggcaccacggggtgtgggaccccagcccggagagaacagagggaaggagccgcgcccccacctggagctgaatcacatgacctagctgcaccccagcgcctgggcccgccccacgctctgtccacacccatgcgccccgggagcggggccatgcctccagccccccagctcgcccgacccatcctgttcgtgaataggtctcaggggttgggggagggactgccagatttggacactatatttttttctaaattcaacttgaagatgtgtatttcccctgaccttcaaaaaatgttccaaggtaagcctcgtaaaggtcatcccaccatcaccaaagcctccgtttttaacaacctccaacacgatccatttagaggccaaatgtcattctgcaggtgccttcccgatggattaaaggtgcttatgtttttgtgaaaaaaaaaaaaaaaaaaaaaa

SEQ ID NO: 1383 - protein, 1838 aa, Homo sapiens
  ref <308>: DATABASE ACCESSION NUMBER: SWISS-Prot / P20908
  ref <309>: DATABASE ENTRY DATE: 2002-06-15
MDVHTRWKARSALRPGAPLLPPLLLLLLWAPPPSRAAQPADLLKVLDFHNLPDGITKTTGFCATRRSSKGPDVAYRVTKDAQLSAPTKQLYPASAFPEDFSILTTVKAKKGSQAFLVSIYNEQGIQQIGLELGRSPVFLYEDHTGKPGPEDYPLFRGINLSDGKWHRIALSVHKKNVTLILDCKKKTTKFLDRSDHPMIDINGIIVFGTRILDEEVFEGDIQQLLFVSDHRAAYDYCEHYSPDCDTAVPDTPQSQDPNPDEYYTEGDGEGETYYYEYPYYEDPEDLGKEPTPSKKPVEAAKETTEVPEELTPTPTEAAPMPETSEGAGKEEDVGIGDYDYVPSEDYYTPSPYDDLTYGEGEENPDQPTDPGAGAEIPTSTADTSNSSNPAPPPGEGADDLEGEFTEETIRNLDENYYDPYYDPTSSPSEIGPGMPANQDTIYEGIGGPRGEKGQKGEPAIIEPGMLIEGPPGPEGPAGLPGPPGTMGPTGQVGDPGERGPPGRPGLPGADGLPGPPGTMLMLPFRFGGGGDAGSKGPMVSAQESQAQAILQQARLALRGPAGPMGLTGRPGPVGPPGSGGLKGEPGDVGPQGPRGVQGPPGPAGKPGRRGRAGSDGARGMPGQTGPKGDRGFDGLAGLPGEKGHRGDPGPSGPPGPPGDDGERGDDGEVGPRGLPGKPGPRGLLGPKGPPGPPGPPGVTGMDGQPGPKGNVGPQGEPGPPGQQGNPGAQGLPGPQGAIGPPGEKGPLGKPGLPGMPGADGPPGHPGKEGPPGEKGGQGPPGPQGPIGYPGPRGVKGADGIRGLKGTKGEKGEDGFPGFKGDMGIKGDRGEIGPPGPRGEDGPEGPKGRGGPNGDPGPLGPPGEKGKLGVPGLPGYPGRQGPKGSIGFPGFPGANGEKGGRGTPGKPGPRGQRGPTGPRGERGPRGITGKPGPKGNSGGDGPAGPPGERGPNGPQGPTGFPGPKGPPGPPGKDGLPGHPGQRGETGFQGKTGPPGPPGVVGPQGPTGETGPMGERGHPGPPGPPGEQGLPGLAGKEGTKGDPGPAGLPGKDGPPGLRGFPGDRGLPGPVGALGLKGNEGPPGPPGPAGSPGERGPAGAAGPIGIPGRPGPQGPPGPAGEKGAPGEKGPQGPAGRDGLQGPVGLPGPAGPVGPPGEDGDKGEIGEPGQKGSKGDKGEQGPPGPTGPQGPIGQPGPSGADGEPGPRGQQGLFGQKGDEGPRGFPGPPGPVGLQGLPGPPGEKGETGDVGQMGPPGPPGPRGPSGAPGADGPQGPPGGIGNPGAVGEKGEPGEAGEPGPSGRSGPPGPKGERGEKGESGPSGAAGPPGPKGPPGDDGPKGSPGPVGFPGDPGPPGEPGPAGQDGPPGDKGDDGEPGQTGSPGPTGEPGPSGPPGKRGPPGPAGPEGRQGEKGAKGEAGLEGPPGKTGPIGPQGAPGKPGPDGLRGIPGPVGEQGLPGSPGPDGPPGPMGPPGLPGLKGDSGPKGEKGHPGLIGLIGPPGEQGEKGDRGLPGPQGSSGPKGEQGITGPSGPIGPPGPPGLPGPPGPKGAKGSSGPTGPRGEAGHPGPPGPPGPPGEVIQPLPIQASRTRRNIDASQLLDDGNGENYVDYADGMEEIFGSLNSLKLEIEQMKRPLGTQQNPARTCKDLQLCHPDFPDGEYWVDPNQGCSRDSFKVYCNFTAGGSTCVFPDKKSEGARITSWPKENPGSWFSEFKRGKLLSYVDAEGNPVGVVQMTFLRLLSASAHQNVTYHCYQSVAWQDAATGSYDKALRFLGSNDEEMSYDNNPYIRALVDGCATKKGYQKTVLEIDTPKVEQVPIVDIMFNDFGEASQKFGFEVGPACFMG

SEQ ID NO: 1384 - DNA, 1126 bp, Rattus norvegicus; identical to SEQ ID NO: 1380
  ref <308>: DATABASE ACCESSION NUMBER: EMBL / AJ005394
  ref <309>: DATABASE ENTRY DATE: 2002-02-28

SEQ ID NO: 1385 - protein, 200 aa, Rattus norvegicus; identical to SEQ ID NO: 1381
  ref <308>: DATABASE ACCESSION NUMBER: SWISS-Prot / CAA06509
  ref <309>: DATABASE ENTRY DATE: 2003-02-01

SEQ ID NO: 1386 - DNA, 2377 bp, Homo sapiens; identical to SEQ ID NO: 1382
  ref <308>: DATABASE ACCESSION NUMBER: EMBL / BC008760
  ref <309>: DATABASE ENTRY DATE: 2001-07-13

SEQ ID NO: 1387 - protein, 1838 aa, Homo sapiens; identical to SEQ ID NO: 1383
  ref <308>: DATABASE ACCESSION NUMBER: SWISS-Prot / P20908
  ref <309>: DATABASE ENTRY DATE: 2002-06-15

SEQ ID NO: 1388 - DNA, 1800 bp, Rattus norvegicus
  misc_feature (1)..(1800): n=a, c, g or t
  ref <308>: DATABASE ACCESSION NUMBER: EMBL / AJ006064
  ref <309>: DATABASE ENTRY DATE: 1998-10-12
ggagcggagagcggtgagcgacatgtccttccgaaaagttgtgcggcagagcaaattccggcatgtatttggtcagccagtcaagaatgaccagtgctatgaggacattcgagtctcccgagttacctgggacagtaccttctgcgcagtcaaccccaagttcctggcagtgattgtggaagccagtggtgggggtgcctttatggtgctccctctaaacaagacaggccgcattgacaaggcctacccaacagtatgtgggcacacaggacctgttctggatattgactggtgcccccacaatgacgaagtcattgccagtggatcagaggactgcactgtcatggtgtggcagattccagagaatgggctgacctcccctctgacagagccagtagtggtgcttgaggggcataccaagcgtgtgggcatcatcacctggcaccccacagcccgaaatgtgcttctcagtgcaggttgtgacaatgtggtgcttatctggaatgtgggcactgcagaggagctgtaccgcctagacagcttgcaccctgacctcatctacaatgtgagctggaaccacaacggcagcctcttttgcacagcttgcaaggacaagagtgtccgaatcatcgatcccaggcggggcaccctggtggcagaacgggagaaggctcatgagggggctcggcccatgcgggccatctttctggctgatgggaaggtgttcaccgctggtttcagccgcatgagtgaacggcaactggcactctgggacccagaaaactttgaggagcccatggccctgcaggagctggattcaagcaatggggctctactgcctttctatgacccggacaccagtgtggtctacgtctgtggcaagggtgattccagcatccggtactttgagatcacagatgaacctccctacatccactttctgaatacctttaccagcaaagaaccccagaggggtatgggcagcatgcctaagaggggcttggaggtcagcaagtgtgaaattgccaggttctacaaactgcatgaacgcaagtgtgagcccatagtaatgactgtgccaagaaagtctgacctctttcaggatgatctgtaccctgacacagccggacccgatgctgctcttgaggcagaggattgggttagtggtcaggatgctgatccaatcctcatctcactacgggaagcctatgtgcccagtaaacaacgggacctgaaggtcagccggcgcaacgtgctatcggacagcaagcctgccggttacagccgctccggagtctccacagctactgcaattactgacattcccagtggcaaccttgctgggtctggtgaagctgggaagctggaagaggtgatgcacggacttcgggcacttcgggtgctggtcaaggaacaaggggagcgtatcagccgcctggaggagcatctgggccgcatggagaatggggatacataggaccaccagggacctgctcccgatactgcctccttctcctccaacccttcccacctagcttctgtggccaggtcacaccaggcagtttgctgctcagtgcctctgtggcaggtcatggccagtttgcacctctccacagcctggggcncaggttggaagcaccacctggcttttggaagatttttgtaccaaggcaaattccaagtactctaagggaccatctcctcgacttgcccaacccactgccccctcactagaaaaagcagcagagatgggttctatattttcattccaaataaaagctctttctaaagccaaaaaaa

SEQ ID NO: 1389 - protein, 484 aa, Rattus norvegicus
  ref <308>: DATABASE ACCESSION NUMBER: SWISS-Prot / O89046
  ref <309>: DATABASE ENTRY DATE: 2001-10-16
MSFRKVVRQSKFRHVFGQPVKNDQCYEDIRVSRVTWDSTFCAVNPKFLAVIVEASGGGAFMVLPLNKTGRIDKAYPTVCGHTGPVLDIDWCPHNDEVIASGSEDCTVMVWQIPENGLTSPLTEPVVVLEGHTKRVGIITWHPTARNVLLSAGCDNVVLIWNVGTAEELYRLDSLHPDLIYNVSWNHNGSLFCTACKDKSVRIIDPRRGTLVAEREKAHEGARPMRAIFLADGKVFTAGFSRMSERQLALWDPENFEEPMALQELDSSNGALLPFYDPDTSVVYVCGKGDSSIRYFEITDEPPYIHFLNTFTSKEPQRGMGSMPKRGLEVSKCEIARFYKLHERKCEPIVMTVPRKSDLFQDDLYPDTAGPDAALEAEDWVSGQDADPILISLREAYVPSKQRDLKVSRRNVLSDSKPAGYSRSGVSTATAITDIPSGNLAGSGEAGKLEEVMHGLRALRVLVKEQGERISRLEEHLGRMENGDT

SEQ ID NO: 1390 - DNA, 1877 bp, Homo sapiens
  ref <308>: DATABASE ACCESSION NUMBER: EMBL / BC006449
  ref <309>: DATABASE ENTRY DATE: 2001-07-13
ccgggatccggagccgcccgaagccggtgccgcagccccctgcgcccccggtgcccccgacatgtccttccgcaaagtggtccggcagagcaaattccggcatgtgttcgggcagccggtcaagaacgaccagtgctatgaggacattcgcgtgtcccgtgttacctgggacagcaccttctgcgccgtcaaccccaagttcctggcggtgattgtggaggccagtggagggggtgcctttctggtgctccccctaagcaagacgggccgcattgacaaggcctacccgacggtgtgtgggcacacgggacctgtcctggacatcgactggtgtcctcacaacgacgaagtcatagccagcggctcggaggactgcacggtcatggtgtggcagatcccagagaacgggctgacctccccgctgacagagccggtggtggtactggaggggcacaccaagcgagtgggcatcatcgcctggcaccccacggcccgaaacgtgctgctcagtgcaggctgcgacaacgtggtactcatctggaatgtgggcacagcggaggagctgtaccgcctggacagcctgcaccctgacctcatctacaatgtcagctggaaccacaatggcagcctgttttgctcagcatgcaaggacaagagcgtgcgcatcatcgacccccgtcggggcaccctggtggcagagcgggagaaggctcatgagggggcccggcccatgcgggccatcttcctggcagatggcaaggtgttcaccacaggcttcagccgaatgagcgagcggcagctggcgctctgggacccagaaaacctcgaggaacccatggccctgcaggaactggactcgagcaacggggccctgctgcccttctacgaccccgacaccagtgtggtctacgtctgcggcaagggtgactccagcatccggtactttgagatcacagaggagcctccctacatccacttcctgaacacgttcaccagcaaggagccgcagcggggtatgggcagcatgcccaagcggggcctggaggtcagcaagtgcgagatcgcccggttctacaaactgcatgagcgcaagtgtgagcccatcgtcatgactgtgccaagaaagtcggacctcttccaggatgatctgtaccccgacacagccgggcccgaggcagccctggaggctgaggagtgggtgagcgggcgggatgccgacccgatcctcatctcactgcgggaggcctacgtgcccagcaagcagcgggacctgaagatcagccggcgcaacgtgttgtctgacagccggcccgccatggccccgggctcctcccacctaggggcccccgcctccaccaccactgctgctgatgccacccccagcggcagcctggccagagccggggaggctgggaagctggaggaggtgatgcaggagctgcgggccctgagggcgctggtcaaggagcagggcgaccgcatctgccgcctggaggagcagctgggccgcatggagaacggggatgcgtagggccacagccacacgccaccttcatctcctccgccgcccccttcccactcagcttctgccagcgggtcgcaccgggctagctggctgcccagagcctctgaggcagcgcaggggtcagttcccacccccacccgtcccaggcccaggccgaagccagcgcccagctttcctcactgttcctgtggaggatgtctacgcccaggcgagctcctcgacctctgagggaccatctccccgaccactgcccagccctctgctccctccccagaggaggcgggagggtgggctctatattttcattccaaataaaattctctttctaaaagccaaaaaaaaaaaaaaaaaa

SEQ ID NO: 1391 - protein, 489 aa, Homo sapiens
  ref <308>: DATABASE ACCESSION NUMBER: SWISS-Prot / Q9BR76
  ref <309>: DATABASE ENTRY DATE: 2002-06-15
MSFRKVVRQSKFRHVFGQPVKNDQCYEDIRVSRVTWDSTFCAVNPKFLAVIVEASGGGAFLVLPLSKTGRIDKAYPTVCGHTGPVLDIDWCPHNDEVIASGSEDCTVMVWQIPENGLTSPLTEPVVVLEGHTKRVGIIAWHPTARNVLLSAGCDNVVLIWNVGTAEELYRLDSLHPDLIYNVSWNHNGSLFCSACKDKSVRIIDPRRGTLVAEREKAHEGARPMRAIFLADGKVFTTGFSRMSERQLALWDPENLEEPMALQELDSSNGALLPFYDPDTSVVYVCGKGDSSIRYFEITEEPPYIHFLNTFTSKEPQRGMGSMPKRGLEVSKCEIARFYKLHERKCEPIVMTVPRKSDLFQDDLYPDTAGPEAALEAEEWVSGRDADPILISLREAYVPSKQRDLKISRRNVLSDSRPAMAPGSSHLGAPASTTTAADATPSGSLARAGEAGKLEEVMQELRALRALVKEQGDRICRLEEQLGRMENGDA

SEQ ID NO: 1392 - DNA, 1800 bp, Rattus norvegicus; identical to SEQ ID NO: 1388
  misc_feature (1)..(1800): n=a, c, g or t
  ref <308>: DATABASE ACCESSION NUMBER: EMBL / AJ006064
  ref <309>: DATABASE ENTRY DATE: 1998-10-12

SEQ ID NO: 1393 - protein, 484 aa, Rattus norvegicus; identical to SEQ ID NO: 1389
  ref <308>: DATABASE ACCESSION NUMBER: SWISS-Prot / O89046
  ref <309>: DATABASE ENTRY DATE: 2001-10-16

SEQ ID NO: 1394 - DNA, 1877 bp, Homo sapiens; identical to SEQ ID NO: 1390
  ref <308>: DATABASE ACCESSION NUMBER: EMBL / BC006449
  ref <309>: DATABASE ENTRY DATE: 2001-07-13

SEQ ID NO: 1395 - protein, 489 aa, Homo sapiens; identical to SEQ ID NO: 1391
  ref <308>: DATABASE ACCESSION NUMBER: SWISS-Prot / Q9BR76
  ref <309>: DATABASE ENTRY DATE: 2002-06-15

SEQ ID NO: 1396 - DNA, 2752 bp, Rattus norvegicus
  ref <308>: DATABASE ACCESSION NUMBER: EMBL / AJ006710
  ref <309>: DATABASE ENTRY DATE: 2001-03-22
cttgtcatgggggaggcggagaagttccactacatctacagctgtgacctggacatcaacgtgcagctgaagatagggagcttggaagggaagagagaacaaaagagctacaaagctgtcctagaagatcccatgctaaagttttccggactataccaagagacatgctctgatctgtatgtgacttgtcaagtttttgctgaagggaagcccttggccttgccagtcagaacatcctacaaaccatttagtacacgatggaattggaacgagtggctgaaactcccggtgaaataccctgacctgcccaggaacgcccaagtggccttgactatatgggatgtgtatggacccggaagggctgtgccggtgggaggaacaaccgtgtcactctttggaaaatatggcatgtttcgccaaggaatgcacgacttgaaagtctggcctaacgtggaggcagatggctccgaacccacacgaaccccgggcagaacaagcagcacactctcagaagaccagatgagccgccttgccaagcttaccaaggctcatcggcagggacacatggtgaaggtggattggttggacagactaacgtttagagagatagaaatgataaatgagagtgagaaacgaagctctaatttcatgtacttgatggttgagtttcgctgtgtcaaatgcgatgacaaggaatatggtattgtctactatgaaaaggatggtgacgaatcatctccaattttaacaagctttgagttagtgaaagttcctgatcctcaaatgtctatggagaacttagtggagagcaaacaccacaagcttgctcggagtttaagaagtggaccatctgaccacgatctcaaacccaacgctaccacaagagatcagctaaatattattgtgagctacccaccaaccaagcagctcacatatgaagaacaagatcttgtttggaaatttagatattatcttactaatcaagaaaaggctctgacaaagttcttgaagtgtgttaactgggacctaccccaggaggccaagcaggcgctggaacttctgggaaagtggaagccaatggatgtggaggattccctagagctgctctcctctcattacaccaaccccaccgtgcggcggtacgctgtggcccgcttgaggcaggccgatgacgaggatttgctgatgtacttgctgcagctggtccaggctctgaaatatgaaaactttgatgacataaagaacggtttggagcctaccaagaaggatagtcaagcttccgtgtcagagagcctgtcaagttctggagtcagttctgcagatatagatagctctcaaattataaccaaccctcttcctccggtggcctcccctcctcctgcatctaaatcaaaggaagtttctgatggggaaaacctagagcaggatctttgtaccttcttgatatcaagagcctgtaagaactcaacactggctaactatttatactggtatgtgatagtggagtgcgaagatcaggacacacagcagagggacccaaagactcacgagatgtacctgaacgtcatgaggcgcttcagccaagccctgctcaagggtgacaagtccgtgcgggtcatgcgctccctgctggcggcacagcagacctttgtagatcgcctggtgcatctgatgaaggcagtgcagagagaaagtgggaaccgcaagaagaagaatgagagacttcaagccttgcttggagataatgaaaaaatgaacttatcagatgtggagctgatcccattgccgttagagccacaggtgaaaatacggggaatcatcccggaaacagccacactgttcaagagtgctcttatgcctgcccagctgttcttcaagacagaagacggtggcaaataccctgtgatcttcaagcatggggacgacttgcgtcaagatcagcttatccttcagatcatctccctcatggacaagctgttgcggaaagaaaatctggatttgaaattgaccccttacaaggtgttagccacgagtacaaaacatggcttcatgcagttcatccagtcagttcccgtcgccgaagttcttgacacggagggaagcattcagaactttttcaggaaatatgccccaagcgagactggacccaatggcatcagtgcagaggtcatggacacttacgttaagagctgtgctggctactgtgtgatcacctacatccttggggttggagaccggcacctggataaccttctgttaacaaagacaggcaaactcttccatatagatttcgggtatattctgggccgagatcccaagcctcttcctcctccaatgaagctgaataaggagatggtcgaagggatgggtggtacccagagtgagcagtaccaagagttcagaaagcagtgttacacggccttcctccacctgcgaaggtattcaaatctgattctgaacttgttctccttgatggttgatgcaaacattccagatattgctcttgaaccagataaaactgtaaaaaaggttcaggataagttccgtctggacctgtcagatgaggaggccgtgcattacatgcagagtctgatcgacgaaagtgttcacgccctgttcgctgcggtggtggagcagatccataagtttgcccagtactggagaaaatgaaagtggatttgacccatcgtgatgcctgacttagtaagaaaacacatgagaaaccactgctgtgtactgaggacattagaga

SEQ ID NO: 1397 - protein, 887 aa, Rattus norvegicus
  ref <308>: DATABASE ACCESSION NUMBER: SWISS-Prot / CAA07199
  ref <309>: DATABASE ENTRY DATE: 2001-12-01
MGEAEKFHYIYSCDLDINVQLKIGSLEGKREQKSYKAVLEDPMLKFSGLYQETCSDLYVTCQVFAEGKPLALPVRTSYKPFSTRWNWNEWLKLPVKYPDLPRNAQVALTIWDVYGPGRAVPVGGTTVSLFGKYGMFRQGMHDLKVWPNVEADGSEPTRTPGRTSSTLSEDQMSRLAKLTKAHRQGHMVKVDWLDRLTFREIEMINESEKRSSNFMYLMVEFRCVKCDDKEYGIVYYEKDGDESSPILTSFELVKVPDPQMSMENLVESKHHKLARSLRSGPSDHDLKPNATTRDQLNIIVSYPPTKQLTYEEQDLVWKFRYYLTNQEKALTKFLKCVNWDLPQEAKQALELLGKWKPMDVEDSLELLSSHYTNPTVRRYAVARLRQADDEDLLMYLLQLVQALKYENFDDIKNGLEPTKKDSQASVSESLSSSGVSSADIDSSQIITNPLPPVASPPPASKSKEVSDGENLEQDLCTFLISRACKNSTLANYLYWYVIVECEDQDTQQRDPKTHEMYLNVMRRFSQALLKGDKSVRVMRSLLAAQQTFVDRLVHLMKAVQRESGNRKKKNERLQALLGDNEKMNLSDVELIPLPLEPQVKIRGIIPETATLFKSALMPAQLFFKTEDGGKYPVIFKHGDDLRQDQLILQIISLMDKLLRKENLDLKLTPYKVLATSTKHGFMQFIQSVPVAEVLDTEGSIQNFFRKYAPSETGPNGISAEVMDTYVKSCAGYCVITYILGVGDRHLDNLLLTKTGKLFHIDFGYILGRDPKPLPPPMKLNKEMVEGMGGTQSEQYQEFRKQCYTAFLHLRRYSNLILNLFSLMVDANIPDIALEPDKTVKKVQDKFRLDLSDEEAVHYMQSLIDESVHALFAAVVEQIHKFAQYWRK

SEQ ID NO: 1398 - DNA, 2074 bp, Homo sapiens
  ref <308>: DATABASE ACCESSION NUMBER: EMBL / AK022653
  ref <309>: DATABASE ENTRY DATE: 2002-08-06
ttatatttaagcatggagatgatttacgtcaagatcaacttattcttcaaatcatttcactcatggacaagctgttacggaaagaaaatctggacttgaaattgacaccttataaggtgttagccaccagtacaaaacatggcttcatgcagtttatccagtcagttcctgtggctgaagttcttgatacagagggaagcattcagaacttttttagaaaatatgcaccaagtgagaatgggccaaatgggattagtgctgaggtcatggacacttacgttaaaagctgtgctggatattgcgtgatcacctatatacttggagttggagacaggcacctggataaccttttgctaacaaaaacaggtaacaattaatgactaccagtagacatacattgtatatgtccatggtttttacccctgaatctatgtactaacaagataagttgcggcctggcgcggtggctcacgcccgtaatcccagcactttgggaggccaagacgggtggatcacctgaggttgggagttcgagaccagcctgaccaacatggagaaaccccgtctctactaaacacacaaaatttgccgggcgtggtggtacatgcctgtaatcccaactactcaggaggctgaggcaggagaatcgcttgaacccgggaggcggaggttgcagtgagccgagattgcaccattgcactgcagactaggcaacaagatcaaaacgccatcttagaaaaaaaaaaaaaaaaaagatgagttgcgtaattgaagataaatcagagagtcttaaaaattcctttaaatgttaccttggaagaacatttagggaaagtcctttcccttttaagaattgctttagtagtaatcctacagatggtcattttgcccacacttctgtactggaaaatgcctctttttatggaaagccaataatggatacaagtagcttagtctcttactgtatagctctagttagattgttaaaatgtcctttctcttacaaagtgtgcttaattcactttaatatctacctttaattatttgcttttccccttggagttctatgggataatcattctcagtcccctttgtcctgacaactctttagccctatgtatttatctttatgcagacagcttccagacttacagctttttacctcagtccatttcattaacttcaaattgaaatatcgaactgcttacttgaaattgtcattatatatggccagttgtaaaaggttgtcctttcctctactacctgcctaaaacctgtttctcacctcatttttccatttcaatagatagcaacatcacctacccagttgttcaagctctagacctcaaagtcattcttaacatgtctcttggcctcatctcatatactgaacctattagcaaatcttgtctactcctcaactccaaaatagatcatgaagttacccactgtcttcatttttactactttgaccccacttgaagcaaacaatatatgttgcctaaacaatttgaatgaaacctgaaccctttattggggccttgtggcttgtccaggcaggccatttgtctgaatgtcaaaccactcctgcctcagacaagagcctttgttgttttctctttctggaaagttatttattcagatctttgcagggctgactttagttattaagttgaagttctaatggcatctctttagagaagccctttctaactccttgatctgtaataacatatctgccctcttcctccaatgctctctacttattactgtattgtttatagcacttatcactagctgaagttaccttttttgtttaattcaacaactatttattgaacagctagtagatgctgggaataccaaagttaacagaagagacagaaatccttgctctcctagagcttgttgagttcttatcatcatcttctccccttcaggatgcaagttccatgagagcaggaacctttgtccattggggttacccccatgcctctggaccttgaacaccacctagctaaagtgttcaataaatcagtgttgaattaatgatgaataaatacttctgctcttc

SEQ ID NO: 1399 - protein, 887 aa, Homo sapiens
  ref <308>: DATABASE ACCESSION NUMBER: Refseq / NP_002638
  ref <309>: DATABASE ENTRY DATE: 2002-05-14
MGEAEKFHYIYSCDLDINVQLKIGSLEGKREQKSYNAVLEDPMLKFSGLYQETCSDLYVTCQVFAEGKPSALPVRTSYKAFSTRWNWNEWLKLPVKYPDLPRNAQVALTIWDVYGPGKAVPVGGTTVSLFGKYGMSRQGMHDLKVWPNVEADGSEPTNTPGRTSSTLSEDQMSRLAKLTKAHRQGHMVKVDWLDRLTFREIEMINESVKRSSNFMYLMGGFRCVKCDDKEYGIVYYEKDGDESSPILTSFELVKVPDPQMSLENLVESKHHNLPRSLRSGPSDHDLKPYPSPRDQLKNIVSYPPSKPPTYEEQDLVWEFRYYLTNQDKALTKILTSVIWDLPQGAKQALALLGKWNPMDVEDSLELISSHYTNPTVRRYAVARLRQADDEDLLMYLSQLVQALKYENFDDIKNGLEPTKKDSQSSVSGNVSNSGINSAEIDSSQIITSPLPSVSSPPPASKTKEVPDGENLEQDLCTFLISRASKNSTLANYLYWYVIVECEDQDTQQRDPKTHEMYLNVMRRFSQALLKGDKSVRVMRSLLAAQQTFVDRLVHLMKAVQRESGNRKKKNERLQALLGDNEKMNLSDVELIPLPLEPQVKIRGIIPETATLFKSALMPAQLFFKTEDGGKYPVIFKHGDDLRQDQLILQIISLMDKLLRKENLDLKLTPYKVLATSTKHGFMQFIQSVPVAEVLDTEGSIQNFFRKYAPSENGPNGISAEVMDTYVKSCAGYCVITYILGVGDRHLDNLVLTKTGKLFHIDFGYILGRDPKPLPPPMKLNKEMVEGMGGTQSEQYQEFRKQCYTAFLHLRRYSNLILNLFSLMVDPNIPDIALEPDKTVKKVQDKFRLDLSDEEAVHYMQSLIDESVHALFAAVVEQIHKFAQYWRK

SEQ ID NO: 1400 - DNA, 4749 bp, Rattus norvegicus
  ref <308>: DATABASE ACCESSION NUMBER: EMBL / AJ006855
  ref <309>: DATABASE ENTRY DATE: 1998-12-30
gaattcggcacgaggccatgtagtaaaacatcagcatgtagacggcaggtgtgctaactgtttcctatttttatggttattttgtgcctgaaaatggtggcggtgtaaagttggaagtggaagggcatgcagttttcttcctgtctgtttcagccagtttgtttatactttattcctggtgtaatctagctgtgtaactatcgaattgttacaggtgccagagtggtacagttcggacaaactgcctggactgtctggatagaacaaacagtgtgcaggcgttccttggcttagagatgctagctaaacagctggaagctctgggcttggctgaaaagcctcagttggtgactcgctttcaagaagttttccggtccatgtggtctgtgaatggcgattcaatcagtaaaatatatgcaggcaccggagccctggaagggaaggccaagttaaaagatggtgcgcgatctgtcaccagaaccattcagaataacttcttcgacagctccaagcaagaagccattgatgttctgcttctgggaaacactctgaacagcgacttagccgacaaagcccgggcacttctaactactgggagtttgcgtgtgtctgaacagacattacagtcagcatcttccaaagtcttaaagaacatgtgtgagaacttctacaagtactcaaagcccaagaagatccgagtgtgtgttggaacctggaatgtgaacggcgggaaacagttccgcagcatagcattcaagaaccagaccctcaccgactggcttcttgatgcacccaagttagctggcatccaggagtttcaagataagagaagtaagccaactgatatatttgcaattggctttgaagaaatggtggagctgaatgctgggaacattgtgaatgcaagcacaacaaaccagaagctgtgggcagtggaactgcagaagaccatctccagagacaacaagtatgttctcctggcctcggagcagttggtgggtgtctgcctgtttgtctttatcagaccgcagcatgctccctttatcagggatgttgcagtcgatactgtgaaaactgggatgggaggcgcgactggaaataagggcgctgttgcaatccggatgctcttccacaccaccagcctttgctttgtctgcagtcactttgctgcaggccagtcccaagtcaaagagagaaatgaagatttcgtagaaatagcacgaaaattgagtttccccatgggaagaatgctcttctcccatgattacgtattctggtgtggtgatttcaactatcgaatcgatcttcctaatgaagaagttaaagagctcataagacagcaaaattgggattctcttatagctggagatcaactcatcaatcagaaaaatgcaggacagatctttagaggatttttagagggaaaagtaacgtttgctccaacctataaatatgacttgttttccgaagactatgacaccagtgaaaagtgccgcacccctgcttggacagaccgagtcctctggagaaggaggaagtggccttttgacagatcagctgaagacttagatcttctgaatgctagtttccaagatgaaagtaaaatcctgtatacatggactcctggcaccttgctgcactatggaagagccgagctgaagacttctgaccacaggcccgttgtcgccctgatcgatatagatatatttgaagttgaagctgaagagagacaaaaaatttataaagaagttattgcagtccagggcccaccggacggcacagtactggtctcaatcaaaagttctgcacaagagaatactttctttgacgatgctttgatcgatgagcttctgcagcagtttgcacacttcggcgaagttatacttataagattcgtagaagataaaatgtgggttacatttttggaggggagctctgccttgaatgttctgagcctaaatggtaaagagttattaaatcggactataacaattactttaaaaagtccagactggatcaaaactttggaagaagagatgagtttagagaaaatcagtgtcacattgccctcatcaaccagttccaccctgctcggtgaagatgcagaggtctcagcggactttgacatggaaggtgatgtcgacgactacagtgctgaggtggaggagcttcttcctcagcacctccagccatcctccagctctggcctcggcacctctccaagctcttcgccccggaccagtccctgccagtcacccacagcaccagagtactccgcaccttctcttcccatcagacctagtcgagcaccatcaagaactccaggacctctaagttcacagggtgctccagttgacacccagccagcagcccagaaggagtcttcccagaccatagagcccaagaggccaccccctccccgcccagttgctcctccagcacgtcctgccccaccacagaggccacctccaccttcaggggctaggagtccggcacctgctagaaaagaatttggaggtgtcggagcccctcccagtcccggggttactaggagagagatggaagcacccaaaagcccgggaacagcacggaaagataatatagggcgtaatcagccttcccctcaagccggacttgcaggcccaggaccttctggatatggtgcagctagaccgacaattccagctcgtgctggagtgatcagtgcccctcagagccaggctcgggtgtctgctggaaggctgactcctgaaagccaaagcaaacccttggagacatcgaaaggtcctgctgtccttccagaaccactgaagcctcaggctgcatttcctccgcagccttctctgcccacacctgctcaaaagttacaggacccacttgtccccatagcagcacctatgcctccctccattccccaatcgaatttggaaactccacccctgcccccacctcggagcaggtcatctcaaagcttgccttcagactcctcaccacagctacaacaggagcaaccaacagggtaacagcaggtaaaaataaatggagcttgtggtgtcaaacaagagccaacattgaagagtgacccatttgaagacctctcacttagtgtgcttgctgtatccaaggctcagccttctgctcagatttcacctgttctaaccccagacccaaagatgttgattcagttgccttctgcatcgcaaagtaaagttaactctttgagttctgtaagttgcatgctaaccatgcctccagttccagagcaaagcaagtcacaggaaagtgtggggagttctgcaaacccatttcccagcctgcctaccaggaacccttttacagacaggactgctgcccctggaaacccatttagagttcagtctcaagaatcagaggcaacttcttggctatccaaagaagagcctgtttctaacagtcctttccctcctctcatgcctctcagtcacgacatgagcaagccttcaagttcactagatggttttgaggacaattttgatctgcagagccagtctacagtaaaaacaagcaaccccaaaggatgggtaacatttgacgaagatgaagactttcctacaaaaggaaagtcaaggtcggtttatccagactccctgggtaatacagcagcttcatttgatgatgactggagtaaaggtacaaacgtttctttctgtgtgctgccagccagaaggccaccacctccaccacctcctgtccctctgctaccacctggcaccacctcatctgcaggacctagcacaaccctgtcatctaaggcatctcccacattggacttcacagaaagataatgacatggagggaagggagtttctcctggtgtggtgtgactgtttgtttctgtttgtcagggtagacccaagagaatggggcattaattagttgttatgtgcaataaataatcagtaagtgcactgatatctatataaaataccactagaggatgtggacaaagctggagtttgtgtatatcagaaatagcaaagacatcctcttaactggagttctggcctttctcttcagatgaatggaagagaataggaaccatttttaaaagtgcttaaaactactctagaatagtccttactcagatactcacatagcaatcacgtaaagcccacacaactgcagctgacagtactgccagcccattgtgctgttgacgattggtattcgtggatacttaccaaagagcttccagagttctggtgagattgctttgaacggcattactttagccaaaaggtctgtgtatatatacactgtgtgtgtatgtctgtatgtatgcacaaacacacatgtgtacatccacatacttataaaatctgtcttgatataattcagatcaaattttacctaacagttctgacaatgtcctttttttcaatatctcactatcaagaagctggctgccactgggtgtgcttcattacgtcactaactgcctcccagaatggaagggtcagtccctttacagagctgccatctcctgttacgctgcacctcagaccttcacattcatcctactaccttcctcctctggtatgcctttccctgggcatttacaatgggcagtacagacgtggtcagtcatgtgacagatactcaaaacagtaggcacctgccaccagattccaggaggaacactatcagtgtgctcctttctctgcacagccctttcccttcagacctttctgtttgcctcgtgccgaattc

SEQ ID NO: 1401 - protein, 1574 aa, Rattus norvegicus
  ref <308>: DATABASE ACCESSION NUMBER: SWISS-Prot / Q62910
  ref <309>: DATABASE ENTRY DATE: 2002-06-15
MAFSKGFRIYHKLDPPPFSLIVETRHKEECLMFESGAVAVLSSAEKEAIKGTYAKVLDAYGLLGVLRLNLGDTMLHYLVLVTGCMSVGKIQESEVFRVTSTEFISLRVDASDEDRISEVRKVLNSGNFYFAWSASGVSLDLSLNAHRSMQEHTTDNRFFWNQSLHLHLKHYGVNCDDWLLRLMCGGVEIRTIYAAHKQAKACLISRLSCERAGTRFNVRGTNDDGHVANFVETEQVIYLDDCVSSFIQIRGSVPLFWEQPGLQVGSHRVRMSRGFEANAPAFDRHFRTLKDLYGKQIVVNLLGSKEGEHMLSKAFQSHLKASEHASDIHMVSFDYHQMVKGGKAEKLHSVLKPQVQKFLDYGFFYFDGSAVQRCQSGTVRTNCLDCLDRTNSVQAFLGLEMLAKQLEALGLAEKPQLVTRFQEVFRSMWSVNGDSISKIYAGTGALEGKAKLKDGARSVTRTIQNNFFDSSKQEAIDVLLLGNTLNSDLADKARALLTTGSLRVSEQTLQSASSKVLKNMCENFYKYSKPKKIRVCVGTWNVNGGKQFRSIAFKNQTLTDWLLDAPKLAGIQEFQDKRSKPTDIFAIGFEEMVELNAGNIVNASTTNQKLWAVELQKTISRDNKYVLLASEQLVGVCLFVFIRPQHAPFIRDVAVDTVKTGMGGATGNKGAVAIRMLFHTTSLCFVCSHFAAGQSQVKERNEDFVEIARKLSFPMGRMLFSHDYVFWCGDFNYRIDLPNEEVKELIRQQNWDSLIAGDQLINQKNAGQIFRGFLEGKVTFAPTYKYDLFSEDYDTSEKCRTPAWTDRVLWRRRKWPFDRSAEDLDLLNASFQDESKILYTWTPGTLLHYGRAELKTSDHRPVVALIDIDIFEVEAEERQKIYKEVIAVQGPPDGTVLVSIKSSAQENTFFDDALIDELLQQFAHFGEVILIRFVEDKMWVTFLEGSSALNVLSLNGKELLNRTITITLKSPDWIKTLEEEMSLEKISVTLPSSTSSTLLGEDAEVSADFDMEGDVDDYSAEVEELLPQHLQPSSSSGLGTSPSSSPRTSPCQSPTAPEYSAPSLPIRPSRAPSRTPGPLSSQGAPVDTQPAAQKESSQTIEPKRPPPPRPVAPPARPAPPQRPPPPSGARSPAPARKEFGVGAPPSPGVTRREMEGAPKSPGTARKDNIGRNQPSPQAGLAGPGPSGYGAARPTIPARAGVISAPQSQARVSAGRLTPESQSKPLETSKGPAVLPEPLKPQAAFPPQPSLPTPAQKLQDPLVPIAAPMPPSIPQSNLETPPLPPPRSRSSQSLPSDSSPQLQQEQPTGQQVKINGACGVKQEPTLKSDPFEDLSLSVLAVSKAQPSAQISPVLTPDPKMLIQLPSASQSKVNSLSSVSCMLTMPPVPEQSKSQESVGSSANPFPSLPTRNPFTDRTAAPGNPFRVQSQESEATSWLSKEEPVSNSPFPPLMPLSHDMSKPSSSLDGFEDNFDLQSQSTVKTSNPKGWVTFDEDEDFPTKGKSRSVYPDSLGNTAASFDDDWSKGTNVSFCVLPARRPPPPPPPVPLLPPGTTSSAGPSTTLSSKASPTLDFTER

SEQ ID NO: 1402 - DNA, 4805 bp, Homo sapiens
  ref <308>: DATABASE ACCESSION NUMBER: EMBL / AF009039
  ref <309>: DATABASE ENTRY DATE: 1999-06-30
gaggaggagccggaggaagagggctgcctccgaagaaaggagaatggcgttcagtaaaggattccggatctatcacaaattggatcccccacctttcagcctcatagtggaaactaggcataaggaagaatgtctcatgttcgagtctggggctgtcgctgtgctctcatctgcagaaaaagaggcaatcaagggtacatactccaaagtactggatgcatatggactcttaggtgttctgcggttaaatcttggtgatactatgttacattatctggtcctagtcactggatgtatgtctgttggaaaaattcaagaatctgaagttttccgagttacttccactgagtttatatcactgcgaatcgattcttcagatgaggatcgcatttcagaagtgcggaaagttttgaattcaggaaacttttattttgcatggtctgcatctggcatcagtttagatttgagtcttaatgcgcatcgtagcatgcaagaacagacaactgataatagatttttctggaatcagtctttgcatttgcatctcaaacactatggcgtgaattgtgatgactggttattacgtcttatgtgtggaggagtagaaatcagaacaatttatgctgctcataaacaggcgaaggcttgcctcatttcaagattaagctgtgaacgagctgggaccaggtttaatgtccggggaacaaatgatgatggtcatgttgccaattttgtagaaacagaacaggttgtgtacttagatgactcagtttcttccttcatacaaatccgaggatctgttccattgttctgggagcaaccagggttgcaagtgggatctcatcgtgtccgtatgtcaaggggatttgaagccaatgcacctgcttttgacaggcattttagaacacttaagaacttatatggtagacaaataatagtaaatttgcttggatctaaggaaggtgaacatatgctaagtaaagctttccagagtcatttgaaagcttctgaacatgctgctgatatccagatggtgaattttgactatcatcaaatggttaagggaggaaaggcagaaaaattacatagtgttcttaaacctcaagtccagaagtttctagattatggatttttttatttcaatggaagtgaagttcaaagatgccagagtggtacagttcgaacaaactgcttggattgtcttgatagaacaaatagtgtgcaggcatttcttggcttagagatgctagctaaacagttggaagctcttggtttagctgaaaagcctcagttggtgactcgctttcaagaagtttttcggtcaatgtggtccgtgaatggtgattcaatcagtaagatatatgcaggaactggagctcttgaagggaaagcgaagttaaaagatggtgctcgctctgttacccgaacaattcagaataacttctttgacagctccaagcaagaggccattgatgttttgctactgggaaatactctgaatagtgatttagctgacaaagctcgagcacttttaactactggaagtttgcgtgtttctgagcagacattacagtcagcatcttctaaagtactaaagagcatgtgtgagaatttctacaaatattcaaagcctaagaaaattcgagtatgtgtcggaacctggaatgtgaatggtgggaagcaatttcgcagcatagcttttaagaatcagacactcactgactggcttcttgatgcacccaagttagctggcatccaggagtttcaagataaaagaagtaagccaactgatatatttgcaattggttttgaagaaatggtagaattgaatgctggaaacattgtgagtgcaagcacaacaaatcagaagctctgggctgtagaacttcagaagacaatctccagagacaacaagtatgtgctgctggcttctgaacagttggtgggcgtctgtttgtttgtttttatcagaccacagcatgctccttttatcagggatgttgcagttgatactgtgaagactggaatgggaggtgcaactggaaataagggagcagttgcaatccgaatgctcttccatacaaccagcctttgcttcgtctgtagccactttgctgcagggcagtcacaagtcaaagaaagaaatgaagattttatagaaatagcacgaaaattgagttttcctatgggaaggatgctattttcccatgactatgtattttggtgtggtgatttcaactatcgaatcgatctccctaacgaagaagttaaagagctcataagacagcaaaattgggattctcttatagcaggagatcaacttatcaatcagaaaaatgctggacaggtttttagaggatttttagaaggaaaggtaacctttgctccgacatataagtatgacttgttttctgacgactatgacaccagtgaaaagtgccgcacccctgcctggacagaccgtgtcctttggagaaggaggaaatggccttttgatagatcagctgaagatctagatcttctaaatgctagttttcaagatgaaagcaaaattctgtacacgtggactccaggcactttgctgcactatggaagagctgagctgaagacttctgaccacaggcctgtcgttgccctgattgatatagatatatttgaagttgaagctgaagagaggcaaaacatttataaagaagtaattgcagttcagggtccaccagatggtacagtattggtctcaatcaaaagttctttaccagaaaataatttttttgatgatgccttgattgatgagcttctgcagcagtttgcaagttttggtgaagttatacttataagatttgtagaagataaaatgtgggttacatttttggagggaagctctgccttgaatgttctgagcctaaatggtaaagagttattgaatcggactataactattgctttaaaaagtccagactggatcaaaaatttggaagaagaaatgagtttagagaaaattagcattgcattgccatcatcaacaagctctaccctgcttggtgaagatgcagaggttgcagcagattttgatatggaaggtgatgttgatgactatagtgctgaagtggaggaacttcttcctcagcatctccagccatcttcaagttccggccttggtacttcccccagctcttcaccccgaactagtccctgccagtcacctacaatatcagagggtcctgtaccttcccttcccatcagaccaagccgagcaccgtcaagaactcctgggcctcccagtgcacagagttctcctattgacgcgcagccagcaacgccgctgccgcagaaagaccccgcccagcccttggagcccaagcggccgccgccgccccgcccggtcgcccctcccacacgcccggctcccccacagagacctcctccgccttcaggggctaggagtcctgcacccactagaaaggaatttggaggtattggagcccctcccagtcctggggtagctaggagagagatggaagcacccaaaagccctggaacaacaaggaaagataatataggacgcagtcagccttcacctcaagcaggacttgcaggcccaggacctgctggatacagtacagccagaccgacgattcctcctcgtgctggagttatcagtgccccacagagccacgcgcgggcatctgctggaagactgactcctgaaagccaaagcaaaacatcagaaacgtcgaaaggttcaactttccttcctgaaccactgaagcctcaggctgcttttcctccgcagtcttctttgcccccgcctgctcaaaggttgcaagagcctcttgtccctgtggcagcacctatgcctcagtctggcccccagccaaatttggaaaccccaccacaaccaccacctcgaagcaggtcatcccatagcttgccttcagaagcttcctcacaaccgcaacaggagcaaccatcagggtaacaggtaaaaacaaatggaatctctgatggcaaaagagaatcaccattaaagattgacccatttgaagatctgtcatttaatctgcttgctgtatcaaaggctcagctatctgttcaaacgtcacctgttcccaccccagacccaaagaggttgattcagttgccttctgcaacgcaaagtaatgttaatactttgagttctgtaagttgcatgccaacaatgcctccaattccagctcggagtcaatcccaggaaaatatgcgaagttctccaaacccatttattactggcttgaccaggacaaatcctttcagtgacaggactgctgctcctggaaacccatttagagccaagtctgaagaatcagaggcaacttcatggttctccaaagaagagcccgttactatcagtcctttcccttctctgcagcctcttggtcataacaaaagcagggcttcatcttcacttgatggctttaaggacagttttgatctacagggccagtctacattaaaaattagcaacccgaaaggatgggtaaccttcgaggaagaagaggattttggtgtgaaagggaagtcaaagtcagcttgttcagacttactgggtaatcagccaagttcattttctggctccaacctgacattgaatgatgactggaataaagggacaaatgtctccttctgtgtgttgccgtcaagaagacctcctccacctcctgtccctctgctcccgcccggcaccagccctccagtagatcctttcacgaccttggcctctaaggcttcacccacactggactttacagaaagataacgccagcccg

SEQ ID NO: 1403 - protein, 1575 aa, Homo sapiens
  ref <308>: DATABASE ACCESSION NUMBER: SWISS-Prot / O43426
  ref <309>: DATABASE ENTRY DATE: 2002-06-15
MAFSKGFRIYHKLDPPPFSLIVETRHKEECLMFESGAVAVLSSAEKEAIKGTYSKVLDAYGLLGVLRLNLGDTMLHYLVLVTGCMSVGKIQESEVFRVTSTEFISLRIDSSDEDRISEVRKVLNSGNFYFAWSASGISLDLSLNAHRSMQEQTTDNRFFWNQSLHLHLKHYGVNCDDWLLRLMCGGVEIRTIYAAHKQAKACLISRLSCERAGTRFNVRGTNDDGHVANFVETEQVVYLDDSVSSFIQIRGSVPLFWEQPGLQVGSHRVRMSRGFEANAPAFDRHFRTLKNLYGRQIIVNLLGSKEGEHMLSKAFQSHLKASEHAADIQMVNFDYHQMVKGGKAEKLHSVLKPQVQKFLDYGFFYFNGSEVQRCQSGTVRTNCLDCLDRTNSVQAFLGLEMLAKQLEALGLAEKPQLVTRFQEVFRSMWSVNGDSISKIYAGTGALEGKAKLKDGARSVTRTIQNNFFDSSKQEAIDVLLLGNTLNSDLADKARALLTTGSLRVSEQTLQSASSKVLKSMCENFYKYSKPKKIRVCVGTWNVNGGKQFRSIAFKNQTLTDWLLDAPKLAGIQEFQDKRSKPTDIFAIGFEEMVELNAGNIVSASTTNQKLWAVELQKTISRDNKYVLLASEQLVGVCLFVFIRPQHAPFIRDVAVDTVKTGMGGATGNKGAVAIRMLFHTTSLCFVCSHFAAGQSQVKERNEDFIEIARKLSFPMGRMLFSHDYVFWCGDFNYRIDLPNEEVKELIRQQNWDSLIAGDQLINQKNAGQVFRGFLEGKVTFAPTYKYDLFSDDYDTSEKCRTPAWTDRVLWRRRKWPFDRSAEDLDLLNASFQDESKILYTWTPGTLLHYGRAELKTSDHRPVVALIDIDIFEVEAEERQNIYKEVIAVQGPPDGTVLVSIKSSLPENNFFDDALIDELLQQFASFGEVILIRFVEDKMWVTFLEGSSALNVLSLNGKELLNRTITIALKSPDWIKNLEEEMSLEKISIALPSSTSSTLLGEDAEVAADFDMEGDVDDYSAEVEELLPQHLQPSSSSGLGTSPSSSPRTSPCQSPTISEGPVPSLPIRPSRAPSRTPGPPSAQSSPIDAQPATPLPQKDPAQPLEPKRPPPPRPVAPPTRPAPPQRPPPPSGARSPAPTRKEFGGIGAPPSPGVARREMEAPKSPGTTRKDNIGRSQPSPQAGLAGPGPAGYSTARPTIPPRAGVISAPQSHARASAGRLTPESQSKTSETSKGSTFLPEPLKPQAAFPPQSSLPPPAQRLQEPLVPVAAPMPQSGPQPNLETPPQPPPRSRSSHSLPSEASSQPQVKTNGISDGKRESPLKIDPFEDLSFNLLAVSKAQLSVQTSPVPTPDPKRLIQLPSATQSNVNTLSSVSCMPTMPPIPARSQSQENMRSSPNPFITGLTRTNPFSDRTAAPGNPFRAKSEESEATSWFSKEEPVTISPFPSLQPLGHNKSRASSSLDGFKDSFDLQGQSTLKISNPKGWVTFEEEEDFGVKGKSKSACSDLLGNQPSSFSGSNLTLNDDWNKGTNVSFCVLPSRRPPPPPVPLLPPGTSPPVDPFTTLASKASPTLDFTER

SEQ ID NO: 1404 - DNA, 1514 bp, Rattus norvegicus
  ref <308>: DATABASE ACCESSION NUMBER: EMBL / AJ006971
  ref <309>: DATABASE ENTRY DATE: 1998-12-16
tgaacccgcaggtttgcaccggaggctctcgcgggggcctcgctggccctgggcggggactcgcgggctgaggacgctcctgtgtccccagaatcctgcagaaggacagcgccatgtccacgttcaggcaggaggacgttgaggaccattatgagatgggagaggagcttggcagcggccagttcgccatcgtgcgcaagtgccagcagaagggcaccggcatggagtacgcggccaagttcataaagaagcggcgcctgccgtccagccggcgcggtgtgagccgtgaggagatcgagcgcgaggtgagcatcctgcgcgagatccgccaccccaacatcatcacgctgcacgatgtgttcgagaacaagacagatgtggtgctgatcttggagctggtgtccggcggcgaacttttcgactttctggctgagaaggagtcactgacagaggatgaggccacgcagttcctcaagcagatcctggacggtgtccactacctgcactccaagcgcatcgcgcactttgacctgaagccggagaacatcatgttgctggacaagcatgcagccagcccacgcattaagctcatcgactttggcatcgcgcacaggatcgaggccggtagcgagttcaagaacatctttggcacgccagagttcgtcgcccctgagattgtaaactatgaaccacttggcttggaagctgatatgtggagcatcggcgtcatcacctacatcctcctgagcggggcttccccattcctgggggagaccaagcaggaaacgctgacaaacatctcggctgtgaactatgactttgatgaagagtacttcagcagcaccagtgaactggccaaggacttcatccgaaggctgctggtcaaagatcccaagaggaggatgaccatcgcacagagcctggagcattcctggatcaaggttcgccggcgtgaggacggcgcccggaagccagagcgacgccgactgcgcgcggcgcgcctgcgcgagtacagtctcaagtcgcactcaagcatgccgcgaaacacgagctacgccagcttcgagcgcttctcgcgcgtgctggaggacgtggcggcggcggagcaggggctgcgcgagctgcagcggggccggcggcagtgccgggagcgcgtgtgcgcgctgcgcgtggctgcggaacagcgggaggcgcgctgccgcgacgggagcgccgggctaggccgcgacctgcgacgcctgcgcacggagctgggtcgcaccgaggctctgcgcacgcgcgcgcaggaggaggcacgggcagcgctcttgggcgctggtggcctgaaacgtcgcctgtgtcgccttgagaaccgctacgacgcgctagccgcacaggtggctgctgaggtgcagttcgtgcgcgatctggtacgcgcgctggagcaggagcggctgcaggccgagtgcggcgtgcgctaggctgcgacacccccagatctccggccatccccagaataaagctactttccacgc

SEQ ID NO: 1405 - protein, 448 aa, Rattus norvegicus
  ref <308>: DATABASE ACCESSION NUMBER: SWISS-Prot / CAA07360
  ref <309>: DATABASE ENTRY DATE: 2003-02-01
MSTFRQEDVEDHYEMGEELGSGQFAIVRKCQQKGTGMEYAAKFIKKRRLPSSRRGVSREEIEREVSILREIRHPNIITLHDVFENKTDVVLILELVSGGELFDFLAEKESLTEDEATQFLKQILDGVHYLHSKRIAHFDLKPENIMLLDKHAASPRIKLIDFGIAHRIEAGSEFKNIFGTPEFVAPEIVNYEPLGLEADMWSIGVITYILLSGASPFLGETKQETLTNISAVNYDFDEEYFSSTSELAKDFIRRLLVKDPKRRMTIAQSLEHSWIKVRRREDGARKPERRRLRAARLREYSLKSHSSMPRNTSYASFERFSRVLEDVAAAEQGLRELQRGRRQCRERVCALRVAAEQREARCRDGSAGLGRDLRRLRTELGRTEALRTRAQEEARAALLGAGGLKRRLCRLENRYDALAAQVAAEVQFVRDLVRALEQERLQAECGVR

SEQ ID NO: 1406 - DNA, 2055 bp, Homo sapiens
  ref <308>: DATABASE ACCESSION NUMBER: EMBL / AB022341
  ref <309>: DATABASE ENTRY DATE: 2002-04-20
gcactttccctggagtggaagctgctggaaggcggaccggccgccatgtccacgttcaggcaggaggacgtggaggaccattatgagatgggggaggagctgggcagcggccagtttgcgatcgtgcggaagtgccggcagaagggcacgggcaaggagtacgcagccaagttcatcaagaagcgccgcctgtcatccagccggcgtggggtgagccgggaggagatcgagcgggaggtgaacatcctgcgggagatccggcaccccaacatcatcaccctgcacgacatcttcgagaacaagacggacgtggtcctcatcctggagctggtctctggcggggagctctttgacttcctggcggagaaggagtcgctgacggaggacgaggccacccagttcctcaagcagatcctggacggcgttcactacctgcactctaagcgcatcgcacactttgacctgaagccggaaaacatcatgctgctggacaagaacgtgcccaacccacgaatcaagctcatcgacttcggcatcgcgcacaagatcgaggcggggaacgagttcaagaacatcttcggcaccccggagtttgtggccccagagattgtgaactatgagccgctgggcctggaggcggacatgtggagcatcggtgtcatcacctatatcctcctgagcggtgcatccccgttcctgggcgagaccaagcaggagacgctcaccaacatctcagccgtgaactacgacttcgacgaggagtacttcagcaacaccagcgagctggccaaggacttcattcgccggctgctcgtcaaagatcccaagcggagaatgaccattgcccagagcctggaacattcctggattaaggcgatccggcggcggaacgtgcgtggtgaggacagcggccgcaagcccgagcggcggcgcctgaagaccacgcgtctgaaggagtacaccatcaagtcgcactccagcttgccgcccaacaacagctacgccgacttcgagcgcttctccaaggtgctggaggaggcggcggccgccgaggagggcctgcgcgagctgcagcgcagccggcggctctgccacgaggacgtggaggcgctggccgccatctacgaggagaaggaggcctggtaccgcgaggagagcgacagcctgggccaggacctgcggaggctacggcaggagctgctcaagaccgaggcgctcaagcggcaggcgcaggaggaggccaagggcgcgctgctggggaccagcggcctcaagcgccgcttcagccgcctggagaaccgctacgaggcgctggccaagcaagtagcctccgagatgcgcttcgtgcaggacctcgtgcgcgccctggagcaggagaagctgcagggcgtggagtgcgggctgcgctaggcgcagtggggtgggccaggccccaggacagccggagctcggcctgcggtgggggcgcttcctgtggacgctgcgcctcccatcgcccgggtgcctgtccttgcccagcgccaccaggctggaggcggagtgggaggagctggagccaggcccgtaagttcgcaggcaggggtgggtgtgggacggggctgcttctctacacatcctccacgctggccttcaccttcacccctgcatcgtcggtgaccctgggaccctccaggcagcgtggcctgtggcaccgtgagggttgggacccaccgaggcgcagaggcggcccgaatgcagccctggttcaggcccggaggagggtttgcgggtagttgcacggacaattcggcggggtgctgcctgttgctgccattagcccaggaggaggtcgtgggacggggagggtgggatggacggcggacaggcagtccccacgctgctgggtggcgccgggcttggtggggtcttccactgtgtgcccttctcgccgaggccggtcccccgggtgtggggtgccctgctgcggactcctccgcgagccccatcgtcgcgcctgtggacgcctaggcaagagcggccctctgcagccaagagaaataaaatactggcttccag

SEQ ID NO: 1407 - protein, 454 aa, Homo sapiens
  ref <308>: DATABASE ACCESSION NUMBER: Refseq / NP_001339
  ref <309>: DATABASE ENTRY DATE: 2000-10-31
MSTFRQEDVEDHYEMGEELGSGQFAIVRKCRQKGTGKEYAAKFIKKRRLSSSRRGVSREEIEREVNILREIRHPNIITLHDIFENKTDVVLILELVSGGELFDFLAEKESLTEDEATQFLKQILDGVHYLHSKRIAHFDLKPENIMLLDKNVPNPRIKLIDFGIAHKIEAGNEFKNIFGTPEFVAPEIVNYEPLGLEADMWSIGVITYILLSGASPFLGETKQETLTNISAVNYDFDEEYFSNTSELAKDFIRRLLVKDPKRRMTIAQSLEHSWIKAIRRRNVRGEDSGRKPERRRLKTTRLKEYTIKSHSSLPPNNSYADFERFSKVLEEAAAAEEGLRELQRSRRLCHEDVEALAAIYEEKEAWYREESDSLGQDLRRLRQELLKTEALKRQAQEEAKGALLGTSGLKRRFSRLENRYEALAKQVASEMRFVQDLVRALEQEKLQGVECGLR

SEQ ID NO: 1408 - DNA, 1514 bp, Rattus norvegicus; identical to SEQ ID NO: 1404
  ref <308>: DATABASE ACCESSION NUMBER: EMBL / AJ006971
  ref <309>: DATABASE ENTRY DATE: 1998-12-16

SEQ ID NO: 1409 - protein, 448 aa, Rattus norvegicus; identical to SEQ ID NO: 1405
  ref <308>: DATABASE ACCESSION NUMBER: SWISS-Prot / CAA07360
  ref <309>: DATABASE ENTRY DATE: 2003-02-01

SEQ ID NO: 1410 - DNA, 2055 bp, Homo sapiens; identical to SEQ ID NO: 1406
  ref <308>: DATABASE ACCESSION NUMBER: EMBL / AB022341
  ref <309>: DATABASE ENTRY DATE: 2002-04-20

SEQ ID NO: 1411 - protein, 454 aa, Homo sapiens; identical to SEQ ID NO: 1407
  ref <308>: DATABASE ACCESSION NUMBER: Refseq / NP_001339
  ref <309>: DATABASE ENTRY DATE: 2000-10-31

SEQ ID NO: 1412 - DNA, 1095 bp, Rattus norvegicus
  ref <308>: DATABASE ACCESSION NUMBER: EMBL / AJ007016
  ref <309>: DATABASE ENTRY DATE: 1998-11-17
aaattgcaagcgtattcttttaatgactccagtaaaattaagcatcaagtaaacaaaagtggaaaagaacctacacttttaacttgtctcactagtgcctaaatgtagtttaaaggctgcttaaattttgtgtgtagttggattttttggaagctgaaggtatccatctgcagacattgaggcccaagttgaatttggattcgagtggattcttaacacttctgcctgtgctgaagagaagcttcataaggaacaagcaagttgaatagagaagatagtgatcaataagaggcatttagtggtctttttaatgttttctgctgcgaaacatttcaagatttattgatttttttttttcattttccccaccacactcacacacgcacgctcacactttttatttgccataatgaaccgtccagcccctgtggagatctcgtacgagaacatgcgttttctgataactcacaacccagccaatgcgactctcaacaagttcaccgaggaactcaagaagtacggagtgacaactttggtccgagtttgtgatgctacctatgacaaagctccagttgaaaaagaagggatccacgttctagactggccatttgatgacggagctccgccccctaatcagatagtagatgattggctaaacctgttaaagaccaaattccgggaagaaccaggctgctgtgtcgcagtgcattgtgttgcaggattgggaagggctcctgtgctagttgcacttgcactgattgaatgcggaatgaagtatgaagatgctgttcagtttataagacaaaaaagaagaggagcattcaattccaaacagctgctttacttggagaaataccgacctaagatgcgattacgctccagagataccaacgggcactgctgtgttcagtagaagcagaggaaggccggctggatcgtggcattagagggaactctgggtacctggaaatgtgaatctggattcttacctgtgtcatcaaagtagtgatggattccgtactcctcgactcctcatgattgagaagaaggcaaacgataaagaaatccctctataacacgaataaaatgtttaag

SEQ ID NO: 1413 - protein, 167 aa, Rattus norvegicus
  ref <308>: DATABASE ACCESSION NUMBER: SWISS-Prot / CAA07417
  ref <309>: DATABASE ENTRY DATE: 2003-02-01
MNRPAPVEISYENMRFLITHNPANATLNKFTEELKKYGVTTLVRVCDATYDKAPVEKEGIHVLDWPFDDGAPPPNQIVDDWLNLLKTKFREEPGCCVAVHCVAGLGRAPVLVALALIECGMKYEDAVQFIRQKRRGAFNSKQLLYLEKYRPKMRLRSRDTNGHCCVQ

SEQ ID NO: 1414 - DNA, 439 bp, Homo sapiens
  ref <308>: DATABASE ACCESSION NUMBER: EMBL / AI816111
  ref <309>: DATABASE ENTRY DATE: 2000-03-04
gctggagcggcagcggcggccgggcacggcgcgaggtgacgccgccgccgccgccgccgaggtgactgaggagagaggcgcctcctcgctcccgccaccgccggacttcaatgcccagtccccagctcgccagcgtttttcgttggaatatacgttgcacatttatggcgattctgagtgtgagggcagacttctgccaggctcagcacagcattttcgctgacaagtgagcttggaggttctatgtgccataattaacattgccttgaagactcctggacaccgagactggcctcagaaatagttggctttttttttttttaattgcaagcatatttcttttaatgactccagtaaaattaagcatcaagtaaacaagtggaaagtgacctacacttttaacttgtctcactagtgcctaaatgtagtaaaggcttgc

SEQ ID NO: 1415 - protein, 167 aa, Homo sapiens
  ref <308>: DATABASE ACCESSION NUMBER: Refseq / NP_003470
  ref <309>: DATABASE ENTRY DATE: 2002-01-09
MNRPAPVEISYENMRFLITHNPTNATLNKFTEELKKYGVTTLVRVCDATYDKAPVEKEGIHVLDWPFDDGAPPPNQIVDDWLNLLKTKFREEPGCCVAVHCVAGLGRAPVLVALALIECGMKYEDAVQFIRQKRRGAFNSKQLLYLEKYRPKMRLRFRDTNGHCCVQ

SEQ ID NO: 1416 - DNA, 1077 bp, Rattus norvegicus
  ref <308>: DATABASE ACCESSION NUMBER: EMBL / AJ007291
  ref <309>: DATABASE ENTRY DATE: 1998-11-11
tccgccaaagttttgatgcctgggaaccgcgcaggaaaaacacgcggaacgtgcttcacagtggcggctaactgctctcgttcgcggtgcagagccgtctggcagggttgacctcctaaagggatattccatctttattaattccagacatttcagcagtttatcggaacagcaacaacagcaacaaaaccttcaaaatttacaagtctttaagaaatagaaatggcatccaaaagagctctggtcatcctagccaaaggagcagaggagatggagacagtgattcctgtggacatcatgcggcgagctgggattaaagtcaccgttgcaggcttggctgggaaggaccccgtgcagtgtagccgtgatgtagtgatttgtccggataccagtctggaagaagcaaaaacacagggaccatacgatgtggttgttcttccaggaggaaatctgggtgcacagaacttatctgagtcggctttggtgaaggagatcctcaaggagcaggagaacaggaagggcctcatagctgccatctgtgcgggtcctacggccctgctggctcacgaagtaggctttggatgcaaggttacatcgcacccattggctaaggacaaaatgatgaacggcagtcactacagctactcagagagccgtgtggaaaaggacggcctcatcctcaccagccgtgggcctgggaccagcttcgagtttgcgctggccattgtggaggcactcagtggcaaggacatggctaaccaagtgaaggccccacttgttctcaaagactagagcccaagccctagaccctggacccccaggctgagcaggcattggaagcccactagtgtgtccacagcccagtgaacctcaggaactaacgtgtgaagtagcccgctgctcaggaatctcgccctggctctgtactattctgagccttgctagtagaataaacagttccccaagcggaattcccaaaaaaaaagacttggtatttgttggctgttgatttcactgcagcctcaggcatctcatcaatccgggccggccaatgtgggtatcccttcatcgtcgcga

SEQ ID NO: 1417 - protein, 189 aa, Rattus norvegicus
  ref <308>: DATABASE ACCESSION NUMBER: SWISS-Prot / CAA07434
  ref <309>: DATABASE ENTRY DATE: 2003-02-01
MASKRALVILAKGAEEMETVIPVDIMRRAGIKVTVAGLAGKDPVQCSRDVVICPDTSLEEAKTQGPYDVVVLPGGNLGAQNLSESALVKEILKEQENRKGLIAAICAGPTALLAHEVGFGCKVTSHPLAKDKMMNGSHYSYSESRVEKDGLILTSRGPGTSFEFALAIVEALSGKDMANQVKAPLVLKD

SEQ ID NO: 1418 - DNA, 1077 bp, Rattus norvegicus; identical to SEQ ID NO: 1416
  ref <308>: DATABASE ACCESSION NUMBER: EMBL / AJ007291
  ref <309>: DATABASE ENTRY DATE: 1998-11-11

SEQ ID NO: 1419 - protein, 189 aa, Rattus norvegicus; identical to SEQ ID NO: 1417
  ref <308>: DATABASE ACCESSION NUMBER: SWISS-Prot / CAA07434
  ref <309>: DATABASE ENTRY DATE: 2003-02-01

SEQ ID NO: 1420 - DNA, 3595 bp, Rattus norvegicus
  ref <308>: DATABASE ACCESSION NUMBER: EMBL / AJ007627
  ref <309>: DATABASE ENTRY DATE: 1998-10-05
ggcggtccccgccgcctaagatgccggccatgcgggggctccttgcgccgcagaacaccttcctggacaccatcgccacccgcttcgacgggacgcacagtaacttcgtcctgggcaacgcccaggtggcagggctcttccctgtggtctactgctccgatggcttctgtgacctcacgggtttctccagagctgaggtcatgcagcgaggctgtgcctgctccttcctctatgggccagacaccagtgagttggtccgccaacagatccgaaaagccctggatgagcacaaagaattcaaggctgaactgatcctgtaccggaagagcgggcttccattctggtgtctcctggatgtgatacctataaaaaacgagaagggggaggtggccctcttcctggtctctcacaaggacatcagtgagaccaagaaccgaggaggccctgacaactggaaggagagaggtggtggccgacgcagatatggtcgggcaggatccaaaggctttaatgccaatcggaggcgcagccgggcggttctctaccacctctctggtcacctgcagaaacaacccaagggcaagcacaaactcaataagggtgtgtttggagagaagccaaatttgcccgaatataaagtcgctgctatccggaagtcaccctttatcctgctgcactgtggggctctgagagccacctgggatggcttcatcctgctcgccacgctctacgtggctgtcactgtgccatacagcgtgtgtgtgagcacagcacgggagcccagtgctgcccgtggcccacctagtgtctgtgacctggccgtggaagtcctcttcatcttagatattgtgctgaattttcgtactacatttgtgtccaagtcaggccaggtggtattcgccccaaagtccatttgcctccactacgtcaccacctggttcctgctggatgtcatagcagcactgccctttgacctactacatgccttcaaggtcaatgtgtacgttggggctcacctactgaagaccgtgcggctgcttcggctgctgcgcctactaccaagactggaccggtactctcagtatagcgctgttgtgctcaccttgctcatggctgtgtttgccctgctcgcccactgggtggcctgcgtttggttctacatcggccagcaagagattgagaacagcgagtcagagctgcctgagatcggctggctgcaggagctggcacgcaggctggagacgccctattacctggtgagccggagtccagatggagggaacagctctggccagagtgaaaactgcagtagcagtggcggcggcagcgaagccaacgggactgggctggagctgctgggtggcccatccctacgcagcgcctacatcacctccttgtacttcgcgctcagcagtctcaccagtgtgggcttcggcaatgtgtccgctaacacagacactgagaagattttctccatctgcaccatgcttattggagctctgatgcatgcagtggtgtttgggaatgtgacagccatcatccagcgcatgtacgctcgccgctttctgtaccacagccgcacccgtgacctgcgagactacattcgcatccaccgcatccccaagcccctcaagcagcgcatgctcgagtacttccaagccacctgggccgtgaacaacggcatcgataccactgagctgctgcagagccttccggatgagcttcgagcagacatcgccatgcacctgcacaaggaggtcctgcagctgccattgttcgaggcagcgagccgtggctgcctgcgggcactgtctctggccctgaggcccgccttctgcacgccgggcgagtacctcattcaccaaggcgatgctctccaggctctctactttgtgtgctcaggttccatggaggtcctcaaaggtggcaccgtcctcgccattctagggaagggtgacctgatcggctgtgagctgccccagcgagagcaagtagtgaaggccaatgccgacgtaaaggggctgacatactgcgtcctacagtgcctgcagctggctgggctgcacgagagcctcgcactgtaccctgagtttgccccacgctttagccgtggcctccgaggggagctcagctacaacctgggagctggaggagtgtctgcagaggtggataccagctcactgagtggtgacaacaccctcatgtccacactggaggagaaggagacagatggggagcaaggacacacgatctcaccagccccagcagatgagccctccagccccctgctgtcacctggctgtacctcctcctcctcagcggccaaactactctccccacgtcgaactgcaccccggccgaggctgggtggcagagggcggccaagtagggcaggggttttgaagcctgaggctggtccttctgctcatccacggacacttgatgggttgcagctgccccccatgccatggaatgtacctccagacctgagccccagggtcgtagatggcattgaggatggctgcggctctgaccagcacaagttctctttccgggtgggtcagtctggcccagaatgtagcagcagcccctccccaggaacagagagtggcctgctcactgtccccttggtgcccagtgaggcaagaaacacagacacactggacaagctacggcaggcggtgacggagctgtctgaacaggtgctgcagatgcgagagggactgcagtcacttcgccaggctgtgcagctcatcctggtgccccaaggggaaggccagtgtccccgggtatcaggagaggggccatgcccagccactgcctctgggctcctacaacccctgcgtgtggacactggggcatcatcctactgcctgcagcccccagcaggttcagtcttgagtgggacctggcctcacccccgtccagggcatccccctcccctcatggcaccctggccctggggccccccagcatctcagagctccccctggcctcgagccacagctttatggacctccacctcagactcagagccccctggctctggagacctctgctctgagcccagcaccccagcctcaccccctcctcctgaggaaggagctaggactgggactcctgcacctgtgagccaggctgaggctaccagtactggagagccccctccggggtcagggggccgagccttgccctgggatccccacagcctagagatggtgctcatcggctgccatggccctggctcggtccagtggacccaggaggagggcacaggagtctgaccacaggcagggagaggggttctgcaaacacccgccacctgctgaccgcccagcctcacagggctgccctctggctcagggcagggaacctaaggaaggaggagggtgagctggagcctcaggcccaggagggatccacgggttctgctccactgacctgacccaatgggggcagaggcctgaggacgaggaggggttctgccattccttgcatgtgcccatctccactgtcctctgtcctcatgttttttatattaaaaaacataaaaaaaaaccaataaagaaactaccttggaaaaaaaaaaaaaaaa

SEQ ID NO: 1421 - protein, 1087 aa, Rattus norvegicus
  ref <308>: DATABASE ACCESSION NUMBER: SWISS-Prot / CAA07586
  ref <309>: DATABASE ENTRY DATE: 2002-06-15
MPAMRGLLAPQNTFLDTIATRFDGTHSNFVLGNAQVAGLFPVVYCSDGFCDLTGFSRAEVMQRGCACSFLYGPDTSELVRQQIRKALDEHKEFKAELILYRKSGLPFWCLLDVIPIKNEKGEVALFLVSHKDISETKNRGGPDNWKERGGGRRRYGRAGSKGFNANRRRSRAVLYHLSGHLQKQPKGKHKLNKGVFGEKPNLPEYKVAAIRKSPFILLHCGALRATWDGFILLATLYVAVTVPYSVCVSTAREPSAARGPPSVCDLAVEVLFILDIVLNFRTTFVSKSGQVVFAPKSICLHYVTTWFLLDVIAALPFDLLHAFKVNVYVGAHLLKTVRLLRLLRLLPRLDRYSQYSAVVLTLLMAVFALLAHWVACVWFYIGQQEIENSESELPEIGWLQELARRLETPYYLVSRSPDGGNSSGQSENCSSSGGGSEANGTGLELLGGPSLRSAYITSLYFALSSLTSVGFGNVSANTDTEKIFSICTMLIGALMHAVVFGNVTAIIQRMYARRFLYHSRTRDLRDYIRIHRIPKPLKQRMLEYFQATWAVNNGIDTTELLQSLPDELRADIAMHLHKEVLQLPLFEAASRGCLRALSLALRPAFCTPGEYLIHQGDALQALYFVCSGSMEVLKGGTVLAILGKGDLIGCELPQREQVVKANADVKGLTYCVLQCLQLAGLHESLALYPEFAPRFSRGLRGELSYNLGAGGVSAEVDTSSLSGDNTLMSTLEEKETDGEQGHTISPAPADEPSSPLLSPGCTSSSSAAKLLSPRRTAPRPRLGGRGRPSRAGVLKPEAGPSAHPRTLDGLQLPPMPWNVPPDLSPRVVDGIEDGCGSDQHKFSFRVGQSGPECSSSPSPGTESGLLTVPLVPSEARNTDTLDKLRQAVTELSEQVLQMREGLQSLRQAVQLILVPQGEGQCPRVSGEGPCPATASGLLQPLRVDTGASSYCLQPPAGSVLSGTWPHPRPGHPPPLMAPWPWGPPASQSSPWPRATALWTSTSDSEPPGSGDLCSEPSTPASPPPPEEGARTGTPAPVSQAEATSTGEPPPGSGGRALPWDPHSLEMVLIGCHGPGSVQWTQEEGTGV

SEQ ID NO: 1422 - DNA, 3853 bp, Homo sapiens
  ref <308>: DATABASE ACCESSION NUMBER: EMBL / AB033108
  ref <309>: DATABASE ENTRY DATE: 1999-11-11
ggccgcggggcctggagcccgggatttgtgggcggcgagggcgcgaggggccgcgcgccatgctccgggccccgacggcgcggacgccccctcgcgcgccagcgtccggcgcgaccccggatcccggtctgcgcattgccccccgacggctgcgctagggagcgcggggcccggcggggggcggccgagctgggcgccctcccccggcgcggagtccccgcaccccggagggatggggcgggcagccgcgggcgcctaagatgccggccatgcggggcctcctggcgccgcagaacaccttcctggacaccatcgctacgcgcttcgacggcacgcacagtaacttcgtgctgggcaacgcccaggtggcggggctcttccccgtggtctactgctctgatggcttctgtgacctcacgggcttctcccgggctgaggtcatgcagcggggctgtgcctgctccttcctttatgggccagacaccagtgagctcgtccgccaacagatccgcaaggccctggacgagcacaaggagttcaaggctgagctgatcctgtaccggaagagcgggctcccgttctggtgtctcctggatgtgatacccataaagaatgagaaaggggaggtggctctcttcctagtctctcacaaggacatcagcgaaaccaagaaccgagggggccccgacagatggaaggagacaggtggtggccggcgccgatatggccgggcacgatccaaaggcttcaatgccaaccggcggcggagccgggccgtgctctaccacctgtccgggcacctgcagaagcagcccaagggcaagcacaagctcaataagggggtgtttggggagaaaccaaacttgcctgagtacaaagtagccgccatccggaagtcgcccttcatcctgttgcactgtggggcactgagagccacctgggatggcttcatcctgctcgccacactctatgtggctgtcactgtgccctacagcgtgtgtgtgagcacagcacgggagcccagtgccgcccgcggcccgcccagcgtctgtgacctggccgtggaggtcctcttcatccttgacattgtgctgaatttccgtaccacattcgtgtccaagtcgggccaggtggtgtttgccccaaagtccatttgcctccactacgtcaccacctggttcctgctggatgtcatcgcagcgctgccctttgacctgctacatgccttcaaggtcaacgtgtacttcggggcccatctgctgaagacggtgcgcctgctgcgcctgctgcgcctgcttccgcggctggaccggtactcgcagtacagcgccgtggtgctgacactgctcatggccgtgttcgccctgctcgcgcactgggtcgcctgcgtctggttttacattggccagcgggagatcgagagcagcgaatccgagctgcctgagattggctggctgcaggagctggcccgccgactggagactccctactacctggtgggccggaggccagctggagggaacagctccggccagagtgacaactgcagcagcagcagcgaggccaacgggacggggctggagctgctgggcggcccgtcgctgcgcagcgcctacatcacctccctctacttcgcactcagcagcctcaccagcgtgggcttcggcaacgtgtccgccaacacggacaccgagaagatcttctccatctgcaccatgctcatcggcgccctgatgcacgcggtggtgtttgggaacgtgacggccatcatccagcgcatgtacgcccgccgctttctgtaccacagccgcacgcgcgacctgcgcgactacatccgcatccaccgtatccccaagcccctcaagcagcgcatgctggagtacttccaggccacctgggcggtgaacaatggcatcgacaccaccgagctgctgcagagcctccctgacgagctgcgcgcagacatcgccatgcacctgcacaaggaggtcctgcagctgccactgtttgaggcggccagccgcggctgcctgcgggcactgtctctggccctgcggcccgccttctgcacgccgggcgagtacctcatccaccaaggcgatgccctgcaggccctctactttgtctgctctggctccatggaggtgctcaagggtggcaccgtgctcgccatcctagggaagggcgacctgatcggctgtgagctgccccggcgggagcaggtggtaaaggccaatgccgacgtgaaggggctgacgtactgcgtcctgcagtgtctgcagctggctggcctgcacgacagccttgcgctgtaccccgagtttgccccgcgcttcagtcgtggcctccgaggggagctcagctacaacctgggtgctgggggaggctctgcagaggtggacaccagctccctgagcggcgacaatacccttatgtccacgctggaggagaaggagacagatggggagcagggccccacggtctccccagccccagctgatgagccctccagccccctgctgtcccctggctgcacctcctcatcctcagctgccaagctgctatccccacgtcgaacagcaccccggcctcgtctaggtggcagagggaggccaggcagggcaggggctttgaaggctgaggctggcccctctgctcccccacgggccctagaggggctacggctgccccccatgccatggaatgtgcccccagatctgagccccagggtagtagatggcattgaagacggctgtggctcggaccagcccaagttctctttccgcgtgggccagtctggcccggaatgtagcagcagcccctcccctggaccagagagcggcctgctcactgttccccatgggcccagcgaggcaaggaacacagacacactggacaagcttcggcaggcggtgacagagctgtcagagcaggtgctgcagatgcgggaaggactgcagtcacttcgccaggctgtgcagcttgtcctggcgccccacagggagggtccgtgccctcgggcatcgggagaggggccgtgcccagccagcacctccgggcttctgcagcctctgtgtgtggacactggggcatcctcctactgcctgcagcccccagctggctctgtcttgagtgggacttggccccaccctcgtccggggcctcctcccctcatggcaccctggccctggggtcccccagcgtctcagagctccccctggcctcgagccacagctttctggacctccacctcagactcagagccccctgcctcaggagacctctgctctgagcccagcacccctgcctcccctcctccttctgaggaaggggctaggactgggcccgcagagcctgtgagccaggctgaggctaccagcactggagagcccccaccagggtcagggggcctggccttgccctgggacccccacagcctggagatggtgcttattggctgccatggctctggcacagtccagtggacccaggaagaaggcacaggggtctgagtaccagccctagaactcagcgttgccaggtgtgctgccatctgctgttcggcccaacctcagagtgaaggcagggtggcagcctccccacggactccatgcggcccgctggctcagggcagggagcctggaagcaaaggaggacctggctcctgactctcagagaggataggctggatccctggggcaggcctctcctcggcctgctcctctgacctcccggtctccctctgcaggctgggggcagaggcctgaggacaaggaagagctttgccatcccctgcatgtgcccctgcctctacctgtccccaaatttttatattaaaaaaaaaaaataaaat

SEQ ID NO: 1423 - protein, 1083 aa, Homo sapiens
  ref <308>: DATABASE ACCESSION NUMBER: Refseq / XP_035483
  ref <309>: DATABASE ENTRY DATE: 2002-08-01
MPAMRGLLAPQNTFLDTIATRFDGTHSNFVLGNAQVAGLFPVVYCSDGFCDLTGFSRAEVMQRGCACSFLYGPDTSELVRQQIRKALDEHKEFKAELILYRKSGLPFWCLLDVIPIKNEKGEVALFLVSHKDISETKNRGGPDRWKETGGGRRRYGRARSKGFNANRRRSRAVLYHLSGHLQKQPKGKHKLNKGVFGEKPNLPEYKVAAIRKSPFILLHCGALRATWDGFILLATLYVAVTVPYSVCVSTAREPSAARGPPSVCDLAVEVLFILDIVLNFRTTFVSKSGQVVFAPKSICLHYVTTWFLLDVIAALPFDLLHAFKVNVYFGAHLLKTVRLLRLLRLLPRLDRYSQYSAVVLTLLMAVFALLAHWVACVWFYIGQREIESSESELPEIGWLQELARRLETPYYLVGRRPAGGNSSGQSDNCSSSSEANGTGLELLGGPSLRSAYITSLYFALSSLTSVGFGNVSANTDTEKIFSICTMLIGALMHAVVFGNVTAIIQRMYARRFLYHSRTRDLRDYIRIHRIPKPLKQRMLEYFQATWAVNNGIDTTELLQSLPDELRADIAMHLHKEVLQLPLFEAASRGCLRALSLALRPAFCTPGEYLIHQGDALQALYFVCSGSMEVLKGGTVLAILGKGDLIGCELPRREQVVKANADVKGLTYCVLQCLQLAGLHDSLALYPEFAPRFSRGLRGELSYNLGAGGGSAEVDTSSLSGDNTLMSTLEEKETDGEQGPTVSPAPADEPSSPLLSPGCTSSSSAAKLLSPRRTAPRPRLGGRGRPGRAGALKAEAGPSAPPRALEGLRLPPMPWNVPPDLSPRVVDGIEDGCGSDQPKFSFRVGQSGPECSSSPSPGPESGLLTVPHGPSEARNTDTLDKLRQAVTELSEQVLQMREGLQSLRQAVQLVLAPHREGPCPRASGEGPCPASTSGLLQPLCVDTGASSYCLQPPAGSVLSGTWPHPRPGPPPLMAPWPWGPPASQSSPWPRATAFWTSTSDSEPPASGDLCSEPSTPASPPPSEEGARTGPAEPVSQAEATSTGEPPPGSGGLALPWDPHSLEMVLIGCHGSGTVQWTQEEGTGV

SEQ ID NO: 1424 - DNA, 1099 bp, Rattus norvegicus
  ref <308>: DATABASE ACCESSION NUMBER: EMBL / AJ007632
  ref <309>: DATABASE ENTRY DATE: 1998-10-05
gccccgcagaacacatttctggacactattgccacccgtttcgacggaacacatagcaacttcatcctggccaatgcccaagtggcaaaaggtttccccatagtctactgttcagatggcttctgtgagctggctgggtttgctcgaactgaagtcatgcagaagagttgcagctgcaagtttctgcttggggtggagaccaacgagcagctgatgcttcagatcgaaaagtccctggaggagaaggtagagttcaaaggagaaattatgttctacaagaagaatggggctccattttggtgcctgttggatatcgttcctataaagaatgagaaaggagatgtggtccttttcctggcctcattcaaagatataacagacacgaaagtgaagattacttcagaagataaaaaagaagacagagccaaaggaagatcaagagcagggagccacttcgactcagcccgcagacggagccgagcagtcctttatcacatctcaggacacctgcaaagaagagaaaagaacaaattgaacataaataataacgtgtttgtagataaaccggcgtttccagagtataaggtttccgatgcaaaaaagtccaagttcatcctgctgcacttcagcacttttaaagctggctgggactggctcattttgctggcaacgttttatgttgctgtgacagtcccttacaacgtgtgcttcattggcaatgaggatctgtccacaactcggagcacaacggtcagtgacatcgctgtggagattctcttcattatagatattattctaaatttccgaacaacttatgtcagcaagtctggccaagttatctttgaagcgagatccatttgcacccactacgtcaccacctggttcatcattgatctgattgctgccctgccctttgacctcctgtatgctttcaatgtcacagtggtgtccctcgtacatcttctgaagactgttcggctgctccgtcttttgcgcctcctgcagaagctggaccgttattctcagcacagcacaattgtcctcaccctgctcatgtccatgtttgctctccttgcacactggatagcctgcatctggt

SEQ ID NO: 1425 - protein, 366 aa, Rattus norvegicus
  ref <308>: DATABASE ACCESSION NUMBER: SWISS-Prot / CAA07591
  ref <309>: DATABASE ENTRY DATE: 2002-06-15
APQNTFLDTIATRFDGTHSNFILANAQVAKGFPIVYCSDGFCELAGFARTEVMQKSCSCKFLLGVETNEQLMLQIEKSLEEKVEFKGEIMFYKKNGAPFWCLLDIVPIKNEKGDVVLFLASFKDITDTKVKITSEDKKEDRAKGRSRAGSHFDSARRRSRAVLYHISGHLQRREKNKLNINNNVFVDKPAFPEYKVSDAKKSKFILLHFSTFKAGWDWLILLATFYVAVTVPYNVCFIGNEDLSTTRSTTVSDIAVEILFIIDIILNFRTTYVSKSGQVIFEARSICTHYVTTWFIIDLIAALPFDLLYAFNVTVVSLVHLLKTVRLLRLLRLLQKLDRYSQHSTIVLTLLMSMFALLAHWIACIW

SEQ ID NO: 1426 - DNA, 1099 bp, Rattus norvegicus; identical to SEQ ID NO: 1424
  ref <308>: DATABASE ACCESSION NUMBER: EMBL / AJ007632
  ref <309>: DATABASE ENTRY DATE: 1998-10-05

SEQ ID NO: 1427 - protein, 366 aa, Rattus norvegicus; identical to SEQ ID NO: 1425
  ref <308>: DATABASE ACCESSION NUMBER: SWISS-Prot / CAA07591
  ref <309>: DATABASE ENTRY DATE: 2002-06-15

SEQ ID NO: 1428 - DNA, 1458 bp, Rattus norvegicus
  ref <308>: DATABASE ACCESSION NUMBER: EMBL / AJ009698
  ref <309>: DATABASE ENTRY DATE: 1998-07-24
ttaccagcaagtgtgcatagggacaaacggagaccgatcgcagcaggctgagggtgcaataacgacctcctggaccgacccgcccgcgccatgcgctcgcacactggcttgagggcgcttgtggcgcctggttgctcgctcctccttctatatcttctggcggcgacgcgcccggatcgggctgtgggcgatcccgcagactcagcgtttacaagtctacctgttcgagaggaaatgatggctaagtacgcaaatctgtccttggagacctataatatctcactgacagaacagaccagagtatcagaacaaaacataactttggaaagaccttctcacctggaactcgaatgcacgttcacggcaactgaggatgtgatgtcaatgaatgtgacttggaagaaagatgacgcgctccttgagactactgatggtttcaatacaactaaaatgggggacaccttatacagtcaatacaggttcaccgtttttaatagcaaacaaatgggaaaatactcttgtttccttggagaagagctcagaggaacctttaatatcagagtacccaaagttcatgggaaaaacaagcctttgatcacttacgtgggggattctactgtgctgaagtgtgaatgtcaaaattgtcttcctttaaattggacttggtacatgagtaatggaactgcacaggttcccatcgatgttcacgtgaatgataagtttgatataaatggttcctatgctaacgaaacaaagctcaaggtaaagcaccttttggaggaagatggaggatcctactggtgccgggcagccttcccgttaggggagagtgaggaacacattaagctggttgtgctgagtttcatggtgcctctcaagccattccttgccataattgctgaagtcatcctcttagtggccatcatcctgctttgtgaagtgtacacgcagaagaaaaagaatgacccagatgatgggaaagaatttgaacaaatcgaacagttgaaatcagatgatagcaatggaatagaaaacaatgtcccccggtacagaaaaacggactctggggatcagtgaatccaaaaagaactttttgccttgggaagacgtacagcactggagtttgaatttcagcattcattggagaacatccgagttttagatttttccgaagacaaagatgccctcactgtgcccaggagtagtttcgtaaacaatatagaccatctcctacctaaagatgtattttcattgtgtaattgcttttcattaaagcaaggtacattgtttcagctgtgttctgtgagctgtaacctagataataaagtttaccctctctgggagatcagggggacagggcagacaccagcaaaatcagttaataacccacaaagtaaatattgctaaagatctgtttattaccaaagaatttattaaagagaaagtgtttgccaaaaa

SEQ ID NO: 1429 - protein, 328 aa, Rattus norvegicus
  ref <308>: DATABASE ACCESSION NUMBER: SWISS-Prot / CAA08796
  ref <309>: DATABASE ENTRY DATE: 2003-02-01
MRSHTGLRALVAPGCSLLLLYLLAATRPDRAVGDPADSAFTSLPVREEMMAKYANLSLETYNISLTEQTRVSEQNITLERPSHLELECTFTATEDVMSMNVTWKKDDALLETTDGFNTTKMGDTLYSQYRFTVFNSKQMGKYSCFLGEELRGTFNIRVPKVHGKNKPLITYVGDSTVLKCECQNCLPLNWTWYMSNGTAQVPIDVHVNDKFDINGSYANETKLKVKHLLEEDGGSYWCRAAFPLGESEEHIKLVVLSFMVPLKPFLAIIAEVILLVAIILLCEVYTQKKKNDPDDGKEFEQIEQLKSDDSNGIENNVPRYRKTDSGDQ

SEQ ID NO: 1430 - DNA, 2139 bp, Homo sapiens
  ref <308>: DATABASE ACCESSION NUMBER: EMBL / BC014858
  ref <309>: DATABASE ENTRY DATE: 2002-09-22
cccagttaccagcaagtgtacacagggaccaacggagacggatcgcagcgagctgagggtgccttagcgacctcctggacagacccgcccgcgccatgcgctcgcacactggcctgagggcgcttgtggcgcctggttacccgctcctccttctatgtcttctggcggcgacgcgccctgatccggctgagggcgatcccacagatccaacttttacaagtctacctgttcgagaagaaatgatggcgaaatactcaaacctttccttaaagagctgtaatatctcagtgacggaaaagtccaatgtatcagtagaagagaacgtaattttggaaaagccttctcatgtggaactcaaatgcgtgtacacagcaactaaggatttgaacttgatgaatgtgacttggaagaaagatgatgagccccttgagactacgggtgacttcaatacaactaaaatgggcaacaccttaaccagtcagtacaggttcatcgtttttaatagcaaacaattgggaaaatattcttgtgtctttggagaaaaggaactaagagggacctttaacatccacgtacccaaagctcatgggaaaaaaaagtcgttgatcgcttacgtgggggattctactgtgctgaagtgtgtatgtcaagattgtcttcctttaaattggacttggtacatgggtaatgaaaccgcacaggttcccattgacgctcactcgaatgaaaagtatatcatcaatggttcccatgccaatgaaacaaggctcaagattaagcatcttttggaggaagatggaggatcctactggtgtcgtgccaccttccagttaggggagagtgaggagcagaatgagctggttgtgctgagcttcctggtgcccctcaagccatttctggccatacttgccgaagtcatcctcttggtggccatcattctgctttgtgaagtgtacacacacaagaaaaagaatgacccagatgctgggaaagaatttgaacaaattgaacagctgaaatcagatgatagcaatggcatagaaaacaatgtcccccggtacagaaaaactgactctgcagatcagtgaatacagaaagagcatctcgccctgggaagaagtacagcgttggagtttgtacttcagcttccttattttagatttttaaaagacaaagatgccctcaacgtgcacagaagtagctttatgaacaatatagtccatctcctacctaaagatgtactttcattttgtaattgctttccattaaagcaaggtcaattgtttcagctgtgttctgtgagctgtaacctagataataaactcccctctgtgggtacagggtggacaccagcaaaatcacttaataatccacaaataaatatcgccgaagatctgtttattaccaaagaatttattaaagagaaagcgtttgccagttgtcttaagtgtttgcctccaccagacatcttacctatagaagtatttatcacagttttcatgtgaagtgtatccagtgttgagtgtgatttctctaggaaatggaaagtatgctttcaatatcggtggctacactgcagtctagacactaagataaacttgtgctctataaataatggtgcaaagtaagggagttcaaatgcttgtgccatggccactacattaccagagcttctcatcttcattgcactcatttctgctctttctatcccaagccgaagagcttcccagccttaagtagaacattttccttgttctttgtcattggggtttggacttcaatagtcttcagaggccagatccacgttgtcacagtacaaccccgctcgctacctgcatgcctttgtggctcatggtttctgggtgcctttatgtgccatctctttcctggtaccatacctggctaaaatgcattcttagtgttttccaataataattcctttgtctagtatacaggaggactagtgcactatctttatgttgctgcgaatgccttagacttaacttcaaaattgtatctgagatactttatgaacttagaaccaaatcacgtcagaattttaatggacatggaaacttgtcaatggttttaaatgaaataaaatgtgccttggatggttggattaaaaaaaaaaaaaaa

SEQ ID NO: 1431 - protein, 330 aa, Homo sapiens
  ref <308>: DATABASE ACCESSION NUMBER: SWISS-Prot / P21995
  ref <309>: DATABASE ENTRY DATE: 2002-06-15
MRSHTGLRALVAPGYPLLLLCLLAATRPDPAEGDPTDPTFTSLPVREEMMAKYSNLSLKSCNISVTEKSNVSVEENVILEKPSHVELKCVYTATKDLNLMNVTWKKDDEPLETTGDFNTTKMGNTLTSQYRFIVFNSKQLGKYSCVFGEKELRGTFNIHVPQSSWEKKSLIAYVGDSTVLKCVCQDCLPLNWTWYMGNETAQVPIDAHSNEKYIINGSHANETRLKIKHLLEEDGGSYWCRATFQLGESEEQNELVVLSFLVPLKPFLAILAEVILLVAIILLCEVYTHKKKNGPDAGKEFEQIEQLKSDDSNGIENNVPRYRKTDSADQ

SEQ ID NO: 1432 - DNA, 1458 bp, Rattus norvegicus; identical to SEQ ID NO: 1428
  ref <308>: DATABASE ACCESSION NUMBER: EMBL / AJ009698
  ref <309>: DATABASE ENTRY DATE: 1998-07-24

SEQ ID NO: 1433 - protein, 328 aa, Rattus norvegicus; identical to SEQ ID NO: 1429
  ref <308>: DATABASE ACCESSION NUMBER: SWISS-Prot / CAA08796
  ref <309>: DATABASE ENTRY DATE: 2003-02-01

SEQ ID NO: 1434 - DNA, 2139 bp, Homo sapiens; identical to SEQ ID NO: 1430
  ref <308>: DATABASE ACCESSION NUMBER: EMBL / BC014858
  ref <309>: DATABASE ENTRY DATE: 2002-09-22

SEQ ID NO: 1435 - protein, 330 aa, Homo sapiens; identical to SEQ ID NO: 1431
  ref <308>: DATABASE ACCESSION NUMBER: SWISS-Prot / P21995
  ref <309>: DATABASE ENTRY DATE: 2002-06-15

SEQ ID NO: 1436 - DNA, 1563 bp, Rattus norvegicus
  ref <308>: DATABASE ACCESSION NUMBER: EMBL / AJ011607
  ref <309>: DATABASE ENTRY DATE: 2002-10-31
gtcaagatgcagttctcaggaaggacccggaagaagctgagattggcaggtgaccagagaaacgcttgttaccctcacagccttcagttctatctgcagccacctactgaaaacatatcattgacagagtttgaaagcttggcttttgatagagtaaaattgcttaaagcaattgagaatcttggtgtgagctatgtgaaaggaaccgaacagtaccagagtaaactggaggctgagattcgaaagctcaagttttcgtacagggagaacctggaggatgagtacgagcctcggaggagggaccacatctcccacttcatcctgcgcctcgcttactgccagtcggaagatcttagacggtggtttattcaacaggagatggatctgcttcggttccgattcagtattttacccaaggataaagtccagagtttcttgaaggatactcacttgcattttgaggctatcagtgatgaggagaagacccttcgggaacaggatatcatggcgtcctctcccagcctaagtggggtcaggtgggaatcggagtcagtgtataaggtcccctttgctgacgctctggacctgttcagaggaaggaaagtctacttggaagacggctttgcttatgtgccacttaaggacattgtggccattatcctgaacgagtttagagccacgctgtctaaggccttggcactaacagccaggtccctgcctgctgtgcagtccgatgaacgacttcagcctctgctcagccacctcagtcattcttacaccggccaagattatagtacccagaagagcaccgggaagatttccttagatcagattgattcgctttcaacaaaatccttcccaccttgcatgcgtcagctgcacaaggcgctgagggaaaaccaccatcttcgtcatggaggccggatgcagtatggcctgttcctcaagggcattgggctaacgttggagcaagcattgcagttctggaagcaagagtttatcaaaggaaagatggacccagacaagtttgataaaggttactcttacaatatccgacatagctttggaaaggaaggcaagaggacagactatacgccattcagttgcatgaagattatcctgaccaacccaccaagccagggggatttccatgggtgcccattccgtcacagtgatgcagagctgctgaagcagaagatgcagacctacaagatccctgcctcggggatcagccagattttggatttggtaaaggggaatcattaccaggtggcctgtcagaagtacttcgagatgacgcacaatgtggacgattgtggcttttctttgaatcatccaaatcagttcttttttgagagccagcgaatcctaactggtggcaaagatatcaagaaggaagcaagccacccagaaacgcctcagcacaaacccagcacccagaagaccaaggatgccacgtctgctctggcctctctagattcctccctggaaatggatctggaggggctagaagactactttagtaaatgacgtggcccctggagcaactggagcaaatacatt

SEQ ID NO: 1437 - protein, 507 aa, Rattus norvegicus
  ref <308>: DATABASE ACCESSION NUMBER: SWISS-Prot / CAA09722
  ref <309>: DATABASE ENTRY DATE: 2003-02-01
MQFSGRTRKKLRLAGDQRNACYPHSLQFYLQPPTENISLTEFESLAFDRVKLLKAIENLGVSYVKGTEQYQSKLEAEIRKLKFSYRENLEDEYEPRRRDHISHFILRLAYCQSEDLRRWFIQQEMDLLRFRFSILPKDKVQSFLKDTHLHFEAISDEEKTLREQDIMASSPSLSGVRWESESVYKVPFADALDLFRGRKVYLEDGFAYVPLKDIVAIILNEFRATLSKALALTARSLPAVQSDERLQPLLSHLSHSYTGQDYSTQKSTGKISLDQIDSLSTKSFPPCMRQLHKALRENHHLRHGGRMQYGLFLKGIGLTLEQALQFWKQEFIKGKMDPDKFDKGYSYNIRHSFGKEGKRTDYTPFSCMKIILTNPPSQGDFHGCPFRHSDAELLKQKMQTYKIPASGISQILDLVKGNHYQVACQKYFEMTHNVDDCGFSLNHPNQFFFESQRILTGGKDIKKEASHPETPQHKPSTQKTKDATSALASLDSSLEMDLEGLEDYFSK

SEQ ID NO: 1438 - DNA, 2306 bp, Homo sapiens
  ref <308>: DATABASE ACCESSION NUMBER: Refseq / NM_000947
  ref <309>: DATABASE ENTRY DATE: 2002-11-05
ggtttcatatgaactctcccgccacccgggaacagctggctgccaccgtttgtgttttccgagtttgtattcttgcaggtgaccaagatggagttttctggaagaaagcggaggaagctgaggttggcaggtgaccagaggaatgcttcctaccctcattgccttcagttttacttgcagccaccttctgaaaacatatctttaacagaatttgaaaacttggctattgatagagttaaattgttaaaatcagttgaaaatcttggagtgagctatgtgaaaggaactgaacaataccagagtaagttggagagtgagcttcggaagctcaagttttcctacagagagaagctagaagatgaatatgaaccacgaagaagagatcatatttctcattttattttgcggcttgcttattgccagtctgaagaacttagacgctggttcattcaacaagaaatggatctccttcgatttagatttagtattttacccaaggataaaattcaggatttcttaaaggatagccaattgcagtttgaggctataagtgatgaagagaagactcttcgagaacaggagattgttgcctcatcaccaagtttaagtggacttaagttggggttcgagtccatttataagatcccttttgctgatgctctggatttgtttcgaggaaggaaagtctatttggaagatggctttgcttacgtaccacttaaggacattgtggcaatcatcctgaatgaatttagagccaaactgtccaaggctttggcattaacagccaggtccttgcctgctgtgcagtctgatgaaagacttcagcctctgctcaatcacctcagtcattcctacactggccaagattacagtacccagggaaatgttgggaagatttctttagatcagattgatttgctttctaccaaatccttcccaccttgcatgcgtcagttacataaagccttgcgggaaaatcaccatcttcgtcatggaggccgaatgcagtatggcctatttctgaagggcattggtttaactttggaacaggcattgcagttctggaagcaagaatttatcaaaggaaagatggatccagacaagtttgataaaggttactcttacaacatccgtcacagctttggaaaggaaggcaagaggacagactatacacctttcagttgcctgaagattattctgtccaatccaccaagccaaggggattatcatgggtgcccattccgtcacagtgatccagagctgctgaagcaaaagttgcagtcatacaagatctctcctggagggataagccagattttggatttagtaaaggggacacattaccaggtagcctgtcaaaaatactttgagatgatacacaatgtggatgattgtggcttttctttgaatcatcctaatcagttcttttgtgagagccaacgtattctaaatggtggtaaagacataaagaaggaacctatccaaccagaaactcctcaacccaaaccaagtgtccagaaaaccaaggatgcatcatctgctctggcctctttaaattcctctctggaaatggatatggaaggactagaagattactttagtgaagattcttaggcagttttataaccctttttcctcaatagcctgtttcctgtttttaagattttgcctttgttgttgaaaaagggtttcactgtcaccaaggcttagtgcagtgacacaattacagctgattgcagccttgaccttcccagctcaagtgatcctcctacctcagcctcccaagtagttaggacacacaggtgtgcacctcatatccagataatttttttcaatttttttttgtagaggtggggggtctccctatgttgcccaggcagatctcagactcctgggctcaagcgatcctcacacctcagcgtcccagagtgctgggattacagttgtgagccactgtgcctggcctttttttttttttaaccttttcgtttaacttctctcttcactgcatcccaatccatctacaggcatgcacacttattaggaaaggaggtttgaggtaacaacagagactttcactatattttgctttgacagaaggaaagaggaggagtttctattaaaatctgtcacttgagtgatgtcatttaagtcctattttaggagataaaaacagctttggggactggttaaagtcccccagaaactacaataaagaacaacttttgttttaactcttaatcactttgtaattttgactcaatccttttctggaccatttttgttaataaatatcaaagtgt

SEQ ID NO: 1439 - protein, 509 aa, Homo sapiens [sequence omitted]

SEQ ID NO: 1440 - DNA, 1563 bp, Rattus norvegicus; identical to SEQ ID NO: 1436
  ref <308>: DATABASE ACCESSION NUMBER: EMBL / AJ011607
  ref <309>: DATABASE ENTRY DATE: 2002-10-31

SEQ ID NO: 1441 - protein, 507 aa, Rattus norvegicus; identical to SEQ ID NO: 1437
  ref <308>: DATABASE ACCESSION NUMBER: SWISS-Prot / CAA09722
  ref <309>: DATABASE ENTRY DATE: 2003-02-01

SEQ ID NO: 1442 - DNA, 2306 bp, Homo sapiens; identical to SEQ ID NO: 1438
  ref <308>: DATABASE ACCESSION NUMBER: Refseq / NM_000947
  ref <309>: DATABASE ENTRY DATE: 2002-11-05

SEQ ID NO: 1443 - protein, 509 aa, Homo sapiens [sequence omitted]

SEQ ID NO: 1444 - DNA, 4128 bp, Rattus norvegicus
  ref <308>: DATABASE ACCESSION NUMBER: EMBL / AJ012603
  ref <309>: DATABASE ENTRY DATE: 1998-11-09
ggttccggctgtgggcagcagggtggtccgcgactgcggccggaagcaggctgagcggctctcggcgagcgccgcctgtacttccggggacttcagcctagctcttgagttttccctgtaggcggcgcgggagggaaaagtttgcagggccgtgctgggaagatcacctccgcttcccaatgtgagcagtttctcgaacgctctctctagaaggttgcccagagaggtggtggacgggaacatgaggcagcgtctcctcttcctgaccactttggtgcctttcgtcctggcaccccgacctccggaggaaccaggctctggctcccacctgcgacttgagaagcttgattctttgctctcagactacgatatcctctctttatctaatatccagcagcactccataaggaaaagggatctacagtctgcgacacacttagaaacactactaactttttcagctttgaaaaggcattttaaattatacttgacatcaagtacagaacgcttttcacagaacttgcgagtcgtggtggtggatgggaaagaggaaagcgagtacagtgtgaagtggcaggacttcttcagcggacatgtggttggtgagcctgactctagggttctagcgcacataggagatgatgatgtcacagtaagaatcaacacagatggggcagaatataacatagagccactttggaggtttgttaatgatactaaagataaaaggatgctggtgtataagtctgaagatatcaaggatttttcacgtttgcagtctccaaaagtatgtggttatttaaatgcagatagtgaagagttgcttccaaaagggctcatagacagagagccatctgaagagtttgtccgtcgagtgaagaggcgagctgaacctaacccattgaagaatacttgtaaattactggtggtggcagatcatcgattttataagtacatgggccgaggagaagagagcactactacaaattacttaatagagttaattgaccgagttgatgacatataccggaacacctcgtgggacaatgcaggatttaaaggttatggagtacagatagaacagattcgaattctcaagtctccacaagaggtaaaacctggtgaaagacacttcaatatggcaaaaagttttccaaatgaagaaaaggatgcttgggatgtgaagatgctgctggagcaatttagccttgatatagctgaagaggcctctaaagtctgcctggctcatcttttcacctaccaagattttgatatgggaactcttggattagcttacgttggttctcccagagcaaacagtcatggaggggtttgtccaaaagcttattacaacccaggtgtgaagaagaacatctatttgaatagtggtctgacaagtacaaaaaattatggtaaaaccatccttacaaaggaggctgacctggttacaactcatgaattgggacacaattttggagcagaacatgatcctgatgggctggcagagtgtgccccaaatgaggaccaaggaggaaagtatgttatgtaccccatagctgtgagtggtgaccatgagaataataagatgttttcaaactgcagtaaacagtccatctacaagaccatagaaagcaaggctcaagagtgcttccaggagcgcagcaacaaggtgtgcggcaactccagggtggacgaaggagaagagtgtgacccgggcatcatgtacctgaacaacgacacctgctgcaatagtgactgcacactgaagccaggtgtgcagtgcagtgataggaatagtccttgctgtaaaaattgtcagtttgagacggcccagaagaagtgccaggaggctatcaatgctacttgcaaaggagtgtcttactgcacagggaatagcagtgagtgccccccaccaggagatgctgaagatgacactgtgtgcttggacctgggcaagtgcaaggctgggaaatgcatccctttctgcaagagggagcaggagctggagtcctgcgcatgtgctgacaccgacaactcgtgcaaggtatgctgcaggaacctttctggcccatgtgtgccttacgtcgatgcagagcaaaagaacttatttttgaggaaagggaagccctgtacagtagggttttgtgacatgaatggcaaatgtgagaaacgggtacaggacgtaattgagcggttttgggatttcattgaccagctgagcatcaacacttttgggaagtttctggcagacaacatcgttgggtctgttctggttttctccttgatattttggattcctttcagcattcttgtccactgtgtggataagaaactggacaagcagtatgagtccctgtctctgtttcatcacagtaacattgagatgttgagcagcatggactcagcatctgttcgcattatcaagccgttccctgcaccccagactccaggtcgtctgcaggccctgcagccggctgcaatgatgccgccagtgtctgcggctccaaaactggatcaccagaggatggacaccatccaggaagaccccagcacagattcacatgtggatgatgatggctttgagaaggaccccttccccaacagcagtgcagccgccaagtcctttgaggacctcacagaccacccagtcaccaggagtgagaaggccgcctccttcaagctgcagcgtcagagccgagttgatagcaaagagacagagtgttagtgggagcctgggcctgctctgggggacacagacctacagatgttccacagagctgacctgaatcaaaatagactgtaatgatctgagaaacgggagcagcttagcagatgctggtcatgtgacaggaccttcacatgacatcctgtgtatgtaggccctttgaagaggtgaggtaaatctggcttatttaaggctttcaggttttggggttttcttttgtaatctaaaaatctcctttgacctgtggtgcagaagcagaaaataaggctggatcaagttcctggtgacagcactgattaagccttcagtctgtttttctgtatgctgtaaggtcctctcactacggtgaagcacttagcagtgaggataactggaacacagactttttgggggttttggccttcacatgtgcgttgtctccaaatgccgtctgtcttggcactgaactttgtggatacagtcctttccaagatgaagactagctctggaacagtctatacaaacagccacatgaacttcaagatggcctattaactgcttagccccaggttccctggacagtttttccgttttgcaaaaagtgtcttcacgggtctctaaacattgtttgtcttaaaaaatactgggctggagagttggccccacagttaagagcacttggtttcattcccagtacccacacggtggctcttaactccaatcccaggggagatgacatcttctgaactctagaacacaaggcatgcattggtgcagtcaaacatgcaggcaacacacacaaatttagaaagccaagtgctgtaagaagttgcacatcccccaacctacagtgcttcgcggtctgagctggagtggagctctctcctgaacactctggaaggctggcaggtgctgagctggctagggagacgggtggggcccagccctggaagaaccgtcttcagcctcagcaagcagacactcgcgttacctcaggctttggggcttcaggacccaggatgttttgtacttattgtgtgaggataaataccattagcctgaattctcatttctgtaagttttagttataaaagctttttttcttctaagaattgcaatgtgctcaccagcaaacacgtcttaaccagaataacttgtaactctgaggacagttaaccaaacctgtgccttgtctctcctgagggtgtctgttacactaatacttgaacatgtaccttgtggtattggctccttttactagtcatgacagccttatatgttagttacactttgaggatttgctctaaggtgagtggggtgtgtgggtgtatgtatgaatgaaacagttggcagaatataagaaaaccatttttataaaattgtgactttttaaaacaaaaaaaaaaaaaaaaaaaaaaaaaaaa

SEQ ID NO: 1445 - protein, 827 aa, Rattus norvegicus
  ref <308>: DATABASE ACCESSION NUMBER: SWISS-Prot / Q9Z1K9
  ref <309>: DATABASE ENTRY DATE: 2002-06-15
MRQRLLFLTTLVPFVLAPRPPEEPGSGSHLRLEKLDSLLSDYDILSLSNIQQHSIRKRDLQSATHLETLLTFSALKRHFKLYLTSSTERFSQNLRVVVVDGKEESEYSVKWQDFFSGHVVGEPDSRVLAHIGDDDVTVRINTDGAEYNIEPLWRFVNDTKDKRMLVYKSEDIKDFSRLQSPKVCGYLNADSEELLPKGLIDREPSEEFVRRVKRRAEPNPLKNTCKLLVVADHRFYKYMGRGEESTTTNYLIELIDRVDDIYRNTSWDNAGFKGYGVQIEQIRILKSPQEVKPGERHFNMAKSFPNEEKDAWDVKMLLEQFSLDIAEEASKVCLAHLFTYQDFDMGTLGLAYVGSPRANSHGGVCPKAYYNPGVKKNIYLNSGLTSTKNYGKTILTKEADLVTTHELGHNFGAEHDPDGLAECAPNEDQGGKYVMYPIAVSGDHENNKMFSNCSKQSIYKTIESKAQECFQERSNKVCGNSRVDEGEECDPGIMYLNNDTCCNSDCTLKPGVQCSDRNSPCCKNCQFETAQKKCQEAINATCKGVSYCTGNSSECPPPGDAEDDTVCLDLGKCKAGKCIPFCKREQELESCACADTDNSCKVCCRNLSGPCVPYVDAEQKNLFLRKGKPCTVGFCDMNGKCEKRVQDVIERFWDFIDQLSINTFGKFLADNIVGSVLVFSLIFWIPFSILVHCVDKKLDKQYESLSLFHHSNIEMLSSMDSASVRIIKPFPAPQTPGRLQALQPAAMMPPVSAAPKLDHQRMDTIQEDPSTDSHVDDDGFEKDPFPNSSAAAKSFEDLTDHPVTRSEKAASFKLQRQSRVDSKETEC

SEQ ID NO: 1446 - DNA, 2877 bp, Homo sapiens
  ref <308>: DATABASE ACCESSION NUMBER: EMBL / U69612
  ref <309>: DATABASE ENTRY DATE: 2000-03-04
ggaaaagaggattgaggggctaggccgggcggatcccgtcctcccccgatgtgagcagttttccgaaaccccgtcaggcgaaggctgcccagagaggtggagtcggtagcggggccgggaacatgaggcagtctctcctattcctgaccagcgtggttcctttcgtgctggcgccgcgacctccggatgacccgggcttcggcccccaccagagactcgagaagcttgattctttgctctcagactacgatattctctctttatctaatatccagcagcattcggtaagaaaaagagatctacagacttcaacacatgtagaaacactactaactttttcagctttgaaaaggcattttaaattatacctgacatcaagtactgaacgtttttcacaaaatttcaaggtcgtggtggtggatggtaaaaacgaaagcgagtacactgtaaaatggcaggacttcttcactggacacgtggttggtgagcctgactctagggttctagcccacataagagatgatgatgttataatcagaatcaacacagatggggccgaatataacatagagccactttggagatttgttaatgataccaaagacaaaagaatgttagtttataaatctgaagatatcaagaatgtttcacgtttgcagtctccaaaagtgtgtggttatttaaaagtggataatgaagagttgctcccaaaagggttagtagacagagaaccacctgaagagcttgttcatcgagtgaaaagaagagctgacccagatcccatgaagaacacgtgtaaattattggtggtagcagatcatcgcttctacagatacatgggcagaggggaagagagtacaactacaaattacttaatagagctaattgacagagttgatgacatctatcggaacacttcatgggataatgcaggttttaaaggctatggaatacagatagagcagattcgcattctcaagtctccacaagaggtaaaacctggtgaaaagcactacaacatggcaaaaagttacccaaatgaagaaaaggatgcttgggatgtgaagatgttgctagagcaatttagctttgatatagctgaggaagcatctaaagtttgcttggcacaccttttcacataccaagattttgatatgggaactcttggattagcttatgttggctctcccagagcaaacagccatggaggtgtttgtccaaaggcttattatagcccagttgggaagaaaaatatctatttgaatagtggtttgacgagcacaaagaattatggtaaaaccatccttacaaaggaagctgacctggttacaactcatgaattgggacataattttggagcagaacatgatccggatggtctagcagaatgtgccccgaatgaggaccagggagggaaatatgtcatgtatcccatagctgtgagtggcgatcacgagaacaataagatgttttcaaactgcagtaaacaatcaatctataagaccattgaaagtaaggcccaggagtgttttcaagaacgcagcaataaagtttgtgggaactcgagggtggatgaaggagaagagtgtgatcctggcatcatgtatctgaacaacgacacctgctgcaacagcgactgcacgttgaaggaaggtgtccagtgcagtgacaggaacagtccttgctgtaaaaactgtcagtttgagactgcccagaagaagtgccaggaggcgattaatgctacttgcaaaggcgtgtcctactgcacaggtaatagcagtgagtgcccgcctccaggaaatgctgaagatgacactgtttgcttggatcttggcaagtgtaaggatgggaaatgcatccctttctgcgagagggaacagcagctggagtcctgtgcatgtaatgaaactgacaactcctgcaaggtgtgctgcagggacctttccggccgctgtgtgccctatgtcgatgctgaacaaaagaacttatttttgaggaaaggaaagccctgtacagtaggattttgtgacatgaatggcaaatgtgagaaacgagtacaggatgtaattgaacgattttgggatttcattgaccagctgagcatcaatacttttggaaagtttttagcagacaacatcgttgggtctgtcctggttttctccttgatattttggattcctttcagcattcttgtccattgtgtgtaacgtcgaaatgctgagcagcatggattctgcatcggttcgcattatcaaaccctttcctgcgccccagactccaggccgcctgcagcctgcccctgtgatcccttcggcgccagcagctccaaaactggaccaccagagaatggacaccatccaggaagaccccagcacagactcacatatggacgaggatgggtttgagaaggaccccttcccaaatagcagcacagctgccaagtcatttgaggatctcacggaccatccggtcaccagaagtgaaaaggctgcctcctttaaactgcagcgtcagaatcgtgttgacagcaaagaaacagagtgctaatttagttctcagctcttctgacttaagtgtgcaaaatatttttatagatttgacctacaatcaatcacagcttatattttgtgaagactgggaagtgacttagcagatgctggtcatgtgtttgaacttcctgcaggtaaacagttcttgtgtggtttggcccttctccttttgaaaaggtaaggtgaaggtgaatctagcttattttgaggctttcaggttttagtttttaaaatatcttttgacctgtggtgcaaaagcagaaaatacagctggattgggttatgagtatttacgtttttgtaaattaatcttttatattgataacag

SEQ ID NO: 1447 - protein, 824 aa, Homo sapiens
  ref <308>: DATABASE ACCESSION NUMBER: SWISS-Prot / P78536
  ref <309>: DATABASE ENTRY DATE: 2002-06-15
MRQSLLFLTSVVPFVLAPRPPDDPGFGPHQRLEKLDSLLSDYDILSLSNIQQHSVRKRDLQTSTHVETLLTFSALKRHFKLYLTSSTERFSQNFKVVVVDGKNESEYTVKWQDFFTGHVVGEPDSRVLAHIRDDDVIIRINTDGAEYNIEPLWRFVNDTKDKRMLVYKSEDIKNVSRLQSPKVCGYLKVDNEELLPKGLVDREPPEELVHRVKRRADPDPMKNTCKLLVVADHRFYRYMGRGEESTTTNYLIELIDRVDDIYRNTSWDNAGFKGYGIQIEQIRILKSPQEVKPGEKHYNMAKSYPNEEKDAWDVKMLLEQFSFDIAEEASKVCLAHLFTYQDFDMGTLGLAYVGSPRANSHGGVCPKAYYSPVGKKNIYLNSGLTSTKNYGKTILTKEADLVTTHELGHNFGAEHDPDGLAECAPNEDQGGKYVMYPIAVSGDHENNKMFSNCSKQSIYKTIESKAQECFQERSNKVCGNSRVDEGEECDPGIMYLNNDTCCNSDCTLKEGVQCSDRNSPCCKNCQFETAQKKCQEAINATCKGVSYCTGNSSECPPPGNAEDDTVCLDLGKCKDGKCIPFCEREQQLESCACNETDNSCKVCCRDLSGRCVPYVDAEQKNLFLRKGKPCTVGFCDMNGKCEKRVQDVIERFWDFIDQLSINTFGKFLADNIVGSVLVFSLIFWIPFSILVHCVDKKLDKQYESLSLFHPSNVEMLSSMDSASVRIIKPFPAPQTPGRLQPAPVIPSAPAAPKLDHQRMDTIQEDPSTDSHMDEDGFEKDPFPNSSTAAKSFEDLTDHPVTRSEKAASFKLQRQNRVDSKETEC

SEQ ID NO: 1448 - DNA, 4128 bp, Rattus norvegicus; identical to SEQ ID NO: 1444
  ref <308>: DATABASE ACCESSION NUMBER: EMBL / AJ012603
  ref <309>: DATABASE ENTRY DATE: 1998-11-09

SEQ ID NO: 1449 - protein, 827 aa, Rattus norvegicus; identical to SEQ ID NO: 1445
  ref <308>: DATABASE ACCESSION NUMBER: SWISS-Prot / Q9Z1K9
  ref <309>: DATABASE ENTRY DATE: 2002-06-15

SEQ ID NO: 1450 - DNA, 2877 bp, Homo sapiens; identical to SEQ ID NO: 1446
  ref <308>: DATABASE ACCESSION NUMBER: EMBL / U69612
  ref <309>: DATABASE ENTRY DATE: 2000-03-04

SEQ ID NO: 1451 - protein, 824 aa, Homo sapiens; identical to SEQ ID NO: 1447
  ref <308>: DATABASE ACCESSION NUMBER: SWISS-Prot / P78536
  ref <309>: DATABASE ENTRY DATE: 2002-06-15

SEQ ID NO: 1452 - DNA, 4128 bp, Rattus norvegicus; identical to SEQ ID NO: 1444
  ref <308>: DATABASE ACCESSION NUMBER: EMBL / AJ012603
  ref <309>: DATABASE ENTRY DATE: 1998-11-09

SEQ ID NO: 1453 - protein, 827 aa, Rattus norvegicus; identical to SEQ ID NO: 1445
  ref <308>: DATABASE ACCESSION NUMBER: SWISS-Prot / Q9Z1K9
  ref <309>: DATABASE ENTRY DATE: 2002-06-15

SEQ ID NO: 1454 - DNA, 2877 bp, Homo sapiens; identical to SEQ ID NO: 1446
  ref <308>: DATABASE ACCESSION NUMBER: EMBL / U69612
  ref <309>: DATABASE ENTRY DATE: 2000-03-04

SEQ ID NO: 1455 - protein, 824 aa, Homo sapiens; identical to SEQ ID NO: 1447
  ref <308>: DATABASE ACCESSION NUMBER: SWISS-Prot / P78536
  ref <309>: DATABASE ENTRY DATE: 2002-06-15

SEQ ID NO: 1456 - DNA, 4128 bp, Rattus norvegicus; identical to SEQ ID NO: 1444
  ref <308>: DATABASE ACCESSION NUMBER: EMBL / AJ012603
  ref <309>: DATABASE ENTRY DATE: 1998-11-09

SEQ ID NO: 1457 - protein, 827 aa, Rattus norvegicus; identical to SEQ ID NO: 1445
  ref <308>: DATABASE ACCESSION NUMBER: SWISS-Prot / Q9Z1K9
  ref <309>: DATABASE ENTRY DATE: 2002-06-15

SEQ ID NO: 1458 - DNA, 2877 bp, Homo sapiens; identical to SEQ ID NO: 1446
  ref <308>: DATABASE ACCESSION NUMBER: EMBL / U69612
  ref <309>: DATABASE ENTRY DATE: 2000-03-04

SEQ ID NO: 1459 - protein, 824 aa, Homo sapiens; identical to SEQ ID NO: 1447
  ref <308>: DATABASE ACCESSION NUMBER: SWISS-Prot / P78536
  ref <309>: DATABASE ENTRY DATE: 2002-06-15

SEQ ID NO: 1460 - DNA, 4128 bp, Rattus norvegicus; identical to SEQ ID NO: 1444
  ref <308>: DATABASE ACCESSION NUMBER: EMBL / AJ012603
  ref <309>: DATABASE ENTRY DATE: 1998-11-09

SEQ ID NO: 1461 - protein, 827 aa, Rattus norvegicus; identical to SEQ ID NO: 1445
  ref <308>: DATABASE ACCESSION NUMBER: SWISS-Prot / Q9Z1K9
  ref <309>: DATABASE ENTRY DATE: 2002-06-15

SEQ ID NO: 1462 - DNA, 2877 bp, Homo sapiens; identical to SEQ ID NO: 1446
  ref <308>: DATABASE ACCESSION NUMBER: EMBL / U69612
  ref <309>: DATABASE ENTRY DATE: 2000-03-04

SEQ ID NO: 1463 - protein, 824 aa, Homo sapiens; identical to SEQ ID NO: 1447
  ref <308>: DATABASE ACCESSION NUMBER: SWISS-Prot / P78536
  ref <309>: DATABASE ENTRY DATE: 2002-06-15

SEQ ID NO: 1464 - DNA, 4128 bp, Rattus norvegicus; identical to SEQ ID NO: 1444
  ref <308>: DATABASE ACCESSION NUMBER: EMBL / AJ012603
  ref <309>: DATABASE ENTRY DATE: 1998-11-09

SEQ ID NO: 1465 - protein, 827 aa, Rattus norvegicus; identical to SEQ ID NO: 1445
  ref <308>: DATABASE ACCESSION NUMBER: SWISS-Prot / Q9Z1K9
  ref <309>: DATABASE ENTRY DATE: 2002-06-15

SEQ ID NO: 1466 - DNA, 2877 bp, Homo sapiens; identical to SEQ ID NO: 1446
  ref <308>: DATABASE ACCESSION NUMBER: EMBL / U69612
  ref <309>: DATABASE ENTRY DATE: 2000-03-04

SEQ ID NO: 1467 - protein, 824 aa, Homo sapiens; identical to SEQ ID NO: 1447
  ref <308>: DATABASE ACCESSION NUMBER: SWISS-Prot / P78536
  ref <309>: DATABASE ENTRY DATE: 2002-06-15

SEQ ID NO: 1468 - DNA, 4128 bp, Rattus norvegicus; identical to SEQ ID NO: 1444
  ref <308>: DATABASE ACCESSION NUMBER: EMBL / AJ012603
  ref <309>: DATABASE ENTRY DATE: 1998-11-09

SEQ ID NO: 1469 - protein, 827 aa, Rattus norvegicus; identical to SEQ ID NO: 1445
  ref <308>: DATABASE ACCESSION NUMBER: SWISS-Prot / Q9Z1K9
  ref <309>: DATABASE ENTRY DATE: 2002-06-15

SEQ ID NO: 1470 - DNA, 2877 bp, Homo sapiens; identical to SEQ ID NO: 1446
  ref <308>: DATABASE ACCESSION NUMBER: EMBL / U69612
  ref <309>: DATABASE ENTRY DATE: 2000-03-04

SEQ ID NO: 1471 - protein, 824 aa, Homo sapiens; identical to SEQ ID NO: 1447
  ref <308>: DATABASE ACCESSION NUMBER: SWISS-Prot / P78536
  ref <309>: DATABASE ENTRY DATE: 2002-06-15

SEQ ID NO: 1472 - DNA, 4128 bp, Rattus norvegicus; identical to SEQ ID NO: 1444
  ref <308>: DATABASE ACCESSION NUMBER: EMBL / AJ012603
  ref <309>: DATABASE ENTRY DATE: 1998-11-09

SEQ ID NO: 1473 - protein, 827 aa, Rattus norvegicus; identical to SEQ ID NO: 1445
  ref <308>: DATABASE ACCESSION NUMBER: SWISS-Prot / Q9Z1K9
  ref <309>: DATABASE ENTRY DATE: 2002-06-15

SEQ ID NO: 1474 - DNA, 2877 bp, Homo sapiens; identical to SEQ ID NO: 1446
  ref <308>: DATABASE ACCESSION NUMBER: EMBL / U69612
  ref <309>: DATABASE ENTRY DATE: 2000-03-04

SEQ ID NO: 1475 - protein, 824 aa, Homo sapiens; identical to SEQ ID NO: 1447
  ref <308>: DATABASE ACCESSION NUMBER: SWISS-Prot / P78536
  ref <309>: DATABASE ENTRY DATE: 2002-06-15

SEQ ID NO: 1476 - DNA, 4128 bp, Rattus norvegicus; identical to SEQ ID NO: 1444
  ref <308>: DATABASE ACCESSION NUMBER: EMBL / AJ012603
  ref <309>: DATABASE ENTRY DATE: 1998-11-09

SEQ ID NO: 1477 - protein, 827 aa, Rattus norvegicus; identical to SEQ ID NO: 1445
  ref <308>: DATABASE ACCESSION NUMBER: SWISS-Prot / Q9Z1K9
  ref <309>: DATABASE ENTRY DATE: 2002-06-15

SEQ ID NO: 1478 - DNA, 2877 bp, Homo sapiens; identical to SEQ ID NO: 1446
  ref <308>: DATABASE ACCESSION NUMBER: EMBL / U69612
  ref <309>: DATABASE ENTRY DATE: 2000-03-04

SEQ ID NO: 1479 - protein, 824 aa, Homo sapiens; identical to SEQ ID NO: 1447
  ref <308>: DATABASE ACCESSION NUMBER: SWISS-Prot / P78536
  ref <309>: DATABASE ENTRY DATE: 2002-06-15

SEQ ID NO: 1480 - DNA, 4128 bp, Rattus norvegicus; identical to SEQ ID NO: 1444
  ref <308>: DATABASE ACCESSION NUMBER: EMBL / AJ012603
  ref <309>: DATABASE ENTRY DATE: 1998-11-09

SEQ ID NO: 1481 - protein, 827 aa, Rattus norvegicus; identical to SEQ ID NO: 1445
  ref <308>: DATABASE ACCESSION NUMBER: SWISS-Prot / Q9Z1K9
  ref <309>: DATABASE ENTRY DATE: 2002-06-15

SEQ ID NO: 1482 - DNA, 2877 bp, Homo sapiens; identical to SEQ ID NO: 1446
  ref <308>: DATABASE ACCESSION NUMBER: EMBL / U69612
  ref <309>: DATABASE ENTRY DATE: 2000-03-04

SEQ ID NO: 1483 - protein, 824 aa, Homo sapiens; identical to SEQ ID NO: 1447
  ref <308>: DATABASE ACCESSION NUMBER: SWISS-Prot / P78536
  ref <309>: DATABASE ENTRY DATE: 2002-06-15

SEQ ID NO: 1484 - DNA, 4128 bp, Rattus norvegicus; identical to SEQ ID NO: 1444
  ref <308>: DATABASE ACCESSION NUMBER: EMBL / AJ012603
  ref <309>: DATABASE ENTRY DATE: 1998-11-09

SEQ ID NO: 1485 - protein, 827 aa, Rattus norvegicus; identical to SEQ ID NO: 1445
  ref <308>: DATABASE ACCESSION NUMBER: SWISS-Prot / Q9Z1K9
  ref <309>: DATABASE ENTRY DATE: 2002-06-15

SEQ ID NO: 1486 - DNA, 2877 bp, Homo sapiens; identical to SEQ ID NO: 1446
  ref <308>: DATABASE ACCESSION NUMBER: EMBL / U69612
  ref <309>: DATABASE ENTRY DATE: 2000-03-04

SEQ ID NO: 1487 - protein, 824 aa, Homo sapiens; identical to SEQ ID NO: 1447
  ref <308>: DATABASE ACCESSION NUMBER: SWISS-Prot / P78536
  ref <309>: DATABASE ENTRY DATE: 2002-06-15

SEQ ID NO: 1488 - DNA, 4128 bp, Rattus norvegicus; identical to SEQ ID NO: 1444
  ref <308>: DATABASE ACCESSION NUMBER: EMBL / AJ012603
  ref <309>: DATABASE ENTRY DATE: 1998-11-09

SEQ ID NO: 1489 - protein, 827 aa, Rattus norvegicus; identical to SEQ ID NO: 1445
  ref <308>: DATABASE ACCESSION NUMBER: SWISS-Prot / Q9Z1K9
  ref <309>: DATABASE ENTRY DATE: 2002-06-15

SEQ ID NO: 1490 - DNA, 2877 bp, Homo sapiens; identical to SEQ ID NO: 1446
  ref <308>: DATABASE ACCESSION NUMBER: EMBL / U69612
  ref <309>: DATABASE ENTRY DATE: 2000-03-04

SEQ ID NO: 1491 - protein, 824 aa, Homo sapiens; identical to SEQ ID NO: 1447
  ref <308>: DATABASE ACCESSION NUMBER: SWISS-Prot / P78536
  ref <309>: DATABASE ENTRY DATE: 2002-06-15

SEQ ID NO: 1492 - DNA, 1312 bp, Rattus norvegicus
  ref <308>: DATABASE ACCESSION NUMBER: EMBL / AJ132230
  ref <309>: DATABASE ENTRY DATE: 1999-08-11
ggagctgccccaggacagaaacctcccaagacagcagtcaccatcaaaaacacaggtgaagctgtgagctctttgcttttctatccggaccacagctggatttgacctcctgtactgtgtcaacgtcaggtcactgtggatggcgtccgaggtcttgttggagctccagccctctaaccgaagcctgcaggcccctgccaacattacctcctgcgagagtgccctagaagactgggacctgctgtatcgggtgctgccagggttcgtcatcactatctgcttctttggcctcttggggaaccttttagtcttgtccttcttccttttgccttggcgacagtggtggtggcagcaacgacagaggcagcagcgcttaaccatagcggaaatctacctggctaacttggcggcttccgatctggtgtttgtcctgggcctgcccttctgggcagagaacatcgggaaccgtttcaactggcccttcggaactgacctctgccgggtggtcagcggggtcatcaaggccaacctgtttgtcagcatcttcctggtggtggctatcagtcaggaccgctacaggctcctggtataccccatgaccagctgggggtaccggcggcgacggcaagcccaagctacgtgcctgctcatctgggtagccgggggtctcttgagcatccccacattccttctacgctctgttaaagtcgtccccgatctgaacgtctctgcctgcatcctgcttttcccccacgaggcttggcactttgcaaggatggtggagttgaacgttttgggtttcctcctccccgtgactgctatcatcttcttcaactatcacatcctggcctccctgagaggacagaaggaggccagcaggactaggtgtgggggtcccaagggcagcaagacgacggggctgatcctcacactggtagcctccttcctggtctgctggtgcccttaccacttcttcgctttcctggatttcctggtccaggtaagagtgatccaggactgctcctggaaggagatcacagacctgggcctgcagctcgccaacttctttgcctttgtcaacagctgcttgaacccactgatttatgtcttcgcaggccggctccttaagaccagggttctggggactttataaatgatgcaaccgagaagcctcatgcccatgtggcccaacaggaagggactcttccaattatcctgctggaattcaaacagcagggagccaagaagcctggcttcttgaccaaccatctctggtatcataaagaccatctggtcagctgacccacagccc

SEQ ID NO: 1493 - protein, 337 aa, Rattus norvegicus
  ref <308>: DATABASE ACCESSION NUMBER: SWISS-Prot / P97583
  ref <309>: DATABASE ENTRY DATE: 2001-10-16
MASEVLLELQPSNRSLQAPANITSCESALEDWDLLYRVLPGFVITICFFGLLGNLLVLSFFLLPWRQWWWQQRQRQQRLTIAEIYLANLAASDLVFVLGLPFWAENIGNRFNWPFGTDLCRVVSGVIKANLFVSIFLVVAISQDRYRLLVYPMTSWGYRRRRQAQATCLLIWVAGGLLSIPTFLLRSVKVVPDLNVSACILLFPHEAWHFARMVELNVLGFLLPVTAIIFFNYHILASLRGQKEASRTRCGGPKGSKTTGLILTLVASFLVCWCPYHFFAFLDFLVQVRVIQDCSWKEITDLGLQLANFFAFVNSCLNPLIYVFAGRLLKTRVLGTL

SEQ ID NO: 1494 - DNA, 1302 bp, Homo sapiens
  ref <308>: DATABASE ACCESSION NUMBER: EMBL / AJ238044
  ref <309>: DATABASE ENTRY DATE: 1999-08-11
aaaactcctccaaaagcagctctcactatcagaaaacccaactacagttgtgaacgccttcattttctgcctgaggtctcagtccgtcggcccagactgaagtgcagtggcacaatcatagctcgctgcagcctcgaccttccaggcttaaacgattctcccacctcagcctctcgagttgctgggaccacaggtcactgtgcatggcatcatcctggccccctctagagctccaatcctccaaccagagccagctcttccctcaaaatgctacggcctgtgacaatgctccagaagcctgggacctgctgcacagagtgctgccgacatttatcatctccatctgtttcttcggcctcctagggaacctttttgtcctgttggtcttcctcctgccccggcggcaactgaacgtggcagaaatctacctggccaacctggcagcctctgatctggtgtttgtcttgggcttgcccttctgggcagagaatatctggaaccagtttaactggcctttcggagccctcctctgccgtgtcatcaacggggtcatcaaggccaatttgttcatcagcatcttcctggtggtggccatcagccaggaccgctaccgcgtgctggtgcaccctatggccagccggaggcagcagcggcggaggcaggcccgggtcacctgcgtgctcatctgggttgtggggggcctcttgagcatccccacattcctgctgcgatccatccaagccgtcccagatctgaacatcaccgcctgcatcctgctcctcccccatgaggcctggcactttgcaaggattgtggagttaaatattctgggtttcctcctaccactggctgcgatcgtcttcttcaactaccacatcctggcctccctgcgaacgcgggaggaggtcagcaggacaaggtgcgggggccgcaaggatagcaagaccacagcgctgatcctcacgctcgtggttgccttcctggtctgctgggccccttaccacttctttgccttcctggaattcttattccaggtgcaagcagtccgaggctgcttttgggaggacttcattgacctgggcctgcaattggccaacttctttgccttcactaacagctccctgaatccagtaatttatgtctttgtgggccggctcttcaggaccaaggtctgggaactttataaacaatgcacccctaaaagtcttgctccaatatcttcatcccataggaaagaaatcttccaacttttctggcggaattaaaacagcattgaaccaagaaaaaaaaaaaaaaaaaaaa

SEQ ID NO: 1495 - protein, 353 aa, Homo sapiens
  ref <308>: DATABASE ACCESSION NUMBER: SWISS-Prot / P46663
  ref <309>: DATABASE ENTRY DATE: 2002-06-15
MASSWPPLELQSSNQSQLFPQNATACDNAPEAWDLLHRVLPTFIISICFFGLLGNLFVLLVFLLPRRQLNVAEIYLANLAASDLVFVLGLPFWAENIWNQFNWPFGALLCRVINGVIKANLFISIFLVVAISQDRYRVLVHPMASGRQQRRRQARVTCVLIWVVGGLLSIPTFLLRSIQAVPDLNITACILLLPHEAWHFARIVELNILGFLLPLAAIVFFNYHILASLRTREEVSRTRVRGPKDSKTTALILTLVVAFLVCWAPYHFFAFLEFLFQVQAVRGCFWEDFIDLGLQLANFFAFTNSSLNPVIYVFVGRLFRTKVWELYKQCTPKSLAPISSSHRKEIFQLFWRN

SEQ ID NO: 1496 - DNA, 1312 bp, Rattus norvegicus; identical to SEQ ID NO: 1492
  ref <308>: DATABASE ACCESSION NUMBER: EMBL / AJ132230
  ref <309>: DATABASE ENTRY DATE: 1999-08-11

SEQ ID NO: 1497 - protein, 337 aa, Rattus norvegicus; identical to SEQ ID NO: 1493
  ref <308>: DATABASE ACCESSION NUMBER: SWISS-Prot / P97583
  ref <309>: DATABASE ENTRY DATE: 2001-10-16

SEQ ID NO: 1498 - DNA, 1302 bp, Homo sapiens; identical to SEQ ID NO: 1494
  ref <308>: DATABASE ACCESSION NUMBER: EMBL / AJ238044
  ref <309>: DATABASE ENTRY DATE: 1999-08-11

SEQ ID NO: 1499 - protein, 353 aa, Homo sapiens; identical to SEQ ID NO: 1495
  ref <308>: DATABASE ACCESSION NUMBER: SWISS-Prot / P46663
  ref <309>: DATABASE ENTRY DATE: 2002-06-15

SEQ ID NO: 1500 - DNA, 1946 bp, Rattus norvegicus
  ref <308>: DATABASE ACCESSION NUMBER: EMBL / AJ223355
  ref <309>: DATABASE ENTRY DATE: 1998-09-21
ccggggtcgggccaggtcgctgctgctctggccatggctgaggcacgcacgtctcgctggtactttggagggctggcttcctgcggagctgcctgctgcacgcaccctctagacctgctcaaggtgcatttgcagacccaacaggaggtgaagcttcgaatgactggaatggcactgcaggtggtgcgaaccgatggcttcctggcactctacaatggcctgagtgcctcgctgtgcaggcagatgacctactccctgacccggttcgctatctacgagaccatgcgggactacatgaccaaggacagccaggggcctctccccttctacagcaaggtgttgctgggcggcatcagtggtttaactggaggcttcgtggggaccccagcagatttggtcaatgtcaggatgcagaatgacatgaagctgcctctgagccagcgccgcaactactctcacgccctggatggtctgtaccgtgtagcccgtgaagaaggcctgaagaagctcttctctggagcaactatggcatccagccgtggggccctcgtcactgtgggccagctgtcctgctacgaccaggccaagcagctggttctcagtactgggtacctgagtgacaacattttcacccacttcctctccagtttcattgcgggcggatgtgccacatttctctgccagcccctggacgtgctgaagactcgcttgatgaactccaagggcgagtatcagggtgttttccattgtgccgtggagacagcaaagcttggaccacaggcctttttcaagggtctcgttcctgcgggcgtccgtctcgtcccccacaccgtgcttaccttcatgttcctggagcagctgcggaagcacttcggtatcaaagtggcaacctgacaccgccagggacacctgggctgcgctcagtcgctgtgctgagccccttggaagagtaggaagggagtgggctcccttcctccttggcctgggcccgtgctgatccccagaagattcctgttcttcccacccttgggctgctggctacgccttccgaccctgccttggccccactgaagtggcacctctgccctactggctcccaggctctccccactgggacgtcccatcttcctacccgatgattcactcagaagaggtctggcctggctggtgtcactgtccccacctccctggctgctaccctgccctgcctgtcaagcccggagaagctgagtacacttcctgctcttgctggcccactgaacagcttccacccaggacttgggtagtgtggcagggtacagcccctggcagcttctgcttaccaaatgactagagcacgcacgcacacacatacacacatgcacttacgtcacaagagggaccaccgtgcagtgttctggaaggtagtgccttcaggagagggaacagggcagcagcacagatcaccagcaaacgccatgaccgcggagtccggagaaagtacctggggttccctgtgcacctcccgtgctcagccttggctgctttaagagtcagtttttgcggaaccctcctactcagcagccactaccatcatcaggaactggctgtgtccctcatacacctgtgccctcccttgcctggcttcccccagggccaggggctcatgctggagctggggctatgatggattcattttatgtgtcctcctaggacctgttttcccgtatggcaggggtcacccctcaccatccctcagggttcaaagcagcctgttttccctcaaattggggttgtgtgtatatcaacgtgaggttgggccctgtgcccgtttgcctcccctcagcaccaggccctcacccaggaggtgcgggaggtggcagtgggcccaggggcactgcctacatctctcttcaggatctaataaaccaagtggccaaaaaaaaaaaaaaaaaaaaaaaaaaaaa

SEQ ID NO: 1501 - protein, 287 aa, Rattus norvegicus
  misc_feature (1)..(287): Xaa=Unknown amino acid
MAEARTSRWYFGGLASCGAACCTHPLDLLKVHLQTQQEVKLRMTGMALQVVRTDGFLALYNGLSASLCRQMTYSLTRFAIYETMRDYMTKDSQGPLPFYSKVLLGGISGLTGGFVGTPADLVNVRMQNDMKLPLSQRRNYSHALDGLYRVAREEGLKKLFSGATMASSRGALVTVGQLSCYDQAKQLVLSTGYLSDNIFTHFLSSFIAGGCATFLCQPLDVLKTRLMNSKGEYQGVFHCAVETAKLGPQAFFKGLVPAGVRLVPHTVLTFMFLEQLRKHFGIKVATX

SEQ ID NO: 1502 - DNA, 1967 bp, Homo sapiens
  ref <308>: DATABASE ACCESSION NUMBER: EMBL / BC015797
  ref <309>: DATABASE ENTRY DATE: 2001-10-15
cgcgcgggcggcgctttgaaccgggcgcggggcgcggggcgcggggcgctgcggccggtacacgccggggtagggccggggtcgggttgtggtcgggccgggattgggctctcctgggccatggcagccgaggcgcgcgtgtcgcgctggtacttcggggggctggcctcctgcggggccgcctgctgcacgcacccgctggacctgctcaaggtgcatctgcagacgcagcaggaggtgaagctgcgcatgacgggcatggcgctgcgggtggtgcgtaccgacggcatcctggcactctacagcggcctgagcgcctcgctgtgcagacagatgacctactccctgactcggttcgccatctacgagactgtgcgggaccgcgtggccaagggcagccaggggcctctccccttccacgagaaggtgttgctgggctccgtcagcggtttagctggaggcttcgtggggacgcccgcagacttggtcaacgtcaggatgcagaacgacgtgaagctgccccagggtcagcggcgcaactacgcccatgcgctggatggcctgtaccgcgtagctcgtgaagagggtctcaggagactgttctcgggtgcaaccatggcatccagccgaggggccttagtcactgtgggccagctgtcctgctacgaccaggccaagcagctggtccttagcaccgggtacctctctgacaacatcttcactcactttgtcgccagctttattgcagccgctggtgacgagccccctcctcagggtggatgtgccacgttcctgtgccagcccctggatgtgctgaagactcgcctgatgaactccaagggggagtatcagggcgttttccactgcgccgtggagacagcgaagctcgggcctctggccttttacaagggcctcgtcccagctggcatccgcctcatcccccacaccgtgctcacttttgtgtttctggaacagctacgcaaaaactttggcatcaaagtgccatcctgaccagccgtgggaatggctgggctgccaggccagacacgctaggttcttccaaagagtcccaagcccagcacctgctcctggggccacgacctccctggccgtggccacccatcctccgcagcaggcccctgctgtccccccacctgctggctgagctcctcctggcctcgtcccctctcagctgtagctgcaccacccccgctctggctaccaggctctcccggctgggcactgcgtggccttgcccctctcccgctggcagctcctcaggggaacaggggctaccagaggctgatttctcccctctcctgggccaggggaggggtattatccctgcctcctgcccccgatgcccaaagcagcatcttccagcactttccatcgaggacttgggtggcagagtgtgggtgcagcctggctgttgctcacccaagtgctagctctgcacttcgtgtctgctgagagcaaccagaccttccatgtcctcgggcagctgcaactccccgcgagaccccgcagctgggtgggatgaacaagcaacgcagaccacaagcgagtgcctgggagggagtggcccagagaggttctggagccattgtgggtgagggtcgagggccaccgaggtcccgcgcaccgctgcctgccctgcagtggctttaacagttagttttgccaaagcctctccactcaccagcaggcggtctctgtcttcagggattgtgcctgcgtccctcgggcacctgggcccccccgcttggctccctgggggaatggcccaggcgggccgcggttcctccttagggccttctccccgacaaggagtccgacggggcggatgctgcatcctctgcctccctggtcgctgggcttcaccccacctgggaagggcagtgtgctctgtgggggctgcaatcaataaatgccgggagctgccaaaaaaaaaaaaaaaaaaaaaa

SEQ ID NO: 1503 - protein, 287 aa, Homo sapiens
  ref <308>: DATABASE ACCESSION NUMBER: SWISS-Prot / Q9UBX3
  ref <309>: DATABASE ENTRY DATE: 2002-06-15
MAAEARVSRWYFGGLASCGAACCTHPLDLLKVHLQTQQEVKLRMTGMALRVVRTDGILALYSGLSASLCRQMTYSLTRFAIYETVRDRVAKGSQGPLPFHEKVLLGSVSGLAGGFVGTPADLVNVRMQNDVKLPQGQRRNYAHALDGLYRVAREEGLRRLFSGATMASSRGALVTVGQLSCYDQAKQLVLSTGYLSDNIFTHFVASFIAGGCATFLCQPLDVLKTRLMNSKGEYQGVFHCAVETAKLGPLAFYKGLVPAGIRLIPHTVLTFVFLEQLRKNFGIKVPS

SEQ ID NO: 1504 - DNA, 1946 bp, Rattus norvegicus; identical to SEQ ID NO: 1500
  ref <308>: DATABASE ACCESSION NUMBER: EMBL / AJ223355
  ref <309>: DATABASE ENTRY DATE: 1998-09-21

SEQ ID NO: 1505 - protein, 287 aa, Rattus norvegicus; identical to SEQ ID NO: 1501
  misc_feature (1)..(287): Xaa=Unknown amino acid

SEQ ID NO: 1506 - DNA, 1967 bp, Homo sapiens; identical to SEQ ID NO: 1502
  ref <308>: DATABASE ACCESSION NUMBER: EMBL / BC015797
  ref <309>: DATABASE ENTRY DATE: 2001-10-15

SEQ ID NO: 1507 - protein, 287 aa, Homo sapiens; identical to SEQ ID NO: 1503
  ref <308>: DATABASE ACCESSION NUMBER: SWISS-Prot / Q9UBX3
  ref <309>: DATABASE ENTRY DATE: 2002-06-15

SEQ ID NO: 1508 - DNA, 1194 bp, Rattus norvegicus
  ref <308>: DATABASE ACCESSION NUMBER: EMBL / AJ224120
  ref <309>: DATABASE ENTRY DATE: 1998-05-20
agagagagagagagagagagagagagagagaacccacccacccggcgactaatctgatcccggctgtcccccgggaccagcgaggtcccagaagacccacgagggagcgggcgtaacgcgtggctgcgggtgggagccatggacgccttcatccgagtcgccaaccaaagccaaggtcgggaccgacttttcagagccactcaacacgcatgcatgttgcttagatatttgttagagtctaaggctggcaaagaggcggtggtaacgaagctcaagaatctggagactagtgtgagcactggccgtaaatggttcagactaggcaacgtgctccatgccatccaggccactgagcagagcatccaagccactgaccttgtgccccgcctatgcctaacattagccaacctgaaccgcgtggtttattacatctgtgacactgtcctctgggcgaagagtgtgggtctgacatctggaatcaacagagagaagtggcaaatgcgggcggcccgccactactactatttcctcttgctgagcctggtccgggatctgtatgaggtcttgctgcatatgggacaagttgcacgcgacagagcaaagagagagaagtcctccggggaccctcctaagtacagcgtcgctaatgaagaaagtgaatggctccagtccttcctcctcctcctcttccagtctctaaagcgaaatccgcccttattcctggacaccgtgaagaacttctgtgacatcctgatccctttgaaccagctcgggatctacaagtccaaccttggcgtggtaggatttggaggtctcgtgtcctctgtggctggcctcatcactgtggtgtatcctcagttgaaactgaaggcccgctagggtgtttggaaaatttaagactgacgttcagtggagcaaacatttgcttttgtcatgatgtctactgtacttaattttttttaatcatgtgagcatcttaccaaccggtgatgtgagcagaggtaggacccacaacggagcctgaagactgatgacgtttttgtaaacacggcagtaacttctgcacatttccccttcagtgacttctgactactgcaaaaacatttgtgccgtcattgaagacgtgtaaaggggaagtcagaacattgctgagcatcttttctgtacatagtaagagctcatatatctaacaaa

SEQ ID NO: 1509 - protein, 246 aa, Rattus norvegicus
  ref <308>: DATABASE ACCESSION NUMBER: SWISS-Prot / CAA11838
  ref <309>: DATABASE ENTRY DATE: 2001-12-01
MDAFIRVANQSQGRDRLFRATQHACMLLRYLLESKAGKEAVVTKLKNLETSVSTGRKWFRLGNVLHAIQATEQSIQATDLVPRLCLTLANLNRVVYYICDTVLWAKSVGLTSGINREKWQMRAARHYYYFLLLSLVRDLYEVLLHMGQVARDRAKREKSSGDPPKYSVANEESEWLQSFLLLLFQSLKRNPPLFLDTVKNFCDILIPLNQLGIYKSNLGVVGFGGLVSSVAGLITVVYPQLKLKAR

SEQ ID NO: 1510 - DNA, 1208 bp, Homo sapiens
  ref <308>: DATABASE ACCESSION NUMBER: EMBL / AK001415
  ref <309>: DATABASE ENTRY DATE: 2002-08-06
gtgcgcccgccccctctggggcggagagactcagcccctgcccctcagcggataacctgggactgaccgttccctggggatccgacgggccccagaggacccacgcctgagccccgtgcgactcgtggcctttgggctagaagccatggacgccttcacccgcttcaccaaccagacccagggccgggaccgactcttcagagccactcagtacacatgcatgttgcttagatatttgttagagcccaaagctggcaaagagaaggtggtaatgaagctcaagaaactggagtccagtgtgagcactggtcgtaaatggttcagactaggcaatgtggtacatgctatacaggcaactgagcagagcattcatgccactgacctggtacctcgcttatgcttaacattagccaacctgaaccgtgtgatttatttcatctgtgacaccatcctctgggtgaggagcgtaggtctcacctctggcatcaacaaagagaaatggcgaacgagggctgctcaccactactactattctcttctgctgagcctggtcagggatctgtatgaaatctccctgcagatgaaacgagttacatgtgacagggcaaagaaagagaaatcagcatcccaggatcctctttggttcagcgtggctgaggaggaaacagaatggctccaatcctttctacttcttttattccgatctctgaagcagcatcctcccttgctcctggacacagtgaagaacctttgtgatatcctgaaccctttggaccagctggggatctataaatccaatcctggcatcattggacttggaggtcttgtgtcctctatagcaggcatgatcactgtggcatatcctcagatgaagctgaagacccgttagggtgtttttaggcttggaactagtacctactttaaaagatggcctcttggtgggacagacatttgtataagtcacaggccatgtcatactgtgcttaagttcttgttcatgtgagcatttaacaacctgtgatgtgggcagagatgaggccaagaacggagaagggaggagcatgaagagttgtatgtttttggagtgctggagtgacttgtgaatttctgaatattttcccttcatctaacattgattgaacatctcttatgtgcatagtgggagcttagtatttgctgaatgaataaaaattgaaaggaaaaaattt

SEQ ID NO: 1511 - protein, 247 aa, Homo sapiens
  ref <308>: DATABASE ACCESSION NUMBER: Refseq / NP_003838
  ref <309>: DATABASE ENTRY DATE: 2002-11-05
MDAFTRFTNQTQGRDRLFRATQYTCMLLRYLLEPKAGKEKVVMKLKKLESSVSTGRKWFRLGNVVHAIQATEQSIHATDLVPRLCLTLANLNRVIYFICDTILWVRSVGLTSGINKEKWRTRAAHHYYYSLLLSLVRDLYEISLQMKRVTCDRAKKEKSASQDPLWFSVAEEETEWLQSFLLLLFRSLKQHPPLLLDTVKNLCDILNPLDQLGIYKSNPGIIGLGGLVSSIAGMITVAYPQMKLKTR

SEQ ID NO: 1512 - DNA, 580 bp, Rattus norvegicus
  ref <308>: DATABASE ACCESSION NUMBER: EMBL / AJ224879
  ref <309>: DATABASE ENTRY DATE: 2002-02-28
aaacacaccggtaagtggggcaagaccatcatcgagtaccgatcacagaagacctcacgccttcccattgttgacattgcacccatggacatcggagggcctgatcaggaatttggtgtggacatagggcctgtctgtttcttgtaaaaccctcaaccccaaaacaacacaatccattgcgaacccaaaggacccaaatactttctaaccgcagtcactctaggatctgcactgaatggctgacctgacctgatattcaactatcctaacctcacagtccggaccattctcccctttctaagagacctgaactgggcagactgcaaaataaaatctcgaagttctatttatttattgtcttcctgtaagacctttgggtcaaggcggagacaggaactatctggtgtgagtcagacgccccccgagtgactgctcccagcccagccagaagacccctacaggtgctgggcacaggaactgtatgtcctacacaatggtgctattttgtgtcaaacacctctgtattttttaaaacaccaattgatattaaaaaccaaaaaaaaaaaaatcattggaaagg

SEQ ID NO: 1513 - protein, 1419 aa, Rattus norvegicus
  ref <308>: DATABASE ACCESSION NUMBER: SWISS-Prot / AAA79780
  ref <309>: DATABASE ENTRY DATE: 2002-10-01
MIRLGAPQSLVLLTLLIATVLQCQGQDARKLGPKGQKGEPGDIKDIIGPKGPPGPQGPAGEQGPRGDRGDKGERGAPGPRGRDGEPGTPGNPGPPGPPGPPGPPGLGGGNFAAQMAGGFDEKAGGAQMGVMQGPMGPMGPRGPPGPAGAPGPQGFQGNPGEPGEPGVSGPIGPRGPPGPAGKPGDDGEAGKPGKAGERGLPGPQGARGFPGTPGLPGVKGHRGYPGLDGAKGEAGAPGVKGESGSPGENGSPGPMGPRGLPGERGRTGPAGAAGARGNDGQPGPAGPPGPVGPAGGPGFLGAPGAKGEAGPTGARGPEGAQGSRGEPGNPGSPGPAGASGNPGTDGIPGAKGSAGAPGIAGAPGFPGPRGPPGPQGATGPLGPKGQTGEPGIAGFKGEQGPKGETGPAGPQGAPGPAGEEGKRGARGEPGGAGPIGPPGERGAPGNRGFPGQDGLAGPKGAPGERGPSGLAGPKGANGDPGRPGEPGLPGARGLTGRPGDAGPQGKVGPSGAPGEDGRPGPPGPQGARGQPGVMGFPGPKGANGEPGKAGEKGLAGAPGLRGLPGKDGETGAAGPPGPSGPAGERGEQGAPGPSGFQGLPGPPGPPGEGGKQGDQGIPGEAGAPGLVGPRGERGFPGERGSPGAQGLQGPRGLPGTPGTDGPKGAAGPDGPPGAQGPPGLQGMPGERGAAGIAGPKGDRGDVGEKGPEGAPGKDGGRGLTGPIGPPGPAGANGEKGEVGPPGPSGSTGARGAPGERGETGPPGPAGFAGPPGADGQPGAKGDQGEAGQKGDAGAPGPQGPSGAPGPQGPTGVTGPKGARGAQGPPGATGFPGAAGRVGPPGSNGNPGPAGPPGPAGKDGPKGARGDTGAPGRAGDPGLQGPAGAPGEKGEPGDDGPSGSDGPPGPQGLAGQRGIVGLPGQRGERGFPGLPGPSGEPGKQGAPGASGDRGPPGPVGPPGLTGPAGEPGREGSPGADGPPGRDGAAGVKGDRGETGALGAPGAPGPPGSPGPAGPTGKQGDRGEAGAQGPMGPSGPAGARGIAGPQGPRGDKGEAGEPGERGLKGHRGFTGLQGLPGPPGPSGDQGTSGPAGPSGPRGPPGPVGPSGKDGSNGIPGPIGPPGPRGRSGETGPAGPPGNPGPPGPPGPPGPGIDMSAFAGLGQREKGPDPLQYMRADEADSTLRQHDVEVDATLKSLNNQIESIRSPDGSRKNPARTCQDLKLCHPEWKSGDYWIDPNQGCTLDAMKVFCNMETGESCVYPNPATVPRKNWWSSKSKEKKHIWFGETMNGGFHFSYGDGNLAPNTANVQMTFLRLLSTEGSQNITYHCKNSIAYLDEAAGNLKKALLIQGSNDVEMRAEGNSRFTYTALKDGCTKHTGKWGKTIIEYRSQKTSRLPIVDIAPMDIGGPDQEFGVDIGPVCFL

SEQ ID NO: 1514 - DNA, 327 bp, Rattus norvegicus
  misc_feature (1)..(327): n=a, c, g or t
  ref <308>: DATABASE ACCESSION NUMBER: EMBL / C06598
  ref <309>: DATABASE ENTRY DATE: 1996-08-26
gggctgcaggtttgacagcagcctaccacagaaccagccctttgttttctcccttggcactggccaggtcatcaagggctgggaccaggggctactggggatgtgtgaaggggaaaagcggaagctagtgatcccgtctgagctggggtatgganagcggggagcccccccaaanataccaggtggagcaaccctggtgtttgaggtggaactgctcaanattganagacgttcanaactgtancaggctgcaaaggggtaggaggcccctatcagggaccanactgtttaaaaacaaacaaaaaaacctttaaaaccccaaaaaaa

SEQ ID NO: 1515 - DNA, 562 bp, Homo sapiens
  ref <308>: DATABASE ACCESSION NUMBER: EMBL / M75099
  ref <309>: DATABASE ENTRY DATE: 2000-03-04
gttgactccgggggcgcggcgaggagagacatgaggctgagctggttccgggtcctgacagtactgtccatctgcctgagcgccgtggccacggccacgggggccgagggcaaaaggaagctgcagatcggggtcaagaagcgggtggaccactgtcccatcaaatcgcgcaaaggggatgtcctgcacatgcactacacggggaagctggaagatgggacagagtttgacagcagcctgccccagaaccagccctttgtcttctcccttggcacaggccaggtcatcaagggctgggaccaggggctgctggggatgtgtgagggggaaaagcgcaagctggtgatcccatccgagctagggtatggagagcggggagctcccccaaagattccaggcggtgcaaccctggtgttcgaggtggagctgctcaaaatagagcgacgaactgagctgtaaccagactggggaggggcagggggagaggcccccatcagggaccagactgttccaaaaaaaaaacaaaaaacaaaaacaaacaaaaaaacacttaaaagccaag

SEQ ID NO: 1516 - protein, 141 aa, Homo sapiens
  ref <308>: DATABASE ACCESSION NUMBER: SWISS-Prot / P26885
  ref <309>: DATABASE ENTRY DATE: 2002-06-15
MRLSWFRVLTVLSICLSAVASTGTEGKRKLQIGVKKRVDHCPIKSRKGDVLHMHYTGKLEDGTEFDSSLPQNQPFVFSLGTGQVIKGWDQGLLGMYEGEKRKLVIPSELGYGERGAPPKIPGGATLVFEVELLKIERRTEL

SEQ ID NO: 1517 - DNA, 1370 bp, Rattus norvegicus
  ref <308>: DATABASE ACCESSION NUMBER: EMBL / D00092
  ref <309>: DATABASE ENTRY DATE: 1998-03-11
gggcctgaggcttttaaaaattatacattggattcagcaacagctgccacacaggcagccccagccccagctgcagctccagctgctgccccagctgcaccttctgcaagtgctccaggtagctcctatcccgttcacatgcagattgttcttcctgccctctccccaaccatgaccatgggcaccgtccagaggtgggaaaagaaagtgggagagaagctgagtgaaggagacttgctggcagagatagagaccgacaaggccaccataggctttgaagtacaagaagaaggttatctggcaaaaatcctggtccctgaaggcacaagggatgttcctctgggaaccccgctatgtatcatagtagaaaaacaggaagatatagcagcatttgcagactacaggccaacagaagtgaccagcttaaagccacaggcaccaccacctgtcccacccccagtggcagctgttcctcccatcccccagcctttagcacctaccccctcagccgctcctgctggaccaaagggaagggtgttcgttagccctcttgcaaagaaattggcagcagagaaagggattgacctcacccaagttaaagggacgggaccagaaggcagaatcatcaagaaggacattgactcttttgtgcctactaaggctgctcctgccgctgcagcagctgctcccccgggtccaagagtggcaccaactcctgcaggtgtcttcatagacatccccatcagcaacattcgtcgagtgattgcgcagaggctcatgcagtcgaagcagactatacctcattattacctttctgttgatgtaaatatgggagaggtgctgttggtgcggaaggaacttaataagatgcttgaaggtaaaggaaaaatctccgtcaatgacttcatcataaaagcttcagctttggcctgcctgaaagttcctgaagcaaactcatcttggatggacacagttatacgacaaaatcatgtggttgatgtcagcgttgctgtcagtacccctgcaggacttatcacccctattgtgtttaatgcacacataaaaggactggaaaccattgctagtgatgttgtttctttagcctccaaagcaagagagggtaaacttcagcctcacgagttccagggtgggacatttacaatctccaacttagggatgttcggaattaagaatttctctgcgattattaacccacctcaggcatgtattttggcaattggtgcttccgaggataaactgatccctgcagataatgagaaaggctttgacgtggctagtgtgatgtctgtcacacactcagctgtgatcatcgagttgtggatggagcagttggagcccagtggcttgct

SEQ ID NO: 1518 - protein, 555 aa, Rattus norvegicus
  ref <308>: DATABASE ACCESSION NUMBER: SWISS-Prot / BAA20956
  ref <309>: DATABASE ENTRY DATE: 2002-06-15
SLPPHQKVPLPSLSPTMQAGTIARWEKKEGEKISEGDLIAEVETDKATVGFESLEECYMAKILVPEGTRDVPIGCIICITVEKPQDIEAFKNYTLDSATAATQAAPAPAAAPAAAPAAPSASAPGSSYPVHMQIVLPALSPTMTMGTVQRWEKKVGEKLSEGDLLAEIETDKATIGFEVQEEGYLAKILVPEGTRDVPLGTPLCIIVEKQEDIAAFADYRPTEVTSLKPQAPPPVPPPVAAVPPIPQPLAPTPSAAPAGPKGRVFVSPLAKKLAAEKGIDLTQVKGTGPEGRIIKKDIDSFVPTKAAPAAAAAAPPGPRVAPTPAGVFIDIPISNIRRVIAQRLMQSKQTIPHYYLSVDVNMGEVLLVRKELNKMLEGKGKISVNDFIIKASALACLKVPEANSSWMDTVIRQNHVVDVSVAVSTPAGLITPIVFNAHIKGLETIASDVVSLASKAREGKLQPHEFQGGTFTISNLGMFGIKNFSAIINPPQACILAIGASEDKLIPADNEKGFDVASVMSVTLSCDHRVVDGAVGAQWLAEFKKYLEKPVTMLL

SEQ ID NO: 1519 - DNA, 3219 bp, Homo sapiens
  ref <308>: DATABASE ACCESSION NUMBER: Refseq / XM_041355
  ref <309>: DATABASE ENTRY DATE: 2002-08-01
acaaacctgaaacgaaatctttgcaaccagtacagcctgcgcggggcgcggcccagtccatcccccttcggatgcgcagaagcagaggtcaccacgccggacccctcgattccctcgcgggcgattcctggctccttcaccaccccagcactccaagacccccgccctttggcctgaggctcccactgccctagccagttcccgggctcacttccagcttttccagaaagcttggccacgcccctcggcccagactctcaggccactcggccgcaattaacccgcgtctctgcgcctttttaggcccctccccctcggtcgtgcccttgtcatctcttaggccccgtctcaccctttcggatgcctcccctagaaccctaccactttccacccctttccgtctgttatttctcccaaacttgcgcccgcacaggcccctctggaacactcctgccccgtagtgcccctcgtccccgctccgtagagaaagagcgtgcgtgccgcgcatttctggcctggggagcgggtggagtaaacctgcgggaaccattttacgacaacgtgcggctgtgcggtgtggctgacggcaacgccgctgctcttggagaggtcactccggagacggcgttggttttggggtgtggggggttggtggcactatgtggcgcgtctgtgcgcgacgggctcagaatgtagccccatgggcgggactcgaggctcggtggacggccttgcaggaggtacccggaactccacgagtgacctcgcgatctggcccggctcccgctcgtcgcaacagcgtgactacagggtatggcggggtccgggcactgtgcggctggacccccagttctggggccacgccgcggaaccgcttactgctgcagcttttggggtcgcccggccgccgctattacagtcttcccccgcatcagaaggttccattgccttctctttcccccacaatgcaggcaggcaccatagcccgttgggaaaaaaaagagggggaccaaatcaatgaaggtgacctaattgcagaggttgaaactgataaagccactgttggatttgagagcctggaggagtgttatatggcaaagatacttgttgctgaaggtaccagggatgttcccatcggagcgatcatctgtatcacagttggcaagcctgaggatattgaggcctttaaaaattatacactggattcctcagcagcacctaccccacaagcggccccagcaccaacccctgctgccactgcttcgccacctacaccttctgctcaggctcctggtagctcatatccccctcacatgcaggtacttcttcctgccctctctcccaccatgaccatgggcacagttcagagatgggaaaaaaaagtgggtgagaagctaagtgaaggagacttactggcagagatagaaactgacaaagccactataggttttgaagtacaggaagaaggttatctggcaaaaatcctggtccctgaaggcacaagagatgtccctctaggaaccccactctgtatcattgtagaaaaagaggcagatatatcagcatttgctgactataggccaaccgaagtaacagatttaaaaccacaagcgccaccacctaccccacccccggtggccgctgttcctccaactccccagcctttagctcctacaccttcagcaccctgcccagctactcctgctggaccaaagggaagggtgtttgttagccctcttgcaaagaagttggcagtagagaaagggattgatcttacacaagtaaaagggacaggaccagatggtagaatcaccaagaaggatatcgactcttttgtgcctagtaaagttgctcctgctccggcagctgttgtgcctcccacaggtcctggaatggcaccagttcctacaggtgtcttcacagatatcccaatcagcaacattcgtcgggttattgcacagcgattaatgcaatcaaagcaaaccatacctcattattacctttctatcgatgtaaatatgggagaagttttgttggtacggaaagaacttaataagatattagaagggagaagcaaaatttctgtcaatgacttcatcataaaagcttcagctttggcatgtttaaaagttcccgaagcaaattcttcttggatggacacagttataagacaaaatcatgttgttgatgtcagtgttgcggtcagtactcctgcaggactcatcacacctattgtgtttaatgcacatataaaaggagtggaaaccattgctaatgatgttgtttctttagcaaccaaagcaagagagggtaaactacagccacatgaattccagggtggcacttttacgatctccaatttaggaatgtttggaattaagaatttctctgctattattaacccacctcaagcatgtattttggcaattggtgcttcagaggataaactggtccctgcagataatgaaaaagggtttgatgtggctagcatgatgtctgttacactcagttgtgatcaccgggtggtggatggagcagttggagcccagtggcttgctgagtttagaaagtaccttgaaaaacctatcactatgttgttgtaactaactcaagaatttctaaactctcccaggtcacactgattcattcttaacaagatatttatatgttattaaacaggtggttctttttattttaaacagttatttttattattgagtctgtccagataagttatttataatgggcattactgaatttttaaaatgccgattacacccaaatattgtgcacatttaataatcagacaccagatttttagctctgtactcctaattaagggacatgtatgtggccttgcctagccctttggtgataagtacttcctctaggaaatgtacgataggtagaattgtggttccctaaagacaagtacataaaggtgaccctgatgaaaccttgaagttctgaaatttaactgcctaaaatgttctccttagatgtgagagaaagagaaatcaggaaaattaattctcttgggggaagggcttgaattgaagctttactttagaatttagccctggtttgaaattttccattacatgatcttggtttatcatcgatgggaagggtagaaaacttcaaggaaaataagtgaaattttaaaagtcagcattttcttagacctcttcagctgattgtttatttttctatgaattc

SEQ ID NO: 1520 - protein, 647 aa, Homo sapiens
  ref <308>: DATABASE ACCESSION NUMBER: Refseq / XP_041355
  ref <309>: DATABASE ENTRY DATE: 2002-08-01
MWRVCARRAQNVAPWAGLEARWTALQEVPGTPRVTSRSGPAPARRNSVTTGYGGVRALCGWTPSSGATPRNRLLLQLLGSPGRRYYSLPPHQKVPLPSLSPTMQAGTIARWEKKEGDQINEGDLIAEVETDKATVGFESLEECYMAKILVAEGTRDVPIGAIICITVGKPEDIEAFKNYTLDSSAAPTPQAAPAPTPAATASPPTPSAQAPGSSYPPHMQVLLPALSPTMTMGTVQRWEKKVGEKLSEGDLLAEIETDKATIGFEVQEEGYLAKILVPEGTRDVPLGTPLCIIVEKEADISAFADYRPTEVTDLKPQAPPPTPPPVAAVPPTPQPLAPTPSAPCPATPAGPKGRVFVSPLAKKLAVEKGIDLTQVKGTGPDGRITKKDIDSFVPSKVAPAPAAVVPPTGPGMAPVPTGVFTDIPISNIRRVIAQRLMQSKQTIPHYYLSIDVNMGEVLLVRKELNKILEGRSKISVNDFIIKASALACLKVPEANSSWMDTVIRQNHVVDVSVAVSTPAGLITPIVFNAHIKGVETIANDVVSLATKAREGKLQPHEFQGGTFTISNLGMFGIKNFSAIINPPQACILAIGASEDKLVPADNEKGFDVASMMSVTLSCDHRVVDGAVGAQWLAEFRKYLEKPITMLL

SEQ ID NO: 1521 - DNA, 3557 bp, Rattus norvegicus
  ref <308>: DATABASE ACCESSION NUMBER: EMBL / D00189
  ref <309>: DATABASE ENTRY DATE: 1997-12-05
tctgtgccgtgggacccacgaccgacagacgcacgctcccaacgcggcgggcgtgcagaggcccccagcccgagcccgcgctgagcccgtcctgcgccacgctcacagcctgtccgccgtcttcccgcggagccgccaagatgggggacaaaaaagatgacaagagctcgcccaagaagagcaaggccaaagagcgccgggacctggatgacctcaagaaggaagtggctatgacagagcacaagatgtcagtagaagaggtctgccggaaatacaataccgactgcgtgcagggtctgacacacagtaaagcccaggagatcctagcccgggatgggcctaacgccctcacaccaccgcccaccaccccagaatgggtcaagttctgccgacagctatttggtggcttctccatcctgctgtggatcggggcgatcctttgcttcctggcctatggcatccaggcagggactgaggatgacccttccggtgacaatctgtacctgggcatagtgctggccgctgtggtgatcatcaccggctgcttctcctactaccaagaagccaagagctctaagattatggagtccttcaagaacatggttccccagcaagcccttgtgatccgggaaggtgaaaagatgcaggtgaatgcggaggaggtggtggtcggggacctggtggagatcaagggtggcgaccgggtgcccgctgacctgcgcatcatctcggcccatggctgcaaggtggacaactcttccctgactggcgaatctgagcctcagacccgctccccggactgcacacacgacaacccactggagacccggaacatcaccttcttttccaccaactgtgtggaaggcaccgctcgtggtgtggtggtagccacaggtgaccgcaccgtcatgggccgcattgccaccctggcctcaggcctggaggtgggcaagacgcccatcgccattgagatcgagcacttcatccagctcatcactggcgtggccgtgttcctgggcgtctccttcttcatcctctccctcattctgggctacacctggctggaggctgtcatcttcctcatcggtatcattgtggccaatgtcccagagggcctgctggctactgtcacggtgtgtctgacgctgaccgccaagcgcatggctcggaagaactgtctggtaaagaacctggaggcggtggagacgctaggctccacatccaccatctgctccgacaagaccggcaccctcacccagaaccgcatgaccgtcgcccacatgtggtttgacaaccagatccacgaggccgacactactgaggatcagtcagggacctctttcgacaagagctcacacacctgggtggccctgtcccacatcgccggtctctgcaaccgggctgtcttcaagggcgggcaggataacatccctgtactcaagagggacgtggcgggtgatgcctcagagtccgccctgcttaagtgcatcgagctgtcctcgggttccgtaaagctgatgcgcgaacgaaacaagaaagtggccgagattcccttcaactccactaacaaataccagctatccatccatgagactgaggaccccaatgacaaccgatacctgttagtgatgaagggcgcccctgaacgcattctggaccgctgtgcgaccatcctcctgcagggcaaggagcagcctctggatgaggagatgaaggaggccttccagaacgcctacctggagcttggtggcctgggcgagcgtgtgctgggtttctgccattactacctgccggaggaacagttccccaagggctttgcctttgactgtgatgacgtgaacttcaccacagacaacctttgcttcgtgggtctcatgtccatgatcgaccctccccgggcagctgtccctgatgctgtgggcaaatgccgcagtgcaggcatcaaggtcatcatggtcaccggcgatcaccccatcactgcgaaggccatcgccaaaggtgtaggcatcatctccgagggtaacgagactgtggaggacatcgctgcccggctcaacatccctgtcagccaggtcaaccccagggatgccaaagcctgtgtgattcatggcaccgacctcaaggacttcacctctgagcagattgacgagatcctacagaaccacactgagatcgtctttgcccgaacctcccctcagcagaagctcatcatcgtggagggctgtcagagacagggagcaattgtggctgtgactggcgatggtgtgaatgactcccctgctctgaagaaggctgatattggggtggccatgggcattgctggctctgatgtctctaagcaggctgccgacatgattctgctggatgacaattttgcttccattgtcactggtgtggaggaaggccgcctgatctttgacaacctgaagaaatccatcgcctacactctgaccagcaacatccctgagatcacacccttccttctcttcatcatggccaacatcccactgccccttggcaccatcaccatcctctgcattgacctgggcaccgacatggtccctgcaatctccttggcctacgaggctgcagagagtgacatcatgaagaggcagcccaggaacccacgcacagacaaactggtcaacgaaaggctcatcagcatggcctatgggcagatcgggatgatccaggccctcggtggtttcttctcctactttgtcatcctggcagaaaatggtttcttgcccggtaacctggtgggcatccggctcaactgggatgaccgcactgtcaacgacctggaagacagctacgggcagcagtggacttatgagcagaggaaggtggttgagttcacgtgccacacagccttcttcgtgagcatagtggtggtccagtgggctgacctgatcatttgcaagaccaggaggaattccgtcttccagcagggcatgaagaataagatcttgatcttcggactgtttgaggaaacggccctcgctgccttcctgtcctactgcccaggcatggatgtggcccttcgcatgtacccgctcaagcccagctggtggttctgtgccttcccctacagtttcctcatcttcgtctatgatgagattcgcaaactcatcctgcgcaggaaccccgggggttgggtggagaaagagacctactattgacctcagccaccacgtcgcccatgtcttccctgccccccagcccaggacagccctctccggtcccccattttgtactctggggggaggggccttctctccccgatggcccccctctctccttgtggcccagtctcctctcccacacctcggttacctctcactttccctcatttctccctctggctggcttctctccccccacagcccctgcctctcttctccttcccttttctgtgtctctccccctctctcccttgcagccctgcccctcattttctccctgggctcctttttacacccctgggccctgtctcctggctaatgccatctccggttctaaatctgaacaattatcaaatatatcagtggggagag

SEQ ID NO: 1522 - protein, 1014 aa, Rattus norvegicus
  misc_feature (1)..(1014): Xaa=Unknown amino acid
MGDKKDDKSSPKKSKAKERRDLDDLKKEVAMTEHKMSVEEVCRKYNTDCVQGLTHSKAQEILARDGPNALTPPPTTPEWVKFCRQLFGGFSILLWIGAILCFLAYGIQAGTEDDPSGDNLYLGIVLAAVVIITGCFSYYQEAKSSKIMESFKNMVPQQALVIREGEKMQVNAEEVVVGDLVEIKGGDRVPADLRIISAHGCKVDNSSLTGESEPQTRSPDCTHDNPLETRNITFFSTNCVEGTARGVVVATGDRTVMGRIATLASGLEVGKTPIAIEIEHFIQLITGVAVFLGVSFFILSLILGYTWLEAVIFLIGIIVANVPEGLLATVTVCLTLTAKRMARKNCLVKNLEAVETLGSTSTICSDKTGTLTQNRMTVAHMWFDNQIHEADTTEDQSGTSFDKSSHTWVALSHIAGLCNRAVFKGGQDNIPVLKRDVAGDASESALLKCIELSSGSVKLMRERNKKVAEIPFNSTNKYQLSIHETEDPNDNRYLLVMKGAPERILDRCATILLQGKEQPLDEEMKEAFQNAYLELGGLGERVLGFCHYYLPEEQFPKGFAFDCDDVNFTTDNLCFVGLMSMIDPPRAAVPDAVGKCRSAGIKVIMVTGDHPITAKAIAKGVGIISEGNETVEDIAARLNIPVSQVNPRDAKACVIHGTDLKDFTSEQIDEILQNHTEIVFARTSPQQKLIIVEGCQRQGAIVAVTGDGVNDSPALKKADIGVAMGIAGSDVSKQAADMILLDDNFASIVTGVEEGRLIFDNLKKSIAYTLTSNIPEITPFLLFIMANIPLPLGTITILCIDLGTDMVPAISLAYEAAESDIMKRQPRNPRTDKLVNERLISMAYGQIGMIQALGGFFSYFVILAENGFLPGNLVGIRLNWDDRTVNDLEDSYGQQWTYEQRKVVEFTCHTAFFVSIVVVQWADLIICKTRRNSVFQQGMKNKILIFGLFEETALAAFLSYCPGMDVALRMYPLKPSWWFCAFPYSFLIFVYDEIRKLILRRNPGGWVEKETYYX

SEQ ID NO: 1523 - protein, 1013 aa, Homo sapiens
  ref <308>: DATABASE ACCESSION NUMBER: PIR / S00801
  ref <309>: DATABASE ENTRY DATE: 2002-04-19
MGDKKDDKDSPKKNKGKERRDLDDLKKEVAMTEHKMSVEEVCRKYNTDCVQGLTHSKAQEILARDGPNALTPPPTTPEWVKFCRQLFGGFSILLWIGAILCFLAYGIQAGTEDDPSGDNLYLGIVLAAVVIITGCFSYYQEAKSSKIMESFKNMVPQQALVIREGEKMQVNAEEVVVGDLVEIKGGDRVPADLRIISAHGCKVDNSSLTGESEPQTRSPDCTHDNPLETRNITFFSTNCVEGTARGVVVATGDRTVMGRIATLASGLEVGKTPIAIEIEHFIQLITGVAVFLGVSFFILSLILGYTWLEAVIFLIGIIVANVPEGLLATVTVCLTVTAKRMARKNCLVKNLEAVETLGSTSTICSDKTGTLTQNRMTVAHMWFDNQIHEADTTEDQSGTSFDKSSHTWVALSHIAGLCNRAVFKGGQDNIPVLKRDVAGDASESALLKCIELSSGSVKLMRERNKKVAEIPFNSTNKYQLSIHETEDPNDNRYLLVMKGAPERILDRCSTILLQGKEQPLDEEMKEAFQNAYLELGGLGERVLGFCHYYLPEEQYPQGFAFDCDDVNFTTDNLCFVGLMSMIGPPRAAVPDAVGKCRSAGIKVIMVTGDHPITAKAIAKGVGIISEGNETVEDIAARLNIPVSQVNPRDAKACVIHGTDLKDFTSEQIDEILQNHTEIVFARTSPQQKLIIVEGCQRQGAIVAVTGDGVNDSPALKKADIGVAMGIAGSDVSKQAADMILLDDNFASIVTGVEEGRLIFDNLKKSIAYTLTSNIPEITPFLLFIMANIPLPLGTITILCIDLGTDMVPAISLAYEAAESDIMKRQPRNPRTDKLVNERLISMAYGQIGMIQALGGFFSYFVILAENGFLPGNLVGIRLNWDDRTVNDLEDSYGQQWTYEQRKVVEFTCHTAFFVSIVVVQWADLIICKTRRNSVFQQGMKNKILIFGLFEETALAAFLSYCPGMDVALRMYPLKPSWWFCAFPYSFLIFVYDEIRKLILRRNPGGWVEKETYY

SEQ ID NO: 1524 - DNA, 3557 bp, Rattus norvegicus; identical to SEQ ID NO: 1521
  ref <308>: DATABASE ACCESSION NUMBER: EMBL / D00189
  ref <309>: DATABASE ENTRY DATE: 1997-12-05

SEQ ID NO: 1525 - protein, 1014 aa, Rattus norvegicus; identical to SEQ ID NO: 1522
  misc_feature (1)..(1014): Xaa=Unknown amino acid

SEQ ID NO: 1526 - protein, 1013 aa, Homo sapiens; identical to SEQ ID NO: 1523
  ref <308>: DATABASE ACCESSION NUMBER: PIR / S00801
  ref <309>: DATABASE ENTRY DATE: 2002-04-19

SEQ ID NO: 1527 - DNA, 1715 bp, Rattus norvegicus
  ref <308>: DATABASE ACCESSION NUMBER: EMBL / D00512
  ref <309>: DATABASE ENTRY DATE: 2000-02-01
gacaagcttttccggtctccatggctgccctggcggttctacacggcgtcgtccgcaggcctctgctccgcgggctgctgcaggaagtaagatgcctgggacgaagttatgcatccaaacccactttgaatgatgtggttatagtgagtgctacacgaactcccattggatccttcctgggcagccttgcctctcagccagccaccaagcttggtactattgcaattcagggagccattgaaaaggcagggattccaaaagaagaagtgaaggaggtctacatgggcaacgtcatccaagggggagaaggacaggccccgaccaggcaagctacactgggtgcaggtctacccattgccactccgtgcaccacagtaaacaaggtgtgtgcctcaggaatgaaagccatcatgatggcctctcaaagtcttatgtgtggacaccaggatgtgatggtggcaggcggaatggagaccatgtcaaatgtcccgtacgtaatgagcagaggagcaacaccatacggtggggtaaaacttgaagacctgattgtgaaagacgggctaaccgatgtctacaataaaattcatatgggcaattgtgctgagaacaccgcgaagaagctgagtatctcgcgggaggagcaggataagtacgccatcggctcttacacccgaagtaaagaggcgtgggatgcagggaagtttgcaaatgagattacgcccatcaccatctcagtgaaaggtaaaccagacgtggtggtgaaggaagatgaagagtacaagcgagttgacttcagtaaagtgccaaagctcaagacagtgttccagaaagaaaacggcacagtaacagctgctaacgccagcacactgaacgacggagcagctgctgtggttctcatgactgcagaggcagcccagcggctcaaggttaagccactggcacgaatcgcagcatttgctgatgctgctgtagaccccattgatttcccactcgcacctgcatatgctgtacctaaggttcttaaatatgcaggactgaaaaaagaagacattgccatgtgggaagtaaatgaagcattcagtgtggttgtactagccaacattaaaatgctggagattgaccctcaaaaagtaaatgtccatggaggagctgtttctctgggccatccaatcgggatgtctggagctcggattgttgttcacttggctcatgccttgaagcaaggagaattcggtctggctagtatttgcaatggaggaggaggggcttccgccgtgctgattgagaagctgtagacatcttgttttaggagacagttccacgtgacccgctgaagtgaactaccccttgggccagattatattcaggataagctatttcattttttattattttctactaaaaatttttaaaaatcacatccaaaaacccattgaaattgcaaataaaaatttctcctcctttaatattttgtaaacagtcggatactctactattgaaatatactgtaggtactagaggcatggctcagccgttaagagcacttgttgctacctgtgtggtgcatggctttaatcccagcacttggagacagaggcaagtgcatctttctgagttaaagttagcctggtccacagagctagtgccctgacagccaagactacacagagtagtagaaactctgggggaaaaaaaaaaaacaaataaaaaaaaaa

SEQ ID NO: 1528 - protein, 424 aa, Rattus norvegicus
  ref <308>: DATABASE ACCESSION NUMBER: SWISS-Prot / BAA00401
  ref <309>: DATABASE ENTRY DATE: 1999-07-15
MAALAVLHGVVRRPLLRGLLQEVRCLGRSYASKPTLNDVVIVSATRTPIGSFLGSLASQPATKLGTIAIQGAIEKAGIPKEEVKEVYMGNVIQGGEGQAPTRQATLGAGLPIATPCTTVNKVCASGMKAIMMASQSLMCGHQDVMVAGGMESMSNVPYVMSRGATPYGGVKLEDLIVKDGLTDVYNKIHMGNCAENTAKKLSISREEQDKYAIGSYTRSKEAWDAGKFANEITPITISVKGKPDVVVKEDEEYKRVDFSKVPKLKTVFQKENGTVTAANASTLNDGAAAVVLMTAEAAQRLKVKPLARIAAFADAAVDPIDFPLAPAYAVPKVLKYAGLKKEDIAMWEVNEAFSVVVLANIKMLEIDPQKVNVHGGAVSLGHPIGMSGARIVVHLAHALKQGEFGLASICNGGGGASAVLIEKL

SEQ ID NO: 1529 - DNA, 1518 bp, Homo sapiens
  ref <308>: DATABASE ACCESSION NUMBER: Refseq / NM_000019
  ref <309>: DATABASE ENTRY DATE: 2000-12-01
aggccgctagggtgcggggttggggaggaggccgctagtctacgcctgtggagccgatactcagccctctgcgaccatggctgtgctggcggcacttctgcgcagcggcgcccgcagccgcagccccctgctccggaggctggtgcaggaaataagatatgtggaacggagttatgtatcaaaacccactttgaaggaagtggtcatagtaagtgctacaagaacacccattggatcttttttaggcagcctttccttgctgccagccactaagcttggttccattgcaattcagggagccattgaaaaggcagggattccaaaagaagaagtgaaagaagcatacatgggtaatgttctacaaggaggtgaaggacaagctcctacaaggcaggcagtattgggtgcaggcttacctatttctactccatgtaccaccataaacaaagtttgtgcttcaggaatgaaagccatcatgatggcctctcaaagtcttatgtgtggacatcaggatgtgatggtggcaggtgggatggagagcatgtccaatgttccatatgtaatgaacagaggatcaacaccatatggtggggtaaagcttgaagatttgattgtaaaagacgggctaactgatgtctacaataaaattcatatgggcagctgtgctgagaatacagcaaagaagctgaatattgcacgaaatgaacaggacgcttatgctattaattcttataccagaagtaaagcagcatgggaagctgggaaatttggaaatgaagttattcctgtcacagttacagtaaaaggtcaaccagatgtagtggtgaaagaagatgaagaatataaacgtgttgattttagcaaagttccaaagctgaagacagttttccagaaagaaaatggcacagtaacagctgccaatgccagtacactgaatgatggagcagctgctctggttctcatgacggcagatgcagcgaagaggctcaatgttacaccactggcaagaatagtagcatttgctgacgctgctgtagaacctattgattttccaattgctcctgtatatgctgcatctatggttcttaaagatgtgggattgaaaaaagaagatattgcaatgtgggaagtaaatgaagcctttagtctggttgtactagcaaacattaaaatgttggagattgatccccaaaaagtgaatatcaatggaggagctgtttctctgggacatccaattgggatgtctggagccaggattgttggtcatttgactcatgccttgaagcaaggagaatacggtcttgccagtatttgcaatggaggaggaggtgcttctgccatgctaattcagaagctgtagacaacctctgctatttaaggagacaaccctatgtgaccagaaggcctgctgtaatcagtgtgactactgtgggtcagcttatattcagataagctgtttcattttttattattttctatgttaacttttaaaaatcaaaatgatgaaatcccaaaaca

SEQ ID NO: 1530 - protein, 427 aa, Homo sapiens
  ref <308>: DATABASE ACCESSION NUMBER: SWISS-Prot / P24752
  ref <309>: DATABASE ENTRY DATE: 2001-10-16
MAVLAALLRSGARSRSPLLRRLVQEIRYVERSYVSKPTLKEVVIVSATRTPIGSFLGSLSLLPATKLGSIAIQGAIEKAGIPKEEVKEAYMGNVLQGGEGQAPTRQAVLGAGLPISTPCTTINKVCASGMKAIMMASQSLMCGHQDVMVAGGMESMSNVPYVMNRGSTPYGGVKLEDLIVKDGLTDVYNKIHMGSCAENTAKKLNIARNEQDAYAINSYTRSKAAWEAGKFGNEVIPVTVTVKGQPDVVVKEDEEYKRVDFSKVPKLKTVFQKENGTVTAANASTLNDGAAALVLMTADAAKRLNVTPLARIVAFADAAVEPIDFPIAPVYAASMVLKDVGLKKEDIAMWEVNEAFSLVVLANIKMLEIDPQKVNINGGAVSLGHPIGMSGARIVGHLTHALKQGEYGLASICNGGGGASAMLIQKL

SEQ ID NO: 1531 - DNA, 1715 bp, Rattus norvegicus; identical to SEQ ID NO: 1527
  ref <308>: DATABASE ACCESSION NUMBER: EMBL / D00512
  ref <309>: DATABASE ENTRY DATE: 2000-02-01

SEQ ID NO: 1532 - protein, 424 aa, Rattus norvegicus; identical to SEQ ID NO: 1528
  ref <308>: DATABASE ACCESSION NUMBER: SWISS-Prot / BAA00401
  ref <309>: DATABASE ENTRY DATE: 1999-07-15

SEQ ID NO: 1533 - DNA, 1518 bp, Homo sapiens; identical to SEQ ID NO: 1529
  ref <308>: DATABASE ACCESSION NUMBER: Refseq / NM_000019
  ref <309>: DATABASE ENTRY DATE: 2000-12-01

SEQ ID NO: 1534 - protein, 427 aa, Homo sapiens; identical to SEQ ID NO: 1530
  ref <308>: DATABASE ACCESSION NUMBER: SWISS-Prot / P24752
  ref <309>: DATABASE ENTRY DATE: 2001-10-16

SEQ ID NO: 1535 - DNA, 1109 bp, Rattus norvegicus
  ref <308>: DATABASE ACCESSION NUMBER: EMBL / D00569
  ref <309>: DATABASE ENTRY DATE: 2000-02-01
gaattccctgctgcaaacatggcgctgctggcccgtgcgttctttgctggggtgtcccgcctcccctgcgatcccggtcctcagaagtttttcagctttggaacgaaaaccctgtatcaaagcatcgatgctccacagtctaaattcttcccacccattttaaagcctatgctaccacctaatgcctttcaaggaaaagtggctttcatcacgggaggaggcactggccttggcaaggcaatgacaactttccgctccagcctgggtgcccagtgtgtgatcgcgagcaggaatattgatgttctgaaagctactgcagaagagattacttctaaaactggaaataaggtctatgcgattcggtgtgacgttcgagatcctgatatggtacacaacacagtactggagctgatcaaagttgcagggcatcctgatgtggtgataaacaatgcggcagggaacttcatttctcccagtgagagactgtctcccaatggttggaggaccataactgacatagttctcaatggtacagcctatgtgacgatagaaattggaaagcagctaattaaagcacagaaaggagtcgcctttcttgctatcactacgatctatgctgagagcggatcaggctttgtaatgccaagttcttcagccaaatcaggcgtggaagccatgaataagtctcttgcagctgaatggggtagatacggaatgcgtttcaacataattcagccagggcctatcaaaaccaaaggtgcctttagccgtttggacccgactggaaaatttgagaaagatatgatcgagagaatcccctgtggtcggctgggaactgtggaggaacttgccaatctagcgactttcctttgcagtgattatgcctcttggatcaatggggcagtcattcgatttgacggtggagaggaagtgtttctgtcaggtgaattcaactctctaaagaaggtcaccaaggaggagtgggatgtaatcgaaggcctcatcagaaagacaaaaggctcctaagacgttcatggcttcctctgtgacaaactaaagtttagggactatatagatggacatttgagttaataaattttttgtctgat

SEQ ID NO: 1536 - protein, 335 aa, Rattus norvegicus
  ref <308>: DATABASE ACCESSION NUMBER: SWISS-Prot / Q64591
  ref <309>: DATABASE ENTRY DATE: 2000-05-30
MALLARAFFAGVSRLPCDPGPQKFFSFGTKTLYQSIDAPQSKFFPPILKPMLPPNAFQGKVAFITGGGTGLGKAMTTFRSSLGAQCVIASRNIDVLKATAEEITSKTGNKVYAIRCDVRDPDMVHNTVLELIKVAGHPDVVINNAAGNFISPSERLSPNGWRTITDIVLNGTAYVTIEIGKQLIKAQKGVAFLAITTIYAESGSGFVMPSSSAKSGVEAMNKSLAAEWGRYGMRFNIIQPGPIKTKGAFSRLDPTGKFEKDMIERIPCGRLGTVEELANLATFLCSDYASWINGAVIRFDGGEEVFLSGEFNSLKKVTKEEWDVIEGLIRKTKGS

SEQ ID NO: 1537 - DNA, 1120 bp, Homo sapiens
  ref <308>: DATABASE ACCESSION NUMBER: EMBL / L26050
  ref <309>: DATABASE ENTRY DATE: 2000-03-04
gagactcaacatgaagctaccggccagggttttctttactctggggtcccggctgccctgtggcctcgctcctcggaggtttttcagttatgggacaaaaatattatatcaaaacactgaagctttgcaatctaaattcttttcacctcttcaaaaagcgatgctaccacctaatagttttcaaggaaaagtggcattcattactgggggaggtactggccttggtaaaggaatgacaactcttctgtccagcctaggtgctcagtgcgtgatagccagccggaagatggatgttttgaaagctaccgcagaacaaatttcttctcaaactggaaataaggttcatgcaattcagtgtgatgtgagggatcctgatatggttcaaaacactgtgtcagaactgatcaaagttgcaggacatcctaatattgtgataaacaatgcagcagggaattttatttctcctactgaaagactttctcctaatgcttggaaaaccataactgacatagttctaaatggcacagccttcgtgacactagaaattggaaaacaactaattaaagcacagaaaggagcagcatttctttctattactactatctatgctgagactggttcaggttttgtagtaccaagtgcttctgccaaagcaggtgtggaagccatgagcaagtctcttgcagctgaatggggtaaatatggaatgcgattcaatgtgattcaaccagggcctataaaaaccaaaggtgcctttagccgtctggacccaactggaacatttgagaaagaaatgattggcagaattccctgtggtcgcctggggactgtagaagaactcgcaaatcttgctgctttcctttgtagtgattatgcttcttggattaatggagcagtcattaaatttgacggtggagaggaagtacttatttcaggggaattcaacgacctgagaaaggtcaccaaggagcagtgggacaccatagaagaactcatcaggaagacaaaaggttcctaagaccactttggccttcatcttggttacagaaaagggaatagaaatgaaacaaattatctctcatcttttgactatttcaagtctaataaattcttaattaac

SEQ ID NO: 1538 - protein, 335 aa, Homo sapiens
  ref <308>: DATABASE ACCESSION NUMBER: SWISS-Prot / Q16698
  ref <309>: DATABASE ENTRY DATE: 2001-10-16
MKLPARVFFTLGSRLPCGLAPRRFFSYGTKILYQNTEALQSKFFSPLQKAMLPPNSFQGKVAFITGGGTGLGKGMTTLLSSLGAQCVIASRKMDVLKATAEQISSQTGNKVHAIQCDVRDPDMVQNTVSELIKVAGHPNIVINNAAGNFISPTERLSPNAWKTITDIVLNGTAFVTLEIGKQLIKAQKGAAFLSITTIYAETGSGFVVPSASAKAGVEAMSKSLAAEWGKYGMRFNVIQPGPIKTKGAFSRLDPTGTFEKEMIGRIPCGRLGTVEELANLAAFLCSDYASWINGAVIKFDGGEEVLISGEFNDLRKVTKEQWDTIEELIRKTKGS

SEQ ID NO: 1539 - DNA, 1109 bp, Rattus norvegicus; identical to SEQ ID NO: 1535
  ref <308>: DATABASE ACCESSION NUMBER: EMBL / D00569
  ref <309>: DATABASE ENTRY DATE: 2000-02-01

SEQ ID NO: 1540 - protein, 335 aa, Rattus norvegicus; identical to SEQ ID NO: 1536
  ref <308>: DATABASE ACCESSION NUMBER: SWISS-Prot / Q64591
  ref <309>: DATABASE ENTRY DATE: 2000-05-30

SEQ ID NO: 1541 - DNA, 1120 bp, Homo sapiens; identical to SEQ ID NO: 1537
  ref <308>: DATABASE ACCESSION NUMBER: EMBL / L26050
  ref <309>: DATABASE ENTRY DATE: 2000-03-04

SEQ ID NO: 1542 - protein, 335 aa, Homo sapiens; identical to SEQ ID NO: 1538
  ref <308>: DATABASE ACCESSION NUMBER: SWISS-Prot / Q16698
  ref <309>: DATABASE ENTRY DATE: 2001-10-16

SEQ ID NO: 1543 - DNA, 1109 bp, Rattus norvegicus; identical to SEQ ID NO: 1535
  ref <308>: DATABASE ACCESSION NUMBER: EMBL / D00569
  ref <309>: DATABASE ENTRY DATE: 2000-02-01

SEQ ID NO: 1544 - protein, 335 aa, Rattus norvegicus; identical to SEQ ID NO: 1536
  ref <308>: DATABASE ACCESSION NUMBER: SWISS-Prot / Q64591
  ref <309>: DATABASE ENTRY DATE: 2000-05-30

SEQ ID NO: 1545 - DNA, 1120 bp, Homo sapiens; identical to SEQ ID NO: 1537
  ref <308>: DATABASE ACCESSION NUMBER: EMBL / L26050
  ref <309>: DATABASE ENTRY DATE: 2000-03-04

SEQ ID NO: 1546 - protein, 335 aa, Homo sapiens; identical to SEQ ID NO: 1538
  ref <308>: DATABASE ACCESSION NUMBER: SWISS-Prot / Q16698
  ref <309>: DATABASE ENTRY DATE: 2001-10-16

SEQ ID NO: 1547 - DNA, 1893 bp, Rattus norvegicus
  ref <308>: DATABASE ACCESSION NUMBER: EMBL / D00636
  ref <309>: DATABASE ENTRY DATE: 1998-03-13
gggtgtagaacggtgccaccactgtcttcttcgccaccatgggggcccagctgagcacgttgagccgagtggtactctccccggtctggttcgtctacagcctcttcatgaagctgtttcagcgctcctcaccggccatcaccctcgagaaccccgacatcaagtaccctctgcggctcatcgacaaggagattatcagccacgacactcggcgcttccgatttgcactcccttcgccccagcacatcctgggccttcctatcggccagcacatctacctctccaccaggatcgatggcaacttggtcattcgtccctacacccctgtgtctagtgatgatgacaagggctttgtggacttggtggtcaaggtttacttcaaggacacgcatcccaagtttccagctggagggaaaatgtctcagtacctggaaaacatgaatattggagacaccattgaattccggggccccaatgggctactggtctaccagggcaaagggaagttcgccatccgtgcagacaagaagtccaaccctgttgtcaggacggtgaagtctgtaggcatgattgcaggagggacaggcatcaccccaatgctgcaggtgatccgagccgtcttgaaggacccgaacgaccacactgtgtgctatctgctcttcgccaaccagtccgagaaagacatcctgctgcggcctgagctggaggaactgaggaacgaacattcttctcgcttcaagctctggtacacagtggacaaagcccccgatgcctgggactatagccaaggcttcgtgaatgaggagatgatcagggaccatcttccacctcctggggaggagacactgatactgatgtgtggacccccaccgatgatccagtttgcctgtttgccaaacctggagcgtgtgggccatcccaaggagcgatgcttcaccttctgatggctggatgctggccactcccatgcctgctgctcacgcactcaccacaaccaccttccaccccttccttccccactactgtcctttaccctgacatatgcccacatccatgctggggcctgggttcagcctggcctgcccagccctggtcatccagctgtactggcccctgaggggcccctttgggagcaggcctgtgtatcaggtggcttctgttgaccactttctgaataggcttctgtctggtactaactggccattaccagagatggtccatgaccacccctttatacacacacacatacacatacagagacagagagacagagagacagagatagacagagatagacagagagacagatacagacatagagacagacagagacagagagagaggagtcagagagctgttagtaccatgtctacccgttaccatggaccgcaatgtgtagtaaggaaatgaaaggtaaacagttatctacagtcctaggaaccatgcctgtcacctaaccacctactgccttaggctatggcctggtctgtgcccctaaacactacattagacagtgacacccagaggttctcttaggagggtgtctggcagtgacaggccagcccccacttgctggccaggagttccttgggtcagcacgtggacccttccaaaaccccacacactgcccctcccctccatgatgccttgagcaccctaagttgtcagcccaacagagtttggtagaccttggggtacctggcttgtttctccatcccatacctccctcccatctggttcccagcctggggggttctgagcagagcctcttttctcggagacagacccggtgcctggcgctgccttcagcagacagcagacagcctcctgcacactggctttttttagtcatttatgggcaaaatgagttaaaataaaactttgcaaatcctg

SEQ ID NO: 1548 - protein, 300 aa, Rattus norvegicus
  ref <308>: DATABASE ACCESSION NUMBER: SWISS-Prot / BAA00530
  ref <309>: DATABASE ENTRY DATE: 2002-06-15
GAQLSTLSRVVLSPVWFVYSLFMKLFQRSSPAITLENPDIKYPLRLIDKEIISHDTRRFRFALPSPQHILGLPIGQHIYLSTRIDGNLVIRPYTPVSSDDDKGFVDLVVKVYFKDTHPKFPAGGKMSQYLENMNIGDTIEFRGPNGLLVYQGKGKFAIRADKKSNPVVRTVKSVGMIAGGTGITPMLQVIRAVLKDPNDHTVCYLLFANQSEKDILLRPELEELRNEHSSRFKLWYTVDKAPDAWDYSQGFVNEEMIRDHLPPPGEETLILMCGPPPMIQFACLPNLERVGHPKERCFTF

SEQ ID NO: 1549 - DNA, 1921 bp, Homo sapiens
  ref <308>: DATABASE ACCESSION NUMBER: Refseq / NM_000398
  ref <309>: DATABASE ENTRY DATE: 2002-11-05
cgcgacggtctcggcggcggcggcggcggcgacagagcgagcgcggcgcgggccaccatgggggcccagctcagcacgttgggccatatggtgctcttcccagtctggttcctgtacagtctgctcatgaagctgttccagcgctccacgccagccatcaccctcgagagcccggacatcaagtacccgctgcggctcatcgaccgggagatcatcagccatgacacccggcgcttccgctttgccctgccgtcaccccagcacatcctgggcctccctgtcggccagcacatctacctctcggctcgaattgatggaaacctggtcgtccggccctatacacccatctccagcgatgatgacaagggcttcgtggacctggtcatcaaggtttacttcaaggacacccatcccaagtttcccgctggagggaagatgtctcagtacctggagagcatgcagattggagacaccattgagttccggggccccagtgggctgctggtctaccagggcaaagggaagttcgccatccgacctgacaaaaagtccaaccctatcatcaggacagtgaagtctgtgggcatgatcgcgggagggacaggcatcaccccgatgctgcaggtgatccgcgccatcatgaaggaccctgatgaccacactgtgtgccacctgctctttgccaaccagaccgagaaggacatcctgctgcgacctgagctggaggaactcaggaacaaacattctgcacgcttcaagctctggtacacgctggacagagcccctgaagcctgggactacggccagggcttcgtgaatgaggagatgatccgggaccaccttccacccccagaggaggagccgctggtgctgatgtgtggccccccacccatgatccagtacgcctgccttcccaacctggaccacgtgggccaccccacggagcgctgcttcgtcttctgagggccgggcaccggtcacacggccaccgcccccgcgcaccccacgccctgttcacgctcacccagtcacctccccacatcgcacactggggccccgggttcagcctggcctgcccgtgccctggtgaatcacctggctgagcagttcccctggagccccttcgggagcagggctgtgtcccagatgggccacggctgagccttcagagtacgtcctgcctggcacttactggtccttaccagagacgcccagccccatccctgtcctcatgacccctcgtccaccccccacacacactataaggctgagggctgccagcagccccgtctgcccaccattcccggccgtggaccatagtcgggatgtcagcagacacacatggcaggcccaaagctgcaggtcccagggcccaccccagccacgcctgtcacccccactcccgcctcagggccaggcccaggcctcaccacctgacgctgcatgagacattgacaccagaaagccctcttgggggcactgctccctaccccagggccctggccagccgggagcttggctctcctctggctagagtgggaagagggggctggccatggggccctcccagaacctcagcatttccttccagcccatccaaacactgaggcagccttggggaaccccgagctggggggttggcagcccactgcaccgcctcagggttttggggtcctgggctggggccacatccctgatggcagaactcccacaaccacatgtatttattcctctgtcctaaaccgtcccctccttccctcacccccagcacagggggattctgagcagtgcctcttgtctgagggacatatcagtgacctcgacgttgcctttagactacagttgtgttagcctcttgcgtattggctttttcagagtcatttatgagcagaaaaaaaaaaagtaaaactttgctaatatt

SEQ ID NO: 1550 - protein, 300 aa, Homo sapiens
  ref <308>: DATABASE ACCESSION NUMBER: SWISS-Prot / P00387
  ref <309>: DATABASE ENTRY DATE: 2002-06-15
GAQLSTLGHMVLFPVWFLYSLLMKLFQRSTPAITLESPDIKYPLRLIDREIISHDTRRFRFALPSPQHILGLPVGQHIYLSARIDGNLVVRPYTPISSDDDKGFVDLVIKVYFKDTHPKFPAGGKMSQYLESMQIGDTIEFRGPSGLLVYQGKGKFAIRPDKKSNPIIRTVKSVGMIAGGTGITPMLQVIRAIMKDPDDHTVCHLLFANQTEKDILLRPELEELRNKHSARFKLWYTLDRAPEAWDYGQGFVNEEMIRDHLPPPEEEPLVLMCGPPPMIQYACLPNLDHVGHPTERCFVF

SEQ ID NO: 1551 - DNA, 1893 bp, Rattus norvegicus; identical to SEQ ID NO: 1547
  ref <308>: DATABASE ACCESSION NUMBER: EMBL / D00636
  ref <309>: DATABASE ENTRY DATE: 1998-03-13

SEQ ID NO: 1552 - protein, 300 aa, Rattus norvegicus; identical to SEQ ID NO: 1548
  ref <308>: DATABASE ACCESSION NUMBER: SWISS-Prot / BAA00530
  ref <309>: DATABASE ENTRY DATE: 2002-06-15

SEQ ID NO: 1553 - DNA, 1921 bp, Homo sapiens; identical to SEQ ID NO: 1549
  ref <308>: DATABASE ACCESSION NUMBER: Refseq / NM_000398
  ref <309>: DATABASE ENTRY DATE: 2002-11-05

SEQ ID NO: 1554 - protein, 300 aa, Homo sapiens; identical to SEQ ID NO: 1550
  ref <308>: DATABASE ACCESSION NUMBER: SWISS-Prot / P00387
  ref <309>: DATABASE ENTRY DATE: 2002-06-15

SEQ ID NO: 1555 - DNA, 2513 bp, Rattus norvegicus
  ref <308>: DATABASE ACCESSION NUMBER: EMBL / D00688
  ref <309>: DATABASE ENTRY DATE: 2002-06-03
gaattcctgacggatctggagaagcccaatctcgcaggccacatgttcgacgtaggtctgattggaggcggcatctcaggattggctgctgccaaactgttgtctgaatacaaaattaatgtcttggttttggaagcccgggatagagttggaggaagaacatatactgtgaggaatgagcatgtcaaatgggtagatgttggtggagcctatgtgggaccaacccagaacagaatcttacgcttgtctaaggagctaggcatagagacctataaagtgaatgtcaatgagcgtctagttcaatatgtcaaggggaaaacttacccattccgtggtgcattcccacctgtgtggaaccccttggcatatttggattacaacaacctatggagaacaatggatgaaatgggaaaagagatccccgttgatgcaccgtggcaagcaagacacgctcaggaatgggacaagatgaccatgaaagatctcattgataaaatctgttggacaaaaactgctcgggaatttgcgtatctttttgtgaacattaatgtgacttctgagcctcatgaggtatctgccctgtggttcctgtggtatgtgaggcagtgtgggggcactgctcggatattctcagttaccaatggcggccaggaacggaaatttgtaggtggatctggccaagtaagtgaacagataatgggtctccttggagataaagtgaagctgagctctcctgttacttatattgaccaaacagatgacaacatcattgtagaaacactgaatcatgaacactatgagtgcaaatacgtaattagtgccatcccaccgattttgactgccaagatccactttaaaccagagcttccacctgagagaaaccaattaattcagcgtcttccaatgggggctgttatcaagtgcatggtgtattacaaggaagccttctggaagaaaaaggactattgtggctgcatgatcattgaagatgaggaggctccaatcgccatcactctggatgacactaaaccagatgggtcactgcctgccatcatgggcttcatacttgcccggaaagctgatcgacaagctaaactacataaagacataaggaagaggaaaatctgtgagctgtatgccaaagttctgggatctcaagaagcattatatccagtccattatgaagagaagaactggtgtgaggagcagtactccgggggctgctacacagcctacttccctcctggtatcatgacccagtatggaagggtgattcgccagccagtaggtaggatttactttgcaggcacagagacagcaacacagtggagtggctacatggaaggagcagttgaagctggagaacgagcagctagagaggtgttgaatgctctaggaaaagtcgcgaagaaggatatatgggttgaagaacccgagtccaaggatgttccagccattgaaattacccacaccttcttagagaggaacctgccttccgtgcctggtctgctcaagatcactggtgtttccacttctgtggctcttctctgctttgtattgtacaagattaagaagctcccatgctgaagtttcaccctcaggcctcctgcacgatcatcgcatgtgaaagaaagtgtggataaattacagcctatggtttgggccatttaagtgcacttgatttaaccctcatcagtttaatttcagtctttgtaaagtgataacaatccaaagaatcacctagctaatttccataagaacaagtttcatcctgtttgttagactaatttgtgtgggttgagagaataaaatgttgagtgcttaatttcaaaaagtgaagtgcttctgaggaataatttctgggttcttttgttttctttttgcctttaatgcaaaatagctaattcagaaataaaacacttgacttactgtgacttttgtgtagcgtccaaggtgtacagaggaaaatagtggctgaagtgttccctaggtatcctcactgactagctccatgtgatacacactacccttggcactttcttttctggactgtatctagacatgcattgacccttgtcagtaacattctgtgctgatttaaggaaattagcattattttaatatagtccatagttatctgatcagaggattagatctctaagtctacctgtgtcttcaagatggttatatttttctgttggttgatagtataccattttttctcaattaccaaaggacatatgaaatgttctctattgttatttgttgatacagtcaaatacagaaattaaatttgggctctgtgtgataacatgacttgcttgaattattaggttttatagcagacattaaattggatgattttatatacccaaactatggtctctatcttaggagtgttgtgggtccagaatgatgtctgtcttttctctttcccatctgaaaaattgtcaattaaaaaaacttttcaaaggtttcaaccacaaagcacttctttttctaaaaaaaaaaaa

SEQ ID NO: 1556 - protein, 526 aa, Rattus norvegicus
  ref <308>: DATABASE ACCESSION NUMBER: SWISS-Prot / BAA00592
  ref <309>: DATABASE ENTRY DATE: 2002-06-15
MTDLEKPNLAGHMFDVGLIGGGISGLAAAKLLSEYKINVLVLEARDRVGGRTYTVRNEHVKWVDVGGAYVGPTQNRILRLSKELGIETYKVNVNERLVQYVKGKTYPFRGAFPPVWNPLAYLDYNNLWRTMDEMGKEIPVDAPWQARHAQEWDKMTMKDLIDKICWTKTAREFAYLFVNINVTSEPHEVSALWFLWYVRQCGGTARIFSVTNGGQERKFVGGSGQVSEQIMGLLGDKVKLSSPVTYIDQTDDNIIVETLNHEHYECKYVISAIPPILTAKIHFKPELPPERNQLIQRLPMGAVIKCMVYYKEAFWKKKDYCGCMIIEDEEAPIAITLDDTKPDGSLPAIMGFILARKADRQAKLHKDIRKRKICELYAKVLGSQEALYPVHYEEKNWCEEQYSGGCYTAYFPPGIMTQYGRVIRQPVGRIYFAGTETATQWSGYMEGAVEAGERAAREVLNALGKVAKKDIWVEEPESKDVPAIEITHTFLERNLPSVPGLLKITGVSTSVALLCFVLYKIKKLPC

SEQ ID NO: 1557 - DNA, 1925 bp, Homo sapiens
  ref <308>: DATABASE ACCESSION NUMBER: Refseq / NM_000240
  ref <309>: DATABASE ENTRY DATE: 2000-10-31
ctgacacgctcctgggtcgtaggcacaggagtgggggccaaagcatggagaatcaagagaaggcgagtatcgcgggccacatgttcgacgtagtcgtgatcggaggtggcatttcaggactatctgctgccaaactcttgactgaatatggcgttagtgttttggttttagaagctcgggacagggttggaggaagaacatatactataaggaatgagcatgttgattacgtagatgttggtggagcttatgtgggaccaacccaaaacagaatcttacgcttgtctaaggagctgggcatagagacttacaaagtgaatgtcagtgagcgtctcgttcaatatgtcaaggggaaaacatatccatttcggggcgcctttccaccagtatggaatcccattgcatatttggattacaataatctgtggaggacaatagataacatggggaaggagattccaactgatgcaccctgggaggctcaacatgctgacaaatgggacaaaatgaccatgaaagagctcattgacaaaatctgctggacaaagactgctaggcggtttgcttatctttttgtgaatatcaatgtgacctctgagcctcacgaagtgtctgccctgtggttcttgtggtatgtgaagcagtgcgggggcaccactcggatattctctgtcaccaatggtggccaggaacggaagtttgtaggtggatctggtcaagtgagcgaacggataatggacctcctcggagaccaagtgaagctgaaccatcctgtcactcacgttgaccagtcaagtgacaacatcatcatagagacgctgaaccatgaacattatgagtgcaaatacgtaattaatgcgatccctccgaccttgactgccaagattcacttcagaccagagcttccagcagagagaaaccagttaattcagcgtcttccaatgggagctgtcattaagtgcatgatgtattacaaggaggccttctggaagaagaaggattactgtggctgcatgatcattgaagatgaagatgctccaatttcaataaccttggatgacaccaagccagatgggtcactgcctgccatcatgggcttcattcttgcccggaaagctgatcgacttgctaagctacataaggaaataaggaagaagaaaatctgtgagctctatgccaaagtgctgggatcccaagaagctttacatccagtgcattatgaagagaagaactggtgtgaggagcagtactctgggggctgctacacggcctacttccctcctgggatcatgactcaatatggaagggtgattcgtcaacccgtgggcaggattttctttgcgggcacagagactgccacaaagtggagcggctacatggaaggggcagttgaggctggagaacgagcagctagggaggtcttaaatggtctcgggaaggtgaccgagaaagacatctgggtacaagaacctgaatcaaaggacgttccagcggtagaaatcacccacaccttctgggaaaggaacctgccctctgtttctggcctgctgaagatcattggattttccacatcagtaactgccctggggtttgtgctgtacaaatacaagctcctgccacggtcttgaagttctgttcttatgctctctgctcactggttttcaataccaccaagaggaaaatattgacaagtttaaaggctgtgtcattgggccatgtttaagtgtactggatttaactacctttggcttaattccaatcattgttaaagtaaaaacaattcaaagaatcacctaattaatttcagtaagatcaagctccatcttatttgtcagtgtagatcaactcatgttaattgatagaataaagccttgtgatcactttctgaaattcacaaagttaaacgtgatgtgctcatcagaaac

SEQ ID NO: 1558 - protein, 527 aa, Homo sapiens
  ref <308>: DATABASE ACCESSION NUMBER: SWISS-Prot / P21397
  ref <309>: DATABASE ENTRY DATE: 2002-06-15
MENQEKASIAGHMFDVVVIGGGISGLSAAKLLTEYGVSVLVLEARDRVGGRTYTIRNEHVDYVDVGGAYVGPTQNRILRLSKELGIETYKVNVSERLVQYVKGKTYPFRGAFPPVWNPIAYLDYNNLWRTIDNMGKEIPTDAPWEAQHADKWDKMTMKELIDKICWTKTARRFAYLFVNINVTSEPHEVSALWFLWYVKQCGGTTRIFSVTNGGQERKFVGGSGQVSERIMDLLGDQVKLNHPVTHVDQSSDNIIIETLNHEHYECKYVINAIPPTLTAKIHFRPELPAERNQLIQRLPMGAVIKCMMYYKEAFWKKKDYCGCMIIEDEDAPISITLDDTKPDGSLPAIMGFILARKADRLAKLHKEIRKKKICELYAKVLGSQEALHPVHYEEKNWCEEQYSGGCYTAYFPPGIMTQYGRVIRQPVGRIFFAGTETATKWSGYMEGAVEAGERAAREVLNGLGKVTEKDIWVQEPESKDVPAVEITHTFWERNLPSVSGLLKIIGFSTSVTALGFVLYKYKLLPRS

SEQ ID NO: 1559 - DNA, 1083 bp, Rattus norvegicus
  ref <308>: DATABASE ACCESSION NUMBER: EMBL / D00729
  ref <309>: DATABASE ENTRY DATE: 2000-02-01
acacaactctcaatcatccagtgaactgggctgactgtggcaggacctgggcggtgaggaaacccttggggacaccgatgtggcttgagcctgctcctcttcttggcgctggcctctcccgtcgcgttctgctgcaggccggatcccgcctcgccgcaggggggcctggacgagcccgtcgcttctctaacaaggcggtgttggtggagaaggagggcgaggcaggaatcgcagtgatgaagttcaagaaccctccagtgaattcctcagcttggagtttccgacagagttttcgtcatcagcctgagaagctggaaaatgaaaagagcatccgaggtgtcatcctcacttcggagcgcccgggaacctccccgccgccccacgacatgaagaagaaggacgaccagcccactatgctgagtactggaaggctcgtgccaggagctgtggctgaggctctacttgtccaacctgacttgatatctgccatcaatggcgcctttccagctggaggctgcctcatggctctcacctgtgactacaggataatggcggacaactccaagtataccataggattgaatgagagcctgctgggcattgttgcccccttctggttaaaagacaactacgtgaacacatcgggcaccgagcagccgagcgtgcccttcaactggggacgttttcccactaacatgacagcagctgctctactgacgcttcacagaagcctcaatgaggtggtacctgaggatcaggtacacagcaaggctcgctcagtgatggccaagtggtttaccattccggaccattctcggttgctgacgaagagcatgatgcgcaaggccacggcggacaacctgatcaagcagcgagaggctgacatccagaacttcaccagtttcacctccagagactccatccagaagtccctgcacgtgtacttggaaaagctcaagcaaaagaagggctgacctaagggtgccacacggtgtttagttacacgtgccttctagggacccatggtcccaaggattatcaataaggtatttttcaatttaaaaaaaaaaaaaaaggaattcc

SEQ ID NO: 1560 - protein, 298 aa, Rattus norvegicus
  ref <308>: DATABASE ACCESSION NUMBER: SWISS-Prot / BAA00629
  ref <309>: DATABASE ENTRY DATE: 2002-03-01
MWLEPAPLLGAGLSRRVLLQAGSRLAAGGPGRARRFSNKAVLVEKEGEAGIAVMKFKNPPVNSSAWSFRQSFRHQPEKLENEKSIRGVILTSERPGTSPPPHDMKKKDDQPTMLSTGRLVPGAVAEALLVQPDLISAINGAFPAGGCLMALTCDYRIMADNSKYTIGLNESLLGIVAPFWLKDNYVNTSGTEQPSVPFNWGRFPTNMTAAALLTLHRSLNEVVPEDQVHSKARSVMAKWFTIPDHSRLLTKSMMRKATADNLIKQREADIQNFTSFTSRDSIQKSLHVYLEKLKQKKG

SEQ ID NO: 1561 - DNA, 1017 bp, Homo sapiens
  ref <308>: DATABASE ACCESSION NUMBER: EMBL / Z25820
  ref <309>: DATABASE ENTRY DATE: 1994-04-13
cggtcaagatggcgctggtggcttctgtgcgagtcccggcgcgcgttctgctccgcgcgggggcccggctcccgggcgcggccctcgggcggacggagcgggcggccggcggcggagacggcgcgcggccgttcgggagccagcgggtgctggtggagccggacgcggccgcaggggtcgctgtgatgaaattcaagaaccccccagtgaacagcctgagcctggagtttctgacggagctggtcatcagcctggagaagctggagaatgacaagagcttccgcggtgtcattctgacctcggaccgcccgggtgtcttctcggccggcctggacctgacggagatgtgtgggaggagccccgcccactacgctgggtactggaaggccgttcaggagctgtggctgcggttgtaccagtccaacctggtgctggtctccgccatcaacggagcctgccccgctggaggctgcctggtggccctgacctgtgactaccgcatcctggcggacaaccccaggtactgcataggactcaatgagacccagctgggcatcatcgcccctttctggttgaaagacaccctggagaacaccatcgggcaccgggcggcggagcgtgccctgcagctggggctgctcttcccgccggcggaggccctgcaggtgggcatagtggaccaggtggtcccggaggagcaggtgcagagcactgcgctgtcagcgatagcccagtggatggccattccagaccatgctcgacagctgaccaaggccatgatgcgaaaggccacggccagccgcctggtcacgcagcgcgatgcggacgtgcagaacttcgtcagcttcatctccaaagactccatccagaagtccctgcagatgtacttagagaggctcaaagaagaaaaaggctaacgattgggctgccacaggcttacggccacacgtgcccctgtgggtcccagggaggtcttaaacaaggtatttttcaacttaaaaaaaaaaaaaaaaaaaa

SEQ ID NO: 1562 - protein, 302 aa, Homo sapiens
  ref <308>: DATABASE ACCESSION NUMBER: SWISS-Prot / P42126
  ref <309>: DATABASE ENTRY DATE: 2002-06-15
MALVASVRVPARVLLRAGARLPGAALGRTERAAGGGDGARRFGSQRVLVEPDAGAGVAVMKFKNPPVNSLSLEFLTELVISLEKLENDKSFRGVILTSDRPGVFSAGLDLTEMCGRSPAHYAGYWKAVQELWLRLYQSNLVLVSAINGACPAGGCLVALTCDYRILADNPRYCIGLNETQLGIIAPFWLKDTLENTIGHRAAERALQLGLLFPPAEALQVGIVDQVVPEEQVQSTALSAIAQWMAIPDHARQLTKAMMRKATASRLVTQRDADVQNFVSFISKDSIQKSLQMYLERLKEEKG

SEQ ID NO: 1563 - DNA, 1083 bp, Rattus norvegicus; identical to SEQ ID NO: 1559
  ref <308>: DATABASE ACCESSION NUMBER: EMBL / D00729
  ref <309>: DATABASE ENTRY DATE: 2000-02-01

SEQ ID NO: 1564 - protein, 298 aa, Rattus norvegicus; identical to SEQ ID NO: 1560
  ref <308>: DATABASE ACCESSION NUMBER: SWISS-Prot / BAA00629
  ref <309>: DATABASE ENTRY DATE: 2002-03-01

SEQ ID NO: 1565 - DNA, 1017 bp, Homo sapiens; identical to SEQ ID NO: 1561
  ref <308>: DATABASE ACCESSION NUMBER: EMBL / Z25820
  ref <309>: DATABASE ENTRY DATE: 1994-04-13

SEQ ID NO: 1566 - protein, 302 aa, Homo sapiens; identical to SEQ ID NO: 1562
  ref <308>: DATABASE ACCESSION NUMBER: SWISS-Prot / P42126
  ref <309>: DATABASE ENTRY DATE: 2002-06-15

SEQ ID NO: 1567 - DNA, 2602 bp, Rattus norvegicus
  ref <308>: DATABASE ACCESSION NUMBER: EMBL / D00913
  ref <309>: DATABASE ENTRY DATE: 1998-07-20
ctgctgcctgcactttgccctggtcctccaatggcttcaacccgtgccaggcccatgctgcctctgctcctggtcctggtcgccgttgtgatccccgggcctgtcggtgctcaggtatccatccatcccacagaagccttcctgcctcggggtggatccgtgcaggtgaactgctcttcctcttgcgaagacgagaacctcggcctggggttggagactaactggatgaaagacgaactatcgagtggacacaactggaagctcttcaagctgagcgacattggggaagacagcagaccactgtgctttgagaactgtggcaccacgcagtcctcggcttctgccaccatcactgtgtattcgttcccagagcgagtggagctggatcctctgcccgcctggcagcaggtgggcaagaacctcatcctgcgctgcctggtggaaggcggagcaccgcggacacagctctcagtagtgctgctccgtgggaatgagacactgagccgccaggcagtggatggggaccccaaggagatcacattcacggtgctggccagcagaggcgaccacggagccaatttctcatgcttcacagaactggacctcaggccacaagggctgtcactgttcaagaatgtctccgaggtcaggcagctccggactttcgatcttccgactagggtcctgaagctcgacacccctgacctcctggaggtgggcacccagcagaagttcttgtgttccctggaaggcctgtttcctgcctctgaagctcagatatacctggagatgggaggccagatgctgaccctggagagcacaaacagcagagattttgtgtcagccactgcctcagtggaggtgactgagaagttggacagaaccctgcagctgcgctgtgttttggagctggcggaccagaccctggagatggagaagaccttgagaatctacaacttttcagctcccatcctgaccctgagccagccggaggtctcagaaggggaccaagtaactgtgaagtgtgaagcccacggtggggcacaggtggtgcttctgaacagtacttcccccaggccacccacctcacagggtacttcccccaggccacccacctcacagatccaattcacactgaatgccagcccggaggatcacaaacgacgcttcttttgctctgcggccttggaggtggatgggaagtccctgtttaaaaaccagaccttggaactccatgtgctatatggtcctcacctggacaagaaggactgcttggggaactggacctggcaagaggggtctcagcagactcttacatgccagccccaggggaatccagcccctaatctgacctgcagccggaaagcagatggtgtcccgctgcctatcgggatggtgaagtctgtcaaacgggagatgaatggtacctacaagtgccgtgcctttagctcccgtgggagtatcaccagggacgtgcacctgacagtgctgtaccatgatcagaatacctgggtcataattgttggtgtgttggtactgatcattgcgggcttcgtgatcgtggcgtccatttacacctattaccgccagaggaagatcaggatatacaagttacagaaggctcaggaggaggccctaaaactcaaggtacaagccccgcctccctgagcccactggacaggacacctgcctgggccccgctgctcttgaacagatcaatggacagcatttacccctcacccacctcctctggctgtcacaggacaggacagtggcctggggatgcatacttgtagcctcaggcctaagaggactcggaggggcaagactgtgaactcgtgacctggacacacctacagcctggtgggcctgcagccaagaaaggctgacttccttctctattacccctgctgaggggccccctaccttaggaaggtgtgatatccggtagacacaagcaagagaagaaaaggaacaccatgcttcctctgacatgggaaagctgggacactgtccccaactcttgttgatgtatttattaattcagagttctgacagttatttattgagtaccctgtacagacactagaggagtgagcaggttaacatgtaagttattgcctagaccctggtgaaggggcacaacagagtctggggaaagatcatacgggtttgggcttctccacaggtcagggtgctttcctcaaaagagctgatttctttcacgagtcatataaatactatgtggacgagcagtggccctctgctcgtagacctctctgggacccctgcctcctcccacagcctggagtctcccagcaccagcatgggtgaccacctccccacctacatacattcctacctttgttcccaatgtcaaccaccatgcctaaatatggacgctcacctttagcagctcaacaatggagtctcatgcccgtgaaattatggtcaatccctgcatgcctccacccggctccacctcaaagagaatgcctgggagaaaatgttccaaccacttagaagggtcctgcaagctgttgtgggagggtaggcacccctcccagcgcagaagcctttcctttgaatcaataaagtttta

SEQ ID NO: 1568 - protein, 545 aa, Rattus norvegicus
  ref <308>: DATABASE ACCESSION NUMBER: SWISS-Prot / BAA00759
  ref <309>: DATABASE ENTRY DATE: 2001-10-16
MASTRARPMLPLLLVLVAVVIPGPVGAQVSIHPTEAFLPRGGSVQVNCSSSCEDENLGLGLETNWMKDELSSGHNWKLFKLSDIGEDSRPLCFENCGTTQSSASATITVYSFPERVELDPLPAWQQVGKNLILRCLVEGGAPRTQLSVVLLRGNETLSRQAVDGDPKEITFTVLASRGDHGANFSCFTELDLRPQGLSLFKNVSEVRQLRTFDLPTRVLKLDTPDLLEVGTQQKFLCSLEGLFPASEAQIYLEMGGQMLTLESTNSRDFVSATASVEVTEKLDRTLQLRCVLELADQTLEMEKTLRIYNFSAPILTLSQPEVSEGDQVTVKCEAHGGAQVVLLNSTSPRPPTSQGTSPRPPTSQIQFTLNASPEDHKRRFFCSAALEVDGKSLFKNQTLELHVLYGPHLDKKDCLGNWTWQEGSQQTLTCQPQGNPAPNLTCSRKADGVPLPIGMVKSVKREMNGTYKCRAFSSRGSITRDVHLTVLYHDQNTWVIIVGVLVLIIAGFVIVASIYTYYRQRKIRIYKLQKAQEEALKLKVQAPPP

SEQ ID NO: 1569 - DNA, 2986 bp, Homo sapiens
  ref <308>: DATABASE ACCESSION NUMBER: Refseq / NM_000201
  ref <309>: DATABASE ENTRY DATE: 2000-10-31
gcgccccagtcgacgctgagctcctctgctactcagagttgcaacctcagcctcgctatggctcccagcagcccccggcccgcgctgcccgcactcctggtcctgctcggggctctgttcccaggacctggcaatgcccagacatctgtgtccccctcaaaagtcatcctgccccggggaggctccgtgctggtgacatgcagcacctcctgtgaccagcccaagttgttgggcatagagaccccgttgcctaaaaaggagttgctcctgcctgggaacaaccggaaggtgtatgaactgagcaatgtgcaagaagatagccaaccaatgtgctattcaaactgccctgatgggcagtcaacagctaaaaccttcctcaccgtgtactggactccagaacgggtggaactggcacccctcccctcttggcagccagtgggcaagaaccttaccctacgctgccaggtggagggtggggcaccccgggccaacctcaccgtggtgctgctccgtggggagaaggagctgaaacgggagccagctgtgggggagcccgctgaggtcacgaccacggtgctggtgaggagagatcaccatggagccaatttctcgtgccgcactgaactggacctgcggccccaagggctggagctgtttgagaacacctcggccccctaccagctccagacctttgtcctgccagcgactcccccacaacttgtcagcccccgggtcctagaggtggacacgcaggggaccgtggtctgttccctggacgggctgttcccagtctcggaggcccaggtccacctggcactgggggaccagaggttgaaccccacagtcacctatggcaacgactccttctcggccaaggcctcagtcagtgtgaccgcagaggacgagggcacccagcggctgacgtgtgcagtaatactggggaaccagagccaggagacactgcagacagtgaccatctacagctttccggcgcccaacgtgattctgacgaagccagaggtctcagaagggaccgaggtgacagtgaagtgtgaggcccaccctagagccaaggtgacgctgaatggggttccagcccagccactgggcccgagggcccagctcctgctgaaggccaccccagaggacaacgggcgcagcttctcctgctctgcaaccctggaggtggccggccagcttatacacaagaaccagacccgggagcttcgtgtcctgtatggcccccgactggacgagagggattgtccgggaaactggacgtggccagaaaattcccagcagactccaatgtgccaggcttgggggaacccattgcccgagctcaagtgtctaaaggatggcactttcccactgcccatcggggaatcagtgactgtcactcgagatcttgagggcacctacctctgtcgggccaggagcactcaaggggaggtcacccgcgaggtgaccgtgaatgtgctctccccccggtatgagattgtcatcatcactgtggtagcagccgcagtcataatgggcactgcaggcctcagcacgtacctctataaccgccagcggaagatcaagaaatacagactacaacaggcccaaaaagggacccccatgaaaccgaacacacaagccacgcctccctgaacctatcccgggacagggcctcttcctcggccttcccatattggtggcagtggtgccacactgaacagagtggaagacatatgccatgcagctacacctaccggccctgggacgccggaggacagggcattgtcctcagtcagatacaacagcatttggggccatggtacctgcacacctaaaacactaggccacgcatctgatctgtagtcacatgactaagccaagaggaaggagcaagactcaagacatgattgatggatgttaaagtctagcctgatgagaggggaagtggtgggggagacatagccccaccatgaggacatacaactgggaaatactgaaacttgctgcctattgggtatgctgaggcccacagacttacagaagaagtggccctccatagacatgtgtagcatcaaaacacaaaggcccacacttcctgacggatgccagcttgggcactgctgtctactgaccccaacccttgatgatatgtatttattcatttgttattttaccagctatttattgagtgtcttttatgtaggctaaatgaacataggtctctggcctcacggagctcccagtccatgtcacattcaaggtcaccaggtacagttgtacaggttgtacactgcaggagagtgcctggcaaaaagatcaaatggggctgggacttctcattggccaacctgcctttccccagaaggagtgatttttctatcggcacaaaagcactatatggactggtaatggttcacaggttcagagattacccagtgaggccttattcctcccttccccccaaaactgacacctttgttagccacctccccacccacatacatttctgccagtgttcacaatgacactcagcggtcatgtctggacatgagtgcccagggaatatgcccaagctatgccttgtcctcttgtcctgtttgcatttcactgggagcttgcactattgcagctccagtttcctgcagtgatcagggtcctgcaagcagtggggaagggggccaaggtattggaggactccctcccagctttggaagggtcatccgcgtgtgtgtgtgtgtgtatgtgtagacaagctctcgctctgtcacccaggctggagtgcagtggtgcaatcatggttcactgcagtcttgaccttttgggctcaagtgatcctcccacctcagcctcctgagtagctgggaccataggctcacaacaccacacctggcaaatttgattttttttttttttttcagagacggggtctcgcaacattgcccagacttcctttgtgttagttaataaagctttctcaactgcc

SEQ ID NO: 1570 - protein, 532 aa, Homo sapiens
  ref <308>: DATABASE ACCESSION NUMBER: SWISS-Prot / P05362
  ref <309>: DATABASE ENTRY DATE: 2002-06-15
MAPSSPRPALPALLVLLGALFPGPGNAQTSVSPSKVILPRGGSVLVTCSTSCDQPKLLGIETPLPKKELLLPGNNRKVYELSNVQEDSQPMCYSNCPDGQSTAKTFLTVYWTPERVELAPLPSWQPVGKNLTLRCQVEGGAPRANLTVVLLRGEKELKREPAVGEPAEVTTTVLVRRDHHGANFSCRTELDLRPQGLELFENTSAPYQLQTFVLPATPPQLVSPRVLEVDTQGTVVCSLDGLFPVSEAQVHLALGDQRLNPTVTYGNDSFSAKASVSVTAEDEGTQRLTCAVILGNQSQETLQTVTIYSFPAPNVILTKPEVSEGTEVTVKCEAHPRAKVTLNGVPAQPLGPRAQLLLKATPEDNGRSFSCSATLEVAGQLIHKNQTRELRVLYGPRLDERDCPGNWTWPENSQQTPMCQAWGNPLPELKCLKDGTFPLPIGESVTVTRDLEGTYLCRARSTQGEVTREVTVNVLSPRYEIVIITVVAAAVIMGTAGLSTYLYNRQRKIKKYRLQQAQKGTPMKPNTQATPP

SEQ ID NO: 1571 - DNA, 2602 bp, Rattus norvegicus; identical to SEQ ID NO: 1567
  ref <308>: DATABASE ACCESSION NUMBER: EMBL / D00913
  ref <309>: DATABASE ENTRY DATE: 1998-07-20

SEQ ID NO: 1572 - protein, 545 aa, Rattus norvegicus; identical to SEQ ID NO: 1568
  ref <308>: DATABASE ACCESSION NUMBER: SWISS-Prot / BAA00759
  ref <309>: DATABASE ENTRY DATE: 2001-10-16

SEQ ID NO: 1573 - DNA, 2986 bp, Homo sapiens; identical to SEQ ID NO: 1569
  ref <308>: DATABASE ACCESSION NUMBER: Refseq / NM_000201
  ref <309>: DATABASE ENTRY DATE: 2000-10-31

SEQ ID NO: 1574 - protein, 532 aa, Homo sapiens; identical to SEQ ID NO: 1570
  ref <308>: DATABASE ACCESSION NUMBER: SWISS-Prot / P05362
  ref <309>: DATABASE ENTRY DATE: 2002-06-15

SEQ ID NO: 1575 - DNA, 2130 bp, Rattus norvegicus
  ref <308>: DATABASE ACCESSION NUMBER: EMBL / D10392
  ref <309>: DATABASE ENTRY DATE: 1998-11-24
gcagccggcgcctactgccactcccgcgagcatgaaggaccgaacccaggagctccgcacggccaaggacagcgatgacgacgatgatgtcactgtcactgtggaccgagaccgcttcatggatgagttctttgaacaggtggaagagatccggggctttattgacaagattgctgaaaacgtggaggaggtgaagaggaaacacagcgccatcctggcctccccgaaccccgatgagaagaccaaggaggaactggaggagctcatgtcggacattaagaagacagcgaacaaagttcgctccaagctaaagagcatcgagcagagcatcgagcaggaggaaggtctgaaccgctcgtcggcggacctgaggatccggaagacgcagcattccacgctgtcccgaaagtttgtggaggtcatgtccgagtacaacgccactcagtcagactaccgagaacgctgcaaagggcgcatccagaggcagctggagatcactggccggaccacgaccagtgaggagttggaagacatgctggagagtgggaatcccgccatctttgcctctgggatcatcatggactccagcatctcgaagcaggccctcagtgagatcgagaccaggcacagtgagatcatcaagttggagaacagcatccgggagctacacgatatgttcatggacatggccatgctggtggagagccagggggagatgattgacaggatcgagtacaatgtggaacacgctgtggactacgtggagagggccgtgtctgacaccaagaaggccgtcaagtaccagagcaaggcacgcaggaagaagatcatgatcatcatttgctgtgtgattctgggcatcatcatcgcctccaccatcgggggcatctttggatagaaaccaccccacccacggctccattctggatgggtctccctgaggaggcccctggctgctgcacctagctgggttgccctccccactcctgccttctggctgggagtccttttccctcccatccaacaccgctccctctctgccatgaggctcccgtccccaccaccctgccccaagccgtgtcgtgtgcatgatcttgtgacagtgtgtgtctgtacaggaggcagaggggagcaggatcgggaacagccagaggggctgggtacaggccagtgtgggcaagactcgggccctggccaggtccgccttccttcaggcctggggcctacgcttccctgggactcaggctcctttctggaccccaaccttgccctcactcgccctgccctctggcttcctcagctctccccaccatgccaaggcacctggagggtggggaccagctggtcacatggtgctgcttttcaggttaggggtggggacagctcagcactgagtctttgttagctgcccactgccaggatgctcagggtgccacggctgctggtgtgctaggagcacccagtacccctctttggcaaagcctgacagtgtctctggcctcagctgcccttaccacagccctgggagtcctgttcctgggctgggcctgagcctagtgatcctttgctaagaagctcagtggtgccatctccagccttgctctgagctggagaggtggagcaggccatagtcctctgcccacagtctctaacgggcatgttaagtcgtggccggagttgcatgttagggacagcggttccctgctccctttctgctctgaaaagccaggtgtcactttgggcctgcagtctcaccctgccctgtctcccattgatgtgccacgtggtgtcaggtgtactggatgcagtattcagcagccagctggggagggggctccccactttcctcccctgccaacttggggcttctcagagtcaaaaatgtacccccatgccccaggacccctttctcatccacaggcaaggagtatgcatgcgactgcatgcagcgggagctggggccgtgtctgtgtgccccttcccctccgctttgctcctgcccagtgactgaccactgtccgtgctgccttctctcatggccacttccctttaccccgtcaccaaaggtctcggtacaaccagctgcccattttgtgagatttttatgtagaataaacatttgtatctgga

SEQ ID NO: 1576 - protein, 288 aa, Rattus norvegicus
  ref <308>: DATABASE ACCESSION NUMBER: SWISS-Prot / P32851
  ref <309>: DATABASE ENTRY DATE: 2002-06-15
MKDRTQELRTAKDSDDDDDVTVTVDRDRFMDEFFEQVEEIRGFIDKIAENVEEVKRKHSAILASPNPDEKTKEELEELMSDIKKTANKVRSKLKSIEQSIEQEEGLNRSSADLRIRKTQHSTLSRKFVEVMSEYNATQSDYRERCKGRIQRQLEITGRTTTSEELEDMLESGNPAIFASGIIMDSSISKQALSEIETRHSEIIKLENSIRELHDMFMDMAMLVESQGEMIDRIEYNVEHAVDYVERAVSDTKKAVKYQSKARRKKIMIIICCVILGIIIASTIGGIFG

SEQ ID NO: 1577 - DNA, 2074 bp, Homo sapiens
  ref <308>: DATABASE ACCESSION NUMBER: EMBL / BC003011
  ref <309>: DATABASE ENTRY DATE: 2001-07-13
agccggcgccgctgccactcccgggagcatgaaggaccgaacccaggagctccgcacggccaaggacagcgatgatgatgatgatgtcgctgtcaccgtggaccgagaccgcttcatggatgagttctttgagcaggtggaggagattcgaggcttcattgacaagatcgcagagaacgtggaggaggtgaagcggaagcacagtgccatcctggcatcccccaaccccgacgagaagacgaaggaggagctggaagaactcatgtccgacataaagaagacagcaaacaaagttcgttccaagttaaagagcatcgagcagtccatcgagcaagaggaaggcctgaaccgctcctccgctgacctgaggatccggaagacacagcactccacgctgtccagaaagtttgtggaggtcatgtcggagtacaacgccacgcagtccgactaccgcgagcgctgcaaaggccgcatccagaggcagctggagatcaccggcaggaccacgaccagtgaggagctggaggacatgctggagagtgggaaccccgccatctttgcctctgggatcatcatggactccagcatctcgaagcaggctctgagcgagattgagacgcggcacagtgagatcatcaagctggagaacagcatccgtgagctacacgacatgttcatggacatggccatgctcgtggagagccagactatgtggagagggccgtgtctgacaccaagaaggccgtcaagtaccagagcaaggcgcgccggaagaaaatcatgatcatcatctgctgtgtgatcctgggcatcgtcatcgcctccactgttgggggcatcttcgcctagaagccacccaaactgccactccactccaggtgggccactccaaggaggccctggctgctgccacctggctgggctgccctcccaacccccgcctctggctcagagcaccctccctcccggcccccatgctcccttctctgccatgggccctccgtccccgccccgtgtcgtgtgcatgatctctgtgagtgtgcgtctgtacgggaagaggcagagggaggcagccagcggggcgtgatgcagtgtgcacagcgaggagcagacccaggcagggccgccagggtgacacaggccacccttccttgccttcagtaactcggtgggcccaggttctgctcttccctggggaccctaacctcgcctccagctgacctgccctgtcctctccagctgtccccacaagcagagccctgaggggtggggaccagctggccacatggtgctgcttttcaggttaggggagaggtggccctgagggacagcccagctctgagtctcagtcgctgatcactgccagggaggctcaggctgccatggctccaggctccctcccctgcctaggggcaaagtccatcgggtcctgggcctcagcttcccttcccacattcctccggccccaggagcaaccccttgggctaggtctgaccccaggtgtccctctggaaggggctggctggtgccctatttccagccaccccagcagctagggaggcaaagcaggctgcagtcagtccctcaagccagcgttgcatgtttgggatggtggctcctgttgtcttgcgctctgggaagtcagatgtcatttcaggcctgcagtctcatcctgcccttgccatcctcccatcgatgtgccacgtgggtgtcacgtgtcccagatgcagtattcggcagccagccggggagggctacctcctcctcctcaccaccttggggcttctcatgggaaatgtgcccccgccccaggaccctctcccttgtggacaggcagggagatgcatgcgagtgcatgcagcaggggatggggccgtgtccgtgtgccccaccctccctcggctttactcctgcccagtgactgtgaccactgtccgtgttgccttcttgaacagcgattccccccaaccccttcaccaaaggtcttggtacaaccagctgcccattttgtgaaatttttatgtagaataaacatttgtatctgtaaaaaaaaaaaaaaaaaaaaaaaaaaaaa

SEQ ID NO: 1578 - protein, 288 aa, Homo sapiens
  ref <308>: DATABASE ACCESSION NUMBER: SWISS-Prot / Q16623
  ref <309>: DATABASE ENTRY DATE: 2002-06-15
MKDRTQELRTAKDSDDDDDVAVTVDRDRFMDEFFEQVEEIRGFIDKIAENVEEVKRKHSAILASPNPDEKTKEELEELMSDIKKTANKVRSKLKSIEQSIEQEEGLNRSSADLRIRKTQHSTLSRKFVEVMSEYNATQSDYRERCKGRIQRQLEITGRTTTSEELEDMLESGNPAIFASGIIMDSSISKQALSEIETRHSEIIKLENSIRELHDMFMDMAMLVESQGEMIDRIEYNVEHAVDYVERAVSDTKKAVKYQSKARRKKIMIIICCVILGIVIASTVGGIFA

SEQ ID NO: 1579 - DNA, 2064 bp, Rattus norvegicus
  ref <308>: DATABASE ACCESSION NUMBER: EMBL / D10587
  ref <309>: DATABASE ENTRY DATE: 2000-02-01
cccagcacccgcgatcgcgcgggctctgtgctccgagggccgtgctcgcctggtgcctactccagggctgtgtacaccgcgcgggcggcggctgagcccgcaccaggagggcgcgggagccgcagggccctggagctttgggcgactgctacgcggccttggccgaggctcttccttgctcgccgttctgtcgcgggcctggcccgtgaaccgctcacagtatggcccgatgctgcttctacacggcggggacactgtctctgctgctgctggtgaccagtgtcacgctgctagtggctcgagtctttcagaaggcagtggaccagacgatcgagaagaatatggtattacaaaatggtaccaaggtctttgattcctgggagaagccccctctacctgtgtacatccagttttatttcttcaatgtcaccaatccagaggagatcctccaaggagaaatccccctgctagaagaagtggggccgtacacctacagggagctcaggaacaaggcaaacgttcagtttggagaaaatggaacaaccatatctgccgtcaccaataaggcatatatttttgaacgaaaccagtctgttggagaccctaccgttgacttgattagaacaataaatattcctctgttgactgttgtggaaatggcccagcagcccttcctcagggagatcatcgaggccatgctgaaagcttatcagcagacgctgtttgtcactcacactgtacatgaactgctctggggctacaaagatgaggtcttgtcgctcgtccatattttcagacctgacgtctcccctaactttggcctgttctatgagagaaatggaactaatgatggggagtatgtttttctgactggagaggacaattacctgaactttacaaaaattgtggagtggaatggaaaaacgtcgctggactggtggacgacggacacgtgcaatatgatcaacgggacagacggagattcttttcacccattaataagcaaggatgagaccctgtacatcttcccatctgacttctgcaggtccgtctatataactttcagtagctttgagaacgtagaaggactgcctgcttttcggtataaggtgcctgcagaaatactagccaattcctccgaaaacgctggcttctgtatacccgagggaaactgcatggacgcgggagtgctgaacgtcagcatttgcaagaatggtgcgcccattatcatgtctttcccacacttttaccaagccgacgagaagttcgtttcggccataaaaggcatgcgtccaaacaaggaagaacatgagtcatttgtggacattaatcctttgacaggaattattttaagaggggccaagagattccaaatcaacacgtacgttaagaagctggatgactttgtggaaacgggaaacattaggactatggttttcccagtgatgtatctcaatgagagtgttctcattgacaaagagactgcaagtcaactgaagtctgtgattaacacaactttgattgtcaccaacataccctacatcatcatggcactgggcgtgttctttggcttgattttcacgtggctggcgtgtcgaggacaggggtctacggatgagggaactgcagatgaaagggcacccctcatacggacctaatgggacttacctgttgcctgagcttggtgagagaatgtgagaactgacctgacctggaccaggacagggaaaagcctgcatcctcacgggctcctggcctgtcaagaagggagtgaagccgcagcactggcacgcgagaagaccctcctggacagaggggaccgagcaggtgacatggctggcaattacgctttataaaatcatgtctctgaaactgtgtcaatgtgtcttagggagtatttaataaattgtgtagaaaccttttgtgattgggctctgggagctgtggggttttgtaacccctgttgtagatacagtgtctgagtcacttgttaatgttaacttggcctgacccgattcagtatgcctcactctccaaactttgtgtttaaaatatgaaaaaaaa

SEQ ID NO: 1580 - protein, 477 aa, Rattus norvegicus
  ref <308>: DATABASE ACCESSION NUMBER: SWISS-Prot / BAA01444
  ref <309>: DATABASE ENTRY DATE: 2002-06-15
ARCCFYTAGTLSLLLLVTSVTLLVARVFQKAVDQTIEKNMVLQNGTKVFDSWEKPPLPVYIQFYFFNVTNPEEILQGEIPLLEEVGPYTYRELRNKANVQFGENGTTISAVTNKAYIFERNQSVGDPTVDLIRTINIPLLTVVEMAQQPFLREIIEAMLKAYQQTLFVTHTVHELLWGYKDEVLSLVHIFRPDVSPNFGLFYERNGTNDGEYVFLTGEDNYLNFTKIVEWNGKTSLDWWTTDTCNMINGTDGDSFHPLISKDETLYIFPSDFCRSVYITFSSFENVEGLPAFRYKVPAEILANSSENAGFCIPEGNCMDAGVLNVSICKNGAPIIMSFPHFYQADEKFVSAIKGMRPNKEEHESFVDINPLTGIILRGAKRFQINTYVKKLDDFVETGNIRTMVFPVMYLNESVLIDKETASQLKSVINTTLIVTNIPYIIMALGVFFGLIFTWLACRGQGSTDEGTADERAPLIRT

SEQ ID NO: 1581 - DNA, 2329 bp, Homo sapiens
  misc_feature (1)..(2329): n=a, c, g or t
  ref <308>: DATABASE ACCESSION NUMBER: EMBL / D12676
  ref <309>: DATABASE ENTRY DATE: 2000-02-01
cacggctgcccggcgaaggaaaccgaaaccgagtccgggcccgtccctccgcggccccatccgcccggtgcacccggggccgcgctcgccaggccgcggagccagagctgcgcgcacgaaccgtgcgcgggagggcgtgggcgttgcgccgaagggtcccgagtcttcgacgcctctgcggcggctcctccctccttgcagttggatccctggcgggtgcggcccggcccggcccgtgagcngcgcacagaatgggccgatgctgcttctacacggcggggacgttgtccctgctcctgctggtgaccagcgtcacgctgctggtggcccgggtcttccagaaggctgtagaccagagtatcgagaagaaaattgtgttaaggaatggtactgaggcatttgactcctgggagaagccccctctgcctgtgtatactcagttctatttcttcaatgtcaccaatccagaggagatcctcagaggggagacccctcgggtggaagaagtggggccatacacctacagggaactcagaaacaaagcaaatattcaatttggagataatggaacaacaatatctgctgttagcaacaaggcctatgtttttgaacgagaccaatctgttggagaccctaaaattgacttaattagaacattaaatattcctgtattgactgtcatagagtggtcccaggtgcacttcctcagggagatcatcgaggccatgttgaaagcctatcagcagaagctctttgtgactcacacagttgacgaattgctctggggctacaaagatgaaatcttgtcccttatccatgttttcaggcccgatatctctccctattttggcctattctatgagaaaaatgggactaatgatggagactatgtttttctaactggagaagacagttaccttaactttacaaaaattgtggaatggaatgggaaaacgtcacttgactggtggataacagacaagtgcaatatgattaatggaacagatggagattcttttcacccactaataaccaaagatgaggtcctttatgtcttcccatctgacttttgcaggtcagtgtatattactttcagtgactatgagagtgtacagggactgcctgcctttcggtataaagttcctgcagaaatattagccaatacgtcagacaatgccggcttctgtatacctgagggaaactgcctgggctcaggagttctgaatgtcagcatctgcaagaatggtgcacccatcattatgtctttcccacacttttaccaagcagatgagaggtttgtttctgccatagaaggcatgcacccaaatcaggaagaccatgagacatttgtggacattaatcctttgactggaataatcctaaaagcagccaagaggttccaaatcaacatttatgtcaaaaaattagatgactttgttgaaacgggagacattagaaccatggttttcccagtgatgtacctcaatgagagtgttcacattgataaagagacggcgagtcgactgaagtctatgattaacactactttgatcatcaccaacataccctacatcatcatggcgctgggtgtgttctttggtttggtttttacctggcttgcatgcaaaggacagggatccatggatgagggaacagcggatgaaagagcacccctcattcgaacctaaacattgcctttgcttggtgaagaaactgtgtgagctgtcctgacctggacgatgacgtggggaaaccctccacctccttgcaggcttgttgcctgttgaaagaaggaaaaagacacggcgctggcaagtgataggaacattctggccagaggttaaagagcaggctgacatggctggccattaagctttataaaatcatgtgggctctgaaattgttcttttatgtgtctagcaagtatttaataaacccttgtatagtaattttgttgttgttgggtgctggtagctccagaattttgtgaccactattgtgggtaaaatgtctctgcatcacttgttaatgctactggtctaacttcattcagtatgcttcattcaccgaactttgtgctcaaaatgcgtatataccattttatgttgtattcctccatttcacttgcaaaacagaagtaaataagagttcgggacccagggtaaaatggtagcttcatccaatatatcattcaaatgcatctgatttctaaaccatattacattttatgctgatcttcagttcataattcttccaggaaaactcagtcttccaactgcaataaaatactggggtaggaatcaaatgggaaagggggggggggggggcc

SEQ ID NO: 1582 - protein, 477 aa, Homo sapiens
  ref <308>: DATABASE ACCESSION NUMBER: SWISS-Prot / Q14108
  ref <309>: DATABASE ENTRY DATE: 2002-06-15
GRCCFYTAGTLSLLLLVTSVTLLVARVFQKAVDQSIEKKIVLRNGTEAFDSWEKPPLPVYTQFYFFNVTNPEEILRGETPRVEEVGPYTYRELRNKANIQFGDNGTTISAVSNKAYVFERDQSVGDPKIDLIRTLNIPVLTVIEWSQVHFLREIIEAMLKAYQQKLFVTHTVDELLWGYKDEILSLIHVFRPDISPYFGLFYEKNGTNDGDYVFLTGEDSYLNFTKIVEWNGKTSLDWWITDKCNMINGTDGDSFHPLITKDEVLYVFPSDFCRSVYITFSDYESVQGLPAFRYKVPAEILANTSDNAGFCIPEGNCLGSGVLNVSICKNGAPIIMSFPHFYQADERFVSAIEGMHPNQEDHETFVDINPLTGIILKAAKRFQINIYVKKLDDFVETGDIRTMVFPVMYLNESVHIDKETASRLKSMINTTLIITNIPYIIMALGVFFGLVFTWLACKGQGSMDEGTADERAPLIRT

SEQ ID NO: 1583 - DNA, 2064 bp, Rattus norvegicus; identical to SEQ ID NO: 1579
  ref <308>: DATABASE ACCESSION NUMBER: EMBL / D10587
  ref <309>: DATABASE ENTRY DATE: 2000-02-01

SEQ ID NO: 1584 - protein, 477 aa, Rattus norvegicus; identical to SEQ ID NO: 1580
  ref <308>: DATABASE ACCESSION NUMBER: SWISS-Prot / BAA01444
  ref <309>: DATABASE ENTRY DATE: 2002-06-15

SEQ ID NO: 1585 - DNA, 2329 bp, Homo sapiens; identical to SEQ ID NO: 1581
  misc_feature (1)..(2329): n=a, c, g or t
  ref <308>: DATABASE ACCESSION NUMBER: EMBL / D12676
  ref <309>: DATABASE ENTRY DATE: 2000-02-01

SEQ ID NO: 1586 - protein, 477 aa, Homo sapiens; identical to SEQ ID NO: 1582
  ref <308>: DATABASE ACCESSION NUMBER: SWISS-Prot / Q14108
  ref <309>: DATABASE ENTRY DATE: 2002-06-15

SEQ ID NO: 1587 - DNA, 2266 bp, Rattus norvegicus
  ref <308>: DATABASE ACCESSION NUMBER: EMBL / D10655
  ref <309>: DATABASE ENTRY DATE: 2000-04-20
cctacaatgcaggcaggcaccatagcccgctgggaaaaaaaagaaggggaaaaaatcagtgagggtgatctaattgcagaggttgaaactgataaagccactgttggatttgagagcttggaggagtgctatatggcaaagatccttgttcctgaggggaccagagatgttccgataggatgtatcatttgtatcacagttgaaaagcctcaggatattgaggcctttaaaaattatacattggattcagcaacagctgccacacaggcagccccagccccagctgcagctccagctgctgccccagctgcaccttctgcaagtgctccaggtagctcctatcccgttcacatgcagattgttcttcctgccctctccccaaccatgaccatgggcaccgtccagaggtgggaaaagaaagtgggagagaagctgagtgaaggagacttgctggcagagatagagaccgacaaggccaccataggctttgaagtacaagaagaaggttatctggcaaaaatcctggtccctgaaggcacaagggatgttcctctgggaaccccgctatgtatcatagtagaaaaacaggaagatatagcagcatttgcagactacaggccaacagaagtgaccagcttaaagccacaggcaccaccacctgtcccacccccagtggcagctgttcctcccatcccccagcctttagcacctaccccctcagccgctcctgctggaccaaagggaagggtgttcgttagccctcttgcaaagaaattggcagcagagaaagggattgacctcacccaagttaaagggacgggaccagaaggcagaatcatcaagaaggacattgactcttttgtgcctactaaggctgctcctgccgctgcagcagctgctcccccgggtccaagagtggcaccaactcctgcaggtgtcttcatagacatccccatcagcaacattcgtcgagtgattgcgcagaggctcatgcagtcgaagcagactatacctcattattacctttctgttgatgtaaatatgggagaggtgctgttggtgcggaaggaacttaataagatgcttgaaggtaaaggaaaaatctccgtcaatgacttcatcataaaagcttcagctttggcctgcctgaaagttcctgaagcaaactcatcttggatggacacagttatacgacaaaatcatgtggttgatgtcagcgttgctgtcagtacccctgcaggacttatcacccctattgtgtttaatgcacacataaaaggactggaaaccattgctagtgatgttgtttctttagcctccaaagcaagagagggtaaacttcagcctcacgagttccagggtgggacatttacaatctccaacttagggatgttcggaattaagaatttctctgcgattattaacccacctcaggcatgtattttggcaattggtgcttccgaggataaactgatccctgcagataatgagaaaggctttgacgtggctagtgtgatgtctgtcacactcagctgtgatcatcgagttgtggatggagcagttggagcccagtggcttgctgaattcaaaaagtaccttgaaaagcctgtaactatgttgttataatttccctgcgaacttctattcttcctctgctgacattatatttatatgttattaaacaggtggttcttttaaagtttcactagttaattttattattgagtcagtccagataaattatttgtaacagacataaatgaatcttttgtaaatgccagttacacccaaatgttttacccctttaataattacacatcggtttaaagctgtgtactcctagtgaaggggacatgtgggcctaactctttggtagaaggagccttcctgggagtgatagatggcaggattgtggcttcctgcagacaagtcactaaaagtacctggatgagatacttggagttagattaatgatcacttatttaagtgtgagggaacagtcgtgaaaattacgtcttatggaggagtttgaatttacgttggaatctaacagttaaagtctcctgtcacatgaccttagtttatcactcagtaagtgaaacttttaagagtcagcattttcttagacctcttcaaaccaactattatttttatatgaatctctaaataaaatagctttccccacaagataaagatataaaccagcttcttggtataaatgaaattttatgtatttatttataaacaatttcaatgtataacttga

SEQ ID NO: 1588 - protein, 555 aa, Rattus norvegicus; identical to SEQ ID NO: 1518
  ref <308>: DATABASE ACCESSION NUMBER: SWISS-Prot / P08461
  ref <309>: DATABASE ENTRY DATE: 2002-06-15

SEQ ID NO: 1589 - DNA, 2583 bp, Homo sapiens
  ref <308>: DATABASE ACCESSION NUMBER: EMBL / Y00978
  ref <309>: DATABASE ENTRY DATE: 1995-07-28
cgagtgacctcgcgatctggcccggctcccgctcgtcgcaacagcgtgactacagggtatggcggggtccgggcactgtgcggctggacccccagttctggggccacgccgcggaaccgcttactgctgcagcttttggggtcgcccggccgccgctattacagtcttcccccgcatcagaaggttccattgccttctctttcccccacaatgcaggcaggcaccatagcccgttggaaaaaaaaagagggggacaaaatcaatgaaggtgacctaattgcagaggttgaaactgataaagccactgttggatttgagagcctggaggagtgttatatggcaaagatacttgttgctgaaggtaccagggatgttcccatcggagcgatcatctgtatcacagttggcaagcctgaggatattgaggcctttaaaaattatacactggattcctcagcagcacctaccccacaagcggccccagcaccaacccctgctgccactgcttcgccacctacaccttctgctcaggctcctggtagctcatatccccctcacatgcaggtacttcttcctgccctctctcccaccatgaccatgggcacagttcagagatgggaaaaaaaagtgggtgagaagctaagtgaaggagacttactggcagagatagaaactgacaaagccactataggttttgaagtacaggaagaaggttatctggcaaaaatcctggtccctgaaggcacaagagatgtccctctaggaaccccactctgtatcattgtagaaaaagaggcagatatatcagcatttgctgactataggccaaccgaagtaacagatttaaaaccacaagtgccaccacctaccccacccccggtggccgctgttcctccaactccccagcctttagctcctacaccttcagcaccctgcccagctactcctgctggaccaaagggaagggtgtttgttagccctcttgcaaagaagttggcagtagagaaagggattgatcttacacaagtaaaagggacaggaccagatggtagaatcaccaagaaggatatcgactcttttgtgcctagtaaagttgctcctgctccggcagctgttgtgcctcccacaggtcctggaatggcaccagttcctacaggtgtcttcacagatatcccaatcagcaacattcgtcgggttattgcacagcgattaatgcaatcaaagcaaaccatacctcattattacctttctatcgatgtaaatatgggagaagttttgttggtacggaaagaacttaataagatattagaagggagaagcaaaatttctgtcaatgacttcatcataaaagcttcagctttggcatgtttaaaagttcccgaagcaaattcttcttggatggacacagttataagacaaaatcatgttgttgatgtcagtgttgcggtcagtactcctgcaggactcatcacacctattgtgtttaatgcacatataaaaggagtggaaaccattgctaatgatgttgtttctttagcaaccaaagcaagagagggtaaactacagccacatgaattccagggtggcacttttacgatctccaatttaggaatgtttggaattaagaatttctctgctattattaacccacctcaagcatgtattttggcaattggtgcttcagaggataaactggtccctgcagataatgaaaaagggtttgatgtggctagcatgatgtctgttacactcagttgtgatcaccgggtggtggatggagcagttggagcccagtggcttgctgagtttagaaagtaccttgaaaaacctatcactatgttgttgtaactaactcaagaatttctaaactctcccaggtcacactgattcattcttaacaagatatttatatgttattaaacaggtggttgctttttattttaaccagttatttttattattgagtctgctcagataagttatttataatgggcattactgaatttttaaaatgccgattacacccaaatattgtgcacatttaataatcagacaccagatttttagctctgtactcctaattaagggacatgtatgtggccttgcctagccctttggtgataagtacttcctctaggaaatgtacgataggtagaattgtggttccctaaagacaagtacataaaggtgaccctgatgaaaccttgaagttctgaaatttaactgcctaaaatgttctccttagatgtgagagaaagagaaatcagaaaaattaattctcttgggggaagggcttgaattgaagctttactttagaatttagccctggtttgaaattttccattacatgatcttggtttatcatcgatgggaagggtagaaaacttcaaggaaaataagtgaaattttaaaagtcagcattttcttagacctcttcagctgattgtttatttttctatgaattctgtactcaaaattacacatttgtttaaataaatatccacacaaattctcagttacatcaagtagctggtttatatttagattatctcaagtaggggggaataaccatgtgtaggaatt

SEQ ID NO: 1590 - protein, 614 aa, Homo sapiens
  ref <308>: DATABASE ACCESSION NUMBER: SWISS-Prot / P10515
  ref <309>: DATABASE ENTRY DATE: 2002-06-15
MSPHCSTTYLRTLGRTTMFWKTTEGRDGKMAVQEFSEFGLLLQLLGSPGRRYYSLPPHQKVPLPSLSPTMQAGTIARWEKKEGDKINEGDLIAEVETDKATVGFESLEECYMAKILVAEGTRDVPIGAIICITVGKPEDIEAFKNYTLDSSAAPTPQAAPAPTPAATASPPTPSAQAPGSSYPPHMQVLLPALSPTMTMGTVQRWEKKVGEKLSEGDLLAEIETDKATIGFEVQEEGYLAKILVPEGTRDVPLGTPLCIIVEKEADISAFADYRPTEVTDLKPQVPPPTPPPVAAVPPTPQPLAPTPSTPCPATPAGPKGRVFVDPLAKKLAVEKGIDLTQVKGTGPDGRITKKDIDSFVPSKVAPAPAAVVPPTGPGMAPVPTGVFTDIPISNIRRVIAQRLMQSKQTIPHYYLSIDVNMGEVLLVRKELNKILEGRSKISVNDFIIKASALACLKVPEANSSWMDTVIRQNHVVDVSVAVSTPAGLITPIVFNAHIKGVETIANDVVSLATKAREGKLQPHEFQGGTFTISNLGMFGIKNFSAIINPPQACILAIGASEDKLVPADNEKGFDVASMMSVTLSCDHRVVDGAVGAQWLAEFRKYLEKPITMLL

SEQ ID NO: 1591 - DNA, 2266 bp, Rattus norvegicus; identical to SEQ ID NO: 1587
  ref <308>: DATABASE ACCESSION NUMBER: EMBL / D10655
  ref <309>: DATABASE ENTRY DATE: 2000-04-20

SEQ ID NO: 1592 - protein, 555 aa, Rattus norvegicus; identical to SEQ ID NO: 1518
  ref <308>: DATABASE ACCESSION NUMBER: SWISS-Prot / P08461
  ref <309>: DATABASE ENTRY DATE: 2002-06-15

SEQ ID NO: 1593 - DNA, 2583 bp, Homo sapiens; identical to SEQ ID NO: 1589
  ref <308>: DATABASE ACCESSION NUMBER: EMBL / Y00978
  ref <309>: DATABASE ENTRY DATE: 1995-07-28

SEQ ID NO: 1594 - protein, 614 aa, Homo sapiens; identical to SEQ ID NO: 1590
  ref <308>: DATABASE ACCESSION NUMBER: SWISS-Prot / P10515
  ref <309>: DATABASE ENTRY DATE: 2002-06-15

SEQ ID NO: 1595 - DNA, 1051 bp, Rattus norvegicus
  ref <308>: DATABASE ACCESSION NUMBER: EMBL / D10666
  ref <309>: DATABASE ENTRY DATE: 1999-07-16
gggggattcccaatctgcagcagagattcacccgagcgtgttgcagcggccactgggcttgcaaggcgcaatccaagagggatttaagcaacccggagctcccagaaaagaagcgagagagaaccactcacagagacggtttagccgttagtctgaattaaatatatatatttttttgaaagaactgtttagttttatcattttccttaagtgacggtgcacagcgctataactgcaaaatggggaaacagaatagcaaactggccccagaagtcatggaggacctggtgaagagcactgagttcaatgagcatgagctcaagcagtggtacaagggcttcctcaaggactgtccgagcgggaggctgaatctcgaagagttccagcagctctatgtgaagttcttcccctatggagatgcctccaagttcgctcagcacgccttccgcaccttcgacaagaatggtgatggcaccatcgacttccgagagttcatctgtgctctgtccatcacctccagaggcagctttgagcagaaactgaactgggctttcaacatgtatgatctggatggtgacggcaagatcaccagggtggagatgctggagattatcgaggctatctacaagatggtgggcactgtgatcatgatgaaaatgaatgaggatggcctcacgccagaacagcgagtggacaagattttcagcaagatggataagaacaaagatgaccagattacattggatgaattcaaagaagctgcaaaaagcgacccttccattgtattactcctgcagtgcgacattcagaaatgagctgatgtcaatgctatggactgcacagaagtcttgatgttccattcagtctgcagctacacacacacacacacacacacacacacacacacacacactacacacacacacaattgcttggactacctataaatggacttgcttcttgtgtttgaaacacttgtgtgcatgagaatgtcatttgctaatgaattttaaaagcatatattataaaaacccatggtacccggatcctc

SEQ ID NO: 1596 - protein, 190 aa, Rattus norvegicus
  ref <308>: DATABASE ACCESSION NUMBER: SWISS-Prot / P28677
  ref <309>: DATABASE ENTRY DATE: 2002-06-15
GKQNSKLAPEVMEDLVKSTEFNEHELKQWYKGFLKDCPSGRLNLEEFQQLYVKFFPYGDASKFAQHAFRTFDKNGDGTIDFREFICALSITSRGSFEQKLNWAFNMYDLDGDGKITRVEMLEIIEAIYKMVGTVIMMKMNEDGLTPEQRVDKIFSKMDKNKDDQITLDEFKEAAKSDPSIVLLLQCDIQK

SEQ ID NO: 1597 - DNA, 1559 bp, Homo sapiens
  ref <308>: DATABASE ACCESSION NUMBER: EMBL / AF039555
  ref <309>: DATABASE ENTRY DATE: 2000-03-03
agcggctgggcttgcaaggcgcgatccaagagggatttaagcagcccagagctccagagaaaaagagagcgagagagaaccacacacagagacggcttaagcgtttacccgaattaaatatatatttttaaaaagaactgttgagttttatcattttcgttaagtgaccgtgcgcagcgctgtaactgcaggatggggaagcagaatagcaaactggcccctgaagtgatggaggacctggtgaagagcacagagtttaatgagcatgaactcaagcagtggtacaaaggatttctcaaggactgtccaagtgggaggctaaatctcgaggaatttcagcagctctatgtgaagttctttccttatggagacgcctccaagtttgcccagcatgccttccgaaccttcgacaagaatggggacggcaccattgacttccgagagttcatctgcgctctgtccatcacctccaggggcagctttgagcagaagctgaactgggccttcaatatgtatgacctggatggtgatggcaagatcacccgagtggagatgctggagatcatcgaggctatctacaaaatggtaggcactgtgatcatgatgaaaatgaatgaggatggcctgacgcctgagcagcgagtagacaagattttcagcaagatggataagaacaaagatgaccagattacactggatgaattcaaagaagctgcaaagagcgacccttccattgtattacttctgcagtgcgacatccagaaatgagctgatgtcaatgctatggactgcacaaaagtctcaatgttccattcagtctgcagctattcacacacacacacacacacacacacacacacacacacacacacacacacaaatattgcttggactacctataaatggacttgcttcttgtgtttgaaacactcgtgtgcatgagaatgtcatttgctaatgaattttaaaagcatatataaaacaaaacaaacaacctgccacaatgtgatatgtgtaatatcatttcataaaatccctcttcctccaaagcctgggcagaaatgtgctgcaaagagttatatgacttcttgttcatgttttgctaatgctcgtatctccttgattacataatgttagtagcactgagacccccatggtaatgtaacttaattataagctatgtcactaccctcctgtaaaatactattggacagacacagagggacccttggctcctgtgtctggtccacacaccacagaagcttgtattatcagtgaatataaatgtactacatttgcatgccttttgggtttgccttaattcttacctcatttgcatcctatcgatctggaaagagctgttttggatgaatgcagtataaaatgtaaaaaccctgctaaatgacttattgattaagtatatctatctatatatacatatacacaaagatattatttatcgaaagtaaaaaagatggaagtgtattggtttctgtttgaattttcaaaggcttccaatgtggtggcaataaatgtcccaaataaatttataacaattg

SEQ ID NO: 1598 - protein, 190 aa, Homo sapiens; identical to SEQ ID NO: 1596

SEQ ID NO: 1599 - DNA, 1020 bp, Rattus norvegicus
  ref <308>: DATABASE ACCESSION NUMBER: EMBL / D10706
  ref <309>: DATABASE ENTRY DATE: 2000-04-19
gcgcgggaagtgcagcggaggtttttgctggtttcggaccccagcggccggatggtgaaatcctccctgcagcggatcctcaacagccactgcttcgccagagagaaagaaggggacaaacgcagcgccacgcttcacgccagccgcaccatgccgcttcttagtcagcacagccgcggcggctgcagcagcgagagttctagggttgcccttcattgctgtagtaacctgggtccggggcctcggtggtgctcctgatgtccctcacccacccctgaagatcccaggtgggcgagggaacagtcagcgggatcacagtctttcagctagcatcctgtactccgacgagcggctgaatgtgacagaggagccgacgtctaacgacaagaccagggtcctgagcatccagtgcacgctcacggaggccaagcaggtcacctggagggcggtgtggaatggtggtggcctctacatcgagctcccagctgggcctctgccagaaggcagcaaggacagttttgcagctctactagagttcgcagaggagcagctccgggccgaccacgttttcatctgcttccccaagaaccgtgaggacagagccgccctactccgaaccttcagctttcttggctttgagattgtgagacccgggcatcccctcgtccccaagagacccgacgcttgcttcatggtctacacgctggagagagaggacccgggtgaggaggactaggtgccagccctgcccagtgtccctgcaccctctcccgggtttgtccacatgtcatgattgtgcagaataaacgctcactccattagcggggtgcttcttcgagctgaatgctgtgtttgtcacactcaagtggtggctttaattctaaataaaggtttctattttacttttttattgctgtttaagatggtcaggtgacctgttttagagcagcctcctttgaagtctggaaaaatggtgtcacctcccctggctcaaacctaataaataaagtgatctcgttc

SEQ ID NO: 1600 - protein, 226 aa, Rattus norvegicus
  ref <308>: DATABASE ACCESSION NUMBER: SWISS-Prot / BAA01549
  ref <309>: DATABASE ENTRY DATE: 2001-10-16
VKSSLQRILNSHCFAREKEGDKRSATLHASRTMPLLSQHSRGGCSSESSRVALHCCSNLGPGPRWCSDVPHPPLKIPGGRGNSQRDHSLSASILYSDERLNVTEEPTSNDKTRVLSIQCTLTEAKQVTWRAVWNGGGLYIELPAGPLPEGSKDSFAALLEFAEEQLRADHVFICFPKNREDRAALLRTFSFLGFEIVRPGHPLVPKRPDACFMVYTLEREDPGEED

SEQ ID NO: 1601 - DNA, 986 bp, Homo sapiens
  ref <308>: DATABASE ACCESSION NUMBER: Refseq / NM_004152
  ref <309>: DATABASE ENTRY DATE: 2000-11-01
tgcgaacggcgagcagcggcggcggcgcggagagacgcagcggaggttttcctggtttcggaccccagcggccggatggtgaaatcctccctgcagcggatcctcaatagccactgcttcgccagagagaaggaaggggataaacccagcgccaccatccacgccagccgcaccatgccgctccttagcctgcacagccgcggcggcagcagcagtgagagttccagggtctccctccactgctgtagtaacccgggtccggggcctcggtggtgctcctgatgcccctcacccacccctgaagatcccaggtgggcgagggaatagtcagagggatcacaatctttcagctaacttattctactccgatgatcggctgaatgtaacagaggaactaacgtccaacgacaagacgaggattctcaacgtccagtccaggctcacagacgccaaacgcattaactggcgaacagtgctgagtggcggcagcctctacatcgagatcccgggcggcgcgctgcccgaggggagcaaggacagctttgcagttctcctggagttcgctgaggagcagctgcgagccgaccatgtcttcatttgcttccacaagaaccgcgaggacagagccgccttgctccgaaccttcagctttttgggctttgagattgtgagaccggggcatccccttgtccccaagagacccgacgcttgcttcatggcctacacgttcgagagagagtcttcgggagaggaggaggagtagggccgcctcggggctgggcatccggcccctggggccaccccttgtcagccgggtgggtaggaaccgtagactcgctcatctcgcctgggtttgtccgcatgttgtaatcgtgcaaataaacgctcactccgaattagcggtgtatttcttgaagtttaatattgtgtttgtgatactgaagtatttgctttaattctaaataaaaatttatattttacttttt

SEQ ID NO: 1602 - protein, 228 aa, Homo sapiens
  ref <308>: DATABASE ACCESSION NUMBER: Refseq / NP_004143
  ref <309>: DATABASE ENTRY DATE: 2000-11-01
MVKSSLQRILNSHCFAREKEGDKPSATIHASRTMPLLSLHSRGGSSSESSRVSLHCCSNPGPGPRWCSDAPHPPLKIPGGRGNSQRDHNLSANLFYSDDRLNVTEELTSNDKTRILNVQSRLTDAKRINWRTVLSGGSLYIEIPGGALPEGSKDSFAVLLEFAEEQLRADHVFICFHKNREDRAALLRTFSFLGFEIVRPGHPLVPKRPDACFMAYTFERESSGEEEE

SEQ ID NO: 1603 - DNA, 1020 bp, Rattus norvegicus; identical to SEQ ID NO: 1599
  ref <308>: DATABASE ACCESSION NUMBER: EMBL / D10706
  ref <309>: DATABASE ENTRY DATE: 2000-04-19

SEQ ID NO: 1604 - protein, 226 aa, Rattus norvegicus; identical to SEQ ID NO: 1600
  ref <308>: DATABASE ACCESSION NUMBER: SWISS-Prot / BAA01549
  ref <309>: DATABASE ENTRY DATE: 2001-10-16

SEQ ID NO: 1605 - DNA, 986 bp, Homo sapiens; identical to SEQ ID NO: 1601
  ref <308>: DATABASE ACCESSION NUMBER: Refseq / NM_004152
  ref <309>: DATABASE ENTRY DATE: 2000-11-01

SEQ ID NO: 1606 - protein, 228 aa, Homo sapiens; identical to SEQ ID NO: 1602
  ref <308>: DATABASE ACCESSION NUMBER: Refseq / NP_004143
  ref <309>: DATABASE ENTRY DATE: 2000-11-01

SEQ ID NO: 1607 - DNA, 1020 bp, Rattus norvegicus; identical to SEQ ID NO: 1599
  ref <308>: DATABASE ACCESSION NUMBER: EMBL / D10706
  ref <309>: DATABASE ENTRY DATE: 2000-04-19

SEQ ID NO: 1608 - protein, 226 aa, Rattus norvegicus; identical to SEQ ID NO: 1600
  ref <308>: DATABASE ACCESSION NUMBER: SWISS-Prot / BAA01549
  ref <309>: DATABASE ENTRY DATE: 2001-10-16

SEQ ID NO: 1609 - DNA, 986 bp, Homo sapiens; identical to SEQ ID NO: 1601
  ref <308>: DATABASE ACCESSION NUMBER: Refseq / NM_004152
  ref <309>: DATABASE ENTRY DATE: 2000-11-01

SEQ ID NO: 1610 - protein, 228 aa, Homo sapiens; identical to SEQ ID NO: 1602
  ref <308>: DATABASE ACCESSION NUMBER: Refseq / NP_004143
  ref <309>: DATABASE ENTRY DATE: 2000-11-01

SEQ ID NO: 1611 - DNA, 1020 bp, Rattus norvegicus; identical to SEQ ID NO: 1599
  ref <308>: DATABASE ACCESSION NUMBER: EMBL / D10706
  ref <309>: DATABASE ENTRY DATE: 2000-04-19

SEQ ID NO: 1612 - protein, 226 aa, Rattus norvegicus; identical to SEQ ID NO: 1600
  ref <308>: DATABASE ACCESSION NUMBER: SWISS-Prot / BAA01549
  ref <309>: DATABASE ENTRY DATE: 2001-10-16

SEQ ID NO: 1613 - DNA, 986 bp, Homo sapiens; identical to SEQ ID NO: 1601
  ref <308>: DATABASE ACCESSION NUMBER: Refseq / NM_004152
  ref <309>: DATABASE ENTRY DATE: 2000-11-01

SEQ ID NO: 1614 - protein, 228 aa, Homo sapiens; identical to SEQ ID NO: 1602
  ref <308>: DATABASE ACCESSION NUMBER: Refseq / NP_004143
  ref <309>: DATABASE ENTRY DATE: 2000-11-01

SEQ ID NO: 1615 - DNA, 1020 bp, Rattus norvegicus; identical to SEQ ID NO: 1599
  ref <308>: DATABASE ACCESSION NUMBER: EMBL / D10706
  ref <309>: DATABASE ENTRY DATE: 2000-04-19

SEQ ID NO: 1616 - protein, 226 aa, Rattus norvegicus; identical to SEQ ID NO: 1600
  ref <308>: DATABASE ACCESSION NUMBER: SWISS-Prot / BAA01549
  ref <309>: DATABASE ENTRY DATE: 2001-10-16

SEQ ID NO: 1617 - DNA, 986 bp, Homo sapiens; identical to SEQ ID NO: 1601
  ref <308>: DATABASE ACCESSION NUMBER: Refseq / NM_004152
  ref <309>: DATABASE ENTRY DATE: 2000-11-01

SEQ ID NO: 1618 - protein, 228 aa, Homo sapiens; identical to SEQ ID NO: 1602
  ref <308>: DATABASE ACCESSION NUMBER: Refseq / NP_004143
  ref <309>: DATABASE ENTRY DATE: 2000-11-01

SEQ ID NO: 1619 - DNA, 1020 bp, Rattus norvegicus; identical to SEQ ID NO: 1599
  ref <308>: DATABASE ACCESSION NUMBER: EMBL / D10706
  ref <309>: DATABASE ENTRY DATE: 2000-04-19

SEQ ID NO: 1620 - protein, 226 aa, Rattus norvegicus; identical to SEQ ID NO: 1600
  ref <308>: DATABASE ACCESSION NUMBER: SWISS-Prot / BAA01549
  ref <309>: DATABASE ENTRY DATE: 2001-10-16

SEQ ID NO: 1621 - DNA, 986 bp, Homo sapiens; identical to SEQ ID NO: 1601
  ref <308>: DATABASE ACCESSION NUMBER: Refseq / NM_004152
  ref <309>: DATABASE ENTRY DATE: 2000-11-01

SEQ ID NO: 1622 - protein, 228 aa, Homo sapiens; identical to SEQ ID NO: 1602
  ref <308>: DATABASE ACCESSION NUMBER: Refseq / NP_004143
  ref <309>: DATABASE ENTRY DATE: 2000-11-01

SEQ ID NO: 1623 - DNA, 1018 bp, Rattus norvegicus
  ref <308>: DATABASE ACCESSION NUMBER: EMBL / D10729
  ref <309>: DATABASE ENTRY DATE: 1999-01-21
ggatctgtgcggcgctcctcgggggcagcggccgagtgggcttgccgtggatgcagaagggcttcgctcggacccgggacactacagtttctccgtgcaagctccggagctcgcgcttccccggggaatgcagcccactgaattcctgaggtcctttggtgatgaccaggaaaggaaggttcagattgaaatggcgcatggcacaaccacgctggccttcaaattccagcatggagtcatcgtggctgtagactccagggcctctgcagggagttacattgctaccataagggtgaacaaggtgatcgagattaacccttacctgcttggaactatgtctggttgtgcagccgactgtcagtactgggagaggctgttggccaaggaatgcaggctatactatctgcggaatggggaacgcatctccgtgtctgcagcctccaagctactttccaacatgatgctgcagtaccggggtatgggcctctccatgggcagcatgatctgcggctgggacaagaagggaccgggactttattacgtagatgacaatgggactcggctctcgggacagatgttctccacaggcagcgggaacacctatgcctacggggtgatggacagtgggtaccggcaggatctcagtcctgaggaggcctacgaccttgcccgaagagctattgtttatgctacccacagagacagctattctggaggagttgtcaacatgtaccacatgaagaaagacggttgggtgaaagtggagagcactgacgtcagtgacctgttgcacaagtaccgagaggccactctgtgatcactgctgggcagacatcctcccggccctgaggagctggcagactcagggacctggggctacttcagtcttaggagaaagacgggcccaacctgggctggagacaaagctctgaggctatggagacatctttgtttaccctctcactcagccagccctcacggataccttctaagtacaataaaagaaaaacagttctac

SEQ ID NO: 1624 - protein, 271 aa, Rattus norvegicus
  ref <308>: DATABASE ACCESSION NUMBER: SWISS-Prot / BAA01572
  ref <309>: DATABASE ENTRY DATE: 2002-06-15
DSCGAPRGQRPSGLAVDAEGLRSDPGHYSFSVQAPELALPRGMQPTEFSRSFGDDQERKVQIEMAHGTTTLAFKFQHGVIVAVDSRASAGSYIATIRVNKVIEINPYLLGTMSGCAADCQYWERLLAKECRLYYLRNGERISVSAASKLLSNMMLQYRGMGLSMGSMICGWDKKGPGLYYVDDNGTRLSGQMFSTGSGNTYAYGVMDSGYRQDLSPEEAYDLARRAIVYATHRDSYSGGVVNMYHMKKDGWVKVESTDVSDLLHKYREATL

SEQ ID NO: 1625 - DNA, 1122 bp, Rattus norvegicus
  ref <308>: DATABASE ACCESSION NUMBER: EMBL / D10770
  ref <309>: DATABASE ENTRY DATE: 1999-01-21
gggacggccccggtcccctcccctccgtcactcctgcttacggactcccgggtcatggggaacacggcgatcgccaagaaaggcagcgaagtggagagcgtgaaagaattcctagccaaagccaaagaagactttctgaggaaatgggagaaccctcccccgagtaatgctgggcttgaggattttgaaaggaaaaaaacccttggaacgggttccttcggaagagtcatgctggtaaagcataaagccactgagcagtactacgccatgaagatcttagacaagcagaaggtcgttaagctaaagcaaatagagcacactctgaatgagaagagaatcctgcaggcagtggagttcccgttccttgttcggctggagtattcttttaaggataattctaatttatacatggttatggaatacgttcctgggggggaaatgttttcacatctaagaagaattggaaggttcagtgaaccccatgctcgtttctatgcagctcagatcgtgctaacatttgagtacctccattccctcgacctcatctacagagatctcaagccggaaaacctcttaattgaccaccagggttacatccaggtcacagattttgggttcgccaagagagtcaagggcaggacttggacattgtgtggcaccccagagtacctggccccagagatcatcctcagcaagggttacaataaggcagtggactggtgggcattgggtgtactgatctacgagatggctgctggctaccccccgttctttgctgaccagccaattcagatttatgagaagattgtttccggaaaggtccgcttcccgtcgcacttcagttccgatctcaaggaccttctgcggaatctgctgcaggtggatctgacaaagcggtttgggaacctgaagaatggcgtgagtgacatcaagacccacaagtggtttgctacgaccgactggatcgcgatttaccagagaaaggttgaggctccattcataccaaaattcagaggctctggcgataccagcaacttcgatgactatgaagaagaagaaatccgagtgtctataacagaaaaatgtggaaaggagttttgtgaattttagggaggagaagga

SEQ ID NO: 1626 - protein, 350 aa, Rattus norvegicus
  ref <308>: DATABASE ACCESSION NUMBER: SWISS-Prot / BAA01601
  ref <309>: DATABASE ENTRY DATE: 2002-06-15
GNTAIAKKGSEVESVKEFLAKAKEDFLRKWENPPPSNAGLEDFERKKTLGTGSFGRVMLVKHKATEQYYAMKILDKQKVVKLKQIEHTLNEKRILQAVEFPFLVRLEYSFKDNSNLYMVMEYVPGGEMFSHLRRIGRFSEPHARFYAAQIVLTFEYLHSLDLIYRDLKPENLLIDHQGYIQVTDFGFAKRVKGRTWTLCGTPEYLAPEIILSKGYNKAVDWWALGVLIYEMAAGYPPFFADQPIQIYEKIVSGKVRFPSHFSSDLKDLLRNLLQVDLTKRFGNLKNGVSDIKTHKWFATTDWIAIYQRKVEAPFIPKFRGSGDTSNFDDYEEEEIRVSITEKCGKEFCEF

SEQ ID NO: 1627 - DNA, 2945 bp, Homo sapiens
  ref <308>: DATABASE ACCESSION NUMBER: Refseq / NM_002731
  ref <309>: DATABASE ENTRY DATE: 2002-11-05
ccagccccccttcccttccctgaccccttcttgccatcgccccagacatggggaacgcggcgaccgccaagaaaggcagcgaggtggagagcgtgaaagagtttctagccaaagccaaagaagactttttgaaaaaatgggagaatccaactcagaataatgccggacttgaagattttgaaaggaaaaaaacccttggaacaggttcatttggaagagtcatgttggtaaaacacaaagccactgaacagtattatgccatgaagatcttagataagcagaaggttgttaaactgaagcaaatagagcatactttgaatgagaaaagaatattacaggcagtgaattttcctttccttgttcgactggagtatgcttttaaggataattctaatttatacatggttatggaatatgtccctgggggtgaaatgttttcacatctaagaagaattggaaggttcagtgagccccatgcacggttctatgcagctcagatagtgctaacattcgagtacctccattcactagacctcatctacagagatctaaaacctgaaaatctcttaattgaccatcaaggctatatccaggtcacagactttgggtttgccaaaagagttaaaggcagaacttggacattatgtggaactccagagtatttggctccagaaataattctcagcaagggctacaataaggcagtggattggtgggcattaggagtgctaatctatgaaatggcagctggctatcccccattctttgcagaccaaccaattcagatttatgaaaagattgtttctggaaaggtccgattcccatcccacttcagttcagatctcaaggaccttctacggaacctgctgcaggtggatttgaccaagagatttggaaatctaaagaatggtgtcagtgatataaaaactcacaagtggtttgccacgacagattggattgctatttaccagaggaaggttgaagctccattcataccaaagtttagaggctctggagataccagcaactttgatgactatgaagaagaagatatccgtgtctctataacagaaaaatgtgcaaaagaatttggtgaattttaaagaggaacaagatgacatctgagctcacactcagtgtttgcactctgttgagagataaggtagagctgagaccgtccttgttgaagcagttacctagttccttcattccaacgactgagtgaggtctttattgccatcatccgtgtgcgcactctgcatccacctatgtaacaaggcaccgctaagcaagcattgtctgtgccataacacagtactagaccactttcttacttctctttgggttgtctttctcctctcctacatccatttcttccttttcaatttcattggttttctctaaacagtgctccattttattttgttggtgtttcagatgggcagtgttatggctacgtgatatttgaagggaaggataagtgttgctttcagtagttattgccaatattgttgttggtcaatggcttgaagataaactttctaataattattatttctttgagtagctcagacttggttttgccaaaactcttggtaatttttgaagatagactgtcttatcaccaaggaaatttatacaaattaagactaactttcttggaattcactattctggcaataaattttggtagactaatacagtacagctagacccagaaatttggaaggctgtagatcagaggttctagttccctttccctccttttatatcctcctctccttgagtaatgaagtgaccagcctgtgtagtgtgacaaacgtgtctcattcagcaggaaaaactaatgatatggatcatcacccagattctctcacttggtaccagcatttctgtaggtattagagaagagttctaagttttctaaaccttaactgttccttaaggattttagccagtattttaatagaacatgattaatgaaagtgacaaattttaaattttctctaatagtcctcatcataaactttttaaaggaaaataagcaaactaaaaagaacattggtttagataaatacttatactttgcaaagtcaaaaatggcttgatttttggaaacaatatagaggtattcatatttaaatgagggtttacatttgttttgttttgtaaccgttaaaaagaagttgtttccagctaattattgtggtgtactatatttgtgagcctagggtaggggcactgctgcaacttctgctttcatcccatgcctcatcaatgaggaaagggaacaaagtgtataaaacctgccacaattgtattttaattttgaggtatgatattttcagatatttcataatttctaacctctgttctctcagtaaacagaatgtctgatcgatcatgcagatacaatgttggtatttgagaggttagtttttttcctacacttttttttgccaactgacttaacaacattgctgtcaggtggaaatttcaagcacttttgcacatttagttcagtgtttgttgagaatccatggcttaacccacttgttttgctatttttttctttgcttttaattttccccatctgattttatctctgcgtttcagtgacctaccttaaaacaacacacgagaagagttaaactgggttcattttaatgatcaatttacctgcatataaaatttatttttaatcaagctgatcttaatgtatataatcattctatttgctttattatcggtgcaggtaggtcattaacaccacttcttttcatctgtaccacaccctggtgaaacctttgaagacataaaaaaaacctgtctgagatgttctttctaccaatctatatgtctttcggttatcaagtgtttctgcatggtaatgtcatgtaaatgctgatattgatttcactggtccatctatatttaaaacgtgc

SEQ ID NO: 1628 - protein, 350 aa, Homo sapiens
  ref <308>: DATABASE ACCESSION NUMBER: SWISS-Prot / P22694
  ref <309>: DATABASE ENTRY DATE: 1995-11-01
GNAATAKKGSEVESVKEFLAKAKEDFLKKWENPTQNNAGLEDFERKKTLGTGSFGRVMLVKHKATEQYYAMKILDKQKVVKLKQIEHTLNEKRILQAVNFPFLVRLEYAFKDNSNLYMVMEYVPGGEMFSHLRRIGRFSEPHARFYAAQIVLTFEYLHSLDLIYRDLKPENLLIDHQGYIQVTDFGFAKRVKGRTWTLCGTPEYLAPEIILSKGYNKAVDWWALGVLIYEMAAGYPPFFADQPIQIYEKIVSGKVRFPSHFSSDLKDLLRNLLQVDLTKRFGNLKNGVSDIKTHKWFATTDWIAIYQRKVEAPFIPKFRGSGDTSNFDDYEEEDIRVSITEKCAKEFGEF

SEQ ID NO: 1629 - DNA, 2684 bp, Rattus norvegicus
  ref <308>: DATABASE ACCESSION NUMBER: EMBL / D10852
  ref <309>: DATABASE ENTRY DATE: 1998-11-26
ggagacctggctagaagtttcttagagaggctgctctatccttcaccttggatgaagatgagacgctacaagctttttctcatgttctgtatggccggcctgtgcctcatctccttcctgcacttctttaagacgttatcctatgtcaccttcccgagagaactggcctccctcagccctaacctcatatccagcttcttctggaacaatgcccctgtcactccccaggccagtccggagcccggtgaccccgacttgttacggactccactctactcccactcccccctgctccagccactgtcccctagcaaggccaccgaagaactgcaccgggtggacttcgtgttgccggaggacaccacagagtattttgtgcgcaccaaagctggcggtgtgtgcttcaaaccaggtaccaggatgctggagaaaccttctccagggcggacagaggagaagaccaaggtggctgaggggtcctcggtccggggtcctgctcggaggcctatgcggcatgtgttgagtgcacgggagcgcctgggaggccggggcactaggcgcaagtgggttgagtgtgtgtgcctgccaggctggcacgggcccagctgcggggtgcccactgtggtccagtattccaacctgcccaccaaggagcgcctggtacccagggaggtgccgaggcgggttatcaacgccatcaacatcaaccatgagttcgacctgctggatgtgcgcttccatgagctgggcgatgttgtggacgcctttgtggtctgcgaatccaatttcaccgcctacggggagcctcggccgctcaagttccgagagatgctgaccaatggcaccttcgagtacatccgccacaaggtgctctacgtcttcctggaccacttcccacctggtggccgtcaggacggctggattgcagacgactacctgcgtaccttcctcacccaggatggtgtctcccgcctgcgcaacctgcgacctgatgacgtctttatcatcgacgacgcggacgagatccctgcgcgtgatggtgtgctgttcctcaagctctacgatggctggacagagcccttcgccttccatatgcgcaagtccctgtatggtttcttttggaagcaaccaggcacactggaggtggtgtcaggctgcaccattgacatgctgcaggctgtgtatgggctggacggcatccgcctgcgccgccgtcagtactacaccatgcccaactttcgacagtatgagaaccgcaccggccacatcctagtgcagtggtctctcggcagccccctgcacttcgcgggctggcactgctcctggtgcttcacacccgagggcatctacttcaaactcgtgtcggcccagaatggtgacttcccccgctggggtgactacgaggacaagagggacctcaattacatccgaagcttgattcgcactgggggatggttcgacggcacgcagcaggagtaccctcctgcagaccccagtgaacacatgtatgctcctaagtacctgctcaagaactatgaccagttccgctacttgctcgaaaatccctaccgggagcccaagagcactgtagagggtgggcgccggaaccagggctcagacggaaggtcatctgctgtcaggggcaagttggatacaacggagggctagggctgtgcagtttcacagggctgggctggctgagatgatggctaagccagtgttatctttggcctcctcattatcttggggctcttgagagagccaggagtccttggagttggtcctctgggctcaagccccctagaattaagggtcaggccttccatcccaaaacaggaaagaaaaaaatattttttagtaaagaagagcaagcccagatatctatgcagcactttttgtccccaagagtgctgtgggaaagaggtgttcctggggagcatgcagtcgttttctgggactggtactgggagtgctatggaacttcagcctagttaagagaagcccacctttgacatcccagattgttgtcctgtaatggacaaggaggtataccatgccaggagttcccagcatcctgtaaataaatgcaatgggtccaggagcaagaagagacagtaaggagggactagaaagcgtatctgctcccaatcttggccaagaggctggggaagcattggaaaatggcaccctggagagagagcactttgcagcttcctcagacatgctggacccaaggaatgaggtcacagatggctggaagggtggagccggtggctgtcagtccctctgcctctctaaggagacacgcctggggggctgaggttccaaatataccttgatgactgatcactttcctgctgctgtcttgtgggagctgctttgatggactctaggagtctagttctcggggtgggacaggagctggacaccatgtggacagccagtatagtaggtgggacaagagaaggagacgaacagaggccctatatccttctctccctccccatcactgtctgctggcatccagtcccatttttacgacatccccttccccaggcctgtaagagcaagctgggggccaggaagggactacaagttcttccggggtccaagaaaggaccttaaggtcagtggcattatcaacccattcctcttaatttgtcttggggggggggggggggggg

SEQ ID NO: 1630 - protein, 536 aa, Rattus norvegicus
  ref <308>: DATABASE ACCESSION NUMBER: SWISS-Prot / Q02527
  ref <309>: DATABASE ENTRY DATE: 2002-06-15
MRRYKLFLMFCMAGLCLISFLHFFKTLSYVTFPRELASLSPNLISSFFWNNAPVTPQASPEPGDPDLLRTPLYSHSPLLQPLSPSKATEELHRVDFVLPEDTTEYFVRTKAGGVCFKPGTRMLEKPSPGRTEEKTKVAEGSSVRGPARRPMRHVLSARERLGGRGTRRKWVECVCLPGWHGPSCGVPTVVQYSNLPTKERLVPREVPRRVINAININHEFDLLDVRFHELGDVVDAFVVCESNFTAYGEPRPLKFREMLTNGTFEYIRHKVLYVFLDHFPPGGRQDGWIADDYLRTFLTQDGVSRLRNLRPDDVFIIDDADEIPARDGVLFLKLYDGWTEPFAFHMRKSLYGFFWKQPGTLEVVSGCTIDMLQAVYGLDGIRLRRRQYYTMPNFRQYENRTGHILVQWSLGSPLHFAGWHCSWCFTPEGIYFKLVSAQNGDFPRWGDYEDKRDLNYIRSLIRTGGWFDGTQQEYPPADPSEHMYAPKYLLKNYDQFRYLLENPYREPKSTVEGGRRNQGSDGRSSAVRGKLDTTEG

SEQ ID NO: 1631 - DNA, 1744 bp, Homo sapiens
  ref <308>: DATABASE ACCESSION NUMBER: EMBL / L48489
  ref <309>: DATABASE ENTRY DATE: 1999-07-02
gaattcctttaacctgggaggcaggggctgcagtgagcagagatcgcaccactgcacttcagcctgggcgacagagcaagactctatcttaaaaacaaacaaacaaacaaaaacacacaaaaaaaatttaaattggagaatgagaatatacaagcatctccattccacagccataaactgattgataaattaaactgtataaatgaatagcaaatggttacatcatgagtcatgaatacagatgatttattcacaatagccatgtaatatgtgggatttaaaaggaactggtacatttatttctactgataccaaaatcttttaaatctatcattgattgaggaaaacaacttggttagacttagtgtccaatatggtagtatttatgaaaaatattaaatcaagaatagaaaaattgcatataaagccagagatagacctcaaattttttttttttttttttagatggagtcttgctcttgtcacccaggttctggagtgcaatggcgtgatcatggctcactgcaacttccgccccctgggttcaagtaattctcctgcctcagccggtatagctgggattataggcatgcgccactacactcagctaacttttgtatttttagtagagacagggtttcaccatgttggccaggctggtctcgaactcctgaccttgtgatctgcccacctcggcctcccaaagtgctgggattataggcgtgacgactgcactggccgacctcaaatttttatgtcctggagattagcaaagggcatggaataatgaaggggaacttttattttattttgtttttgagatagggtctcagtctgttgtccaggctggggcccagtggtgcaatcatggctcactgcagcctcaacctcgaggtctcaagtgatcctcccacctcagcctcctaagtagctgggaccacaagcacatggcaccacacctggctaatttttaaattttctgtagagatggggtctcactatgttgtccaagctggtctcaaactcctgggctcaagtgatcctcctgcctcagcctctgaaggtgttgggattacaggcgtgacgaccactcctggcctaattttattcattaaatatgttagaattaagtgtttttccttgagacctgtgagttttttcagtgaaaaaatattcaaaaggtttgtcagtatgtccataaaaaagaagataggaggggagggacaggacccaggagggcagcctacagcctgctctccccgttctgtcctggggcggagtctgtactgcgagttgagcttttcccaaggcgcatgttactcctggagccaagcctagcagtgcagccgcacagtcagggtggggtgggccaggcggagaagcaggctgcagagggggcagggtggtggcctggggatctcagggaagggctatgggagcacggcggtgtcctcagtactggggcttcaggggccttggtaccgcgagttgactcttgggggcaggaggtcactccatgcaggggcagcaggtgctggccaccacattgtccagcaaggtggcagcagaggcctcctaggtcccttcctaggaaaggagcctgggctgccctgatgagtctcctgtctctctctctcccgcaggatgaagatgagacgctacaagctctttctcatgttctgtatggccggcctgtgcctcatctccttcctgtacttcttcaagaccctgtcctatgtcacct

SEQ ID NO: 1632 - protein, 531 aa, Homo sapiens [sequence omitted]

SEQ ID NO: 1633 - DNA, 2469 bp, Rattus norvegicus
  ref <308>: DATABASE ACCESSION NUMBER: EMBL / D12498
  ref <309>: DATABASE ENTRY DATE: 2000-02-01
atgtggggctggaggggcctcctcttctgggctgtgctggtcacagccactctctgcactgccagaccagccccaaccttgcccgaacaagctcagccctggggagtccctgtggaagtggagtctctcctggtccaccctggtgacctgctacagcttcgctgccggctgcgcgatgatgtgcagagcatcaactggctgcgggatggggtgcagctggcggaaagcaaccgtacacgcatcacaggggaggaggtggaggtgcgggattccatccccgctgactctggcctctacgcttgtgtgaccaacagcccctctggcagcgataccacctacttctccgtcaatgtctcagatgcactgccatcctcggaggacgatgacgatgatgatgactcctcctcagaggagaaagagacagacaacaccaaaccaaaccgtaggcctgtggcgccatactggacatccccagagaaaatggagaagaaactgcacgcagtgccagctgccaagacggtgaaattcaaatgcccgtcgagtgggacacccagccccactttgcgctggttgaaaaacggcaaggaattcaaacctgaccaccggatcggaggctacaaggttcgttacgccacttggagcatcataatggactctgtggtgccttctgacaagggcaactacacctgcatcgtggagaacgagtatgggagcattaaccacacctaccagctagacgttgtggagcgatcccctcaccggcccatccttcaggcagggctaccagccaacaagaccgtggccctgggcagcaacgtggagttcatgtgcaaggtgtacagtgacccccagcctcacatccagtggctgaagcacatcgaggtgaatgggagtaagatcggtccagacaacttgccgtatgaccagatcctgaagactgctggagttaataccaccgacaaggaaatggaggtgcttcatctacggaatgtctcctttgaggatgcgggggagtatacgtgcttggcgggtaactctatcggactctcccatcactctgcatggttgaccgttctggaagccctggaagagagaccagccgtgatgacctcacctctgtacctggaaatcattatctactgcaccggggccttcctgatctcctgtatggtgggctccgtcatcatctacaagatgaagagcggcaccaagaagagcgacttccatagccagatggctgtgcataagctggctaagagcatccctctccgcagacaggtaacagtgtcagctgactccagcgcatccatgaactccggggttctcctggttcggccttcgcgactgtcctccagcggaacccccatgctagctggcgtctctgaatatgagctccctgaagatccccgctgggagctgccccgggacagactggtcttaggaaaaccgcttggcgagggctgcttcgggcaggtggtgttggccgaagccatcggtctggataaggacaaacccaaccgcgtgaccaaagtggccgtgaagatgttgaagtctgatgcgacggagaaggacctgtcggacctgatctcggagatggagatgatgaaaatgatcgggaagcacaagaatatcatcaacctgctgggggcgtgcacacaggatggtcctctctatgtcattgtggagtatgcctccaaaggcaatcttcgggagtatctgcaggcccggaggcctcctgggctggagtattgctacaaccccagccacaaccctgaggaacagctgtcttccaaagatctggtgtcctgtgcctatcaggtggcccggggcatggagtatcttgcctcgaagaagtgtatacaccgagacctggctgctaggaatgtcctggtgacagaggataatgtcatgaagatcgcagactttggcctagctcgagacattcaccatatcgactactataagaaaaccaccaatggccggctgcctgtgaagtggatggcacctgaggcattgtttgaccggatctacacccaccagagtgatgtgtggtcttttggggtgctcttatgggagatattcactctgggtggctcaccaaaccccggcgtgcctgtggaagaacttttcaagctgttgaaggagggtcatcgaatggacaagcccagtaactgtaccaatgagctgtacatgatgatgcgggactgctggaacgcagtgccctctcagagaccaactttcaagcagttggtggaagacctggaccggattgtggccttgacctccaaccaggagtatctggacctgtccatgccactggaccaggactcgccaagctttccggacacacggagctctacctgctcttcaggggaggactctgtcttctctcatgagccatttcctgaggagccctgtctgccccgacaccccacccagcttgcaaatggcggactcaaccggcgctga

SEQ ID NO: 1634 - protein, 822 aa, Rattus norvegicus
  ref <308>: DATABASE ACCESSION NUMBER: SWISS-Prot / Q04589
  ref <309>: DATABASE ENTRY DATE: 2002-06-15
MWGWRGLLFWAVLVTATLCTARPAPTLPEQAQPWGVPVEVESLLVHPGDLLQLRCRLRDDVQSINWLRDGVQLAESNRTRITGEEVEVRDSIPADSGLYACVTNSPSGSDTTYFSVNVSDALPSSEDDDDDDDSSSEEKETDNTKPNRRPVAPYWTSPEKMEKKLHAVPAAKTVKFKCPSSGTPSPTLRWLKNGKEFKPDHRIGGYKVRYATWSIIMDSVVPSDKGNYTCIVENEYGSINHTYQLDVVERSPHRPILQAGLPANKTVALGSNVEFMCKVYSDPQPHIQWLKHIEVNGSKIGPDNLPYDQILKTAGVNTTDKEMEVLHLRNVSFEDAGEYTCLAGNSIGLSHHSAWLTVLEALEERPAVMTSPLYLEIIIYCTGAFLISCMVGSVIIYKMKSGTKKSDFHSQMAVHKLAKSIPLRRQVTVSADSSASMNSGVLLVRPSRLSSSGTPMLAGVSEYELPEDPRWELPRDRLVLGKPLGEGCFGQVVLAEAIGLDKDKPNRVTKVAVKMLKSDATEKDLSDLISEMEMMKMIGKHKNIINLLGACTQDGPLYVIVEYASKGNLREYLQARRPPGLEYCYNPSHNPEEQLSSKDLVSCAYQVARGMEYLASKKCIHRDLAARNVLVTEDNVMKIADFGLARDIHHIDYYKKTTNGRLPVKWMAPEALFDRIYTHQSDVWSFGVLLWEIFTLGGSPNPGVPVEELFKLLKEGHRMDKPSNCTNELYMMMRDCWNAVPSQRPTFKQLVEDLDRIVALTSNQEYLDLSMPLDQDSPSFPDTRSSTCSSGEDSVFSHEPFPEEPCLPRHPTQLANGGLNRR

SEQ ID NO: 1635 - DNA, 3816 bp, Rattus norvegicus
  ref <308>: DATABASE ACCESSION NUMBER: EMBL / D12524
  ref <309>: DATABASE ENTRY DATE: 2000-04-29
gctgtagcagagagaggagctcagagtctagcgcagccaccgcgatgagaggcgctcgcggcgcctgggatctgctctgcgtcctgttggtcctgctccgtggccagacagggacttctcagccatctgcgagtccaggggagccgtctccaccatccatccagccggcccagtcagagttaatagttgaagccggggacaccatcaggctgacgtgcactgaccccgcctttgtcaaatggactttcgagatcctcgatgtaaggattgagaataagcagagcgaatggattcgagaaaaagccgaggccactcacacgggcaaatacacgtgcgtcagcggcagcggcctcaggagctctatttacgtgttcgttagagatcctgccgtacttttcctggttggccttcccttgtttggcaaagaagacaacgacgcactggtccgctgccccctgacagacccacaggtgtccaattactccctcattgagtgtgatgggaaatctctccccacggacctgaagttcgtccccaaccccaaggctggcatcaccatcaaaaacgtgaagcgcgcctaccaccggctgtgcatccggtgtgctgcccagcgtgagggcaaatggatgcggtctgacaaattcaccctcaaagtgagagcagccatcaaagctatcccagtggtgtctgtgcccgaaacaagtcatctccttaaggaaggggacacatttacggtgatatgcaccataaaagacgtgtctacatccgtggactccatgtggataaagttgaaccctcagcctcagagcaaagcccaggtaaagcgcaatagctggcatcagggcgacttcaattacgaacgccaggagacgctgactatcagctcagcaagagttaacgattccggagtgttcatgtgttatgccaataatacttttggatcagcaaatgtcacaacaaccttgaaagtagtagaaaagggattcatcaacatcttccctgtgaagaacactacggtatttgtaactgatggggaaaatgtagacttggttgttgagttcgaggcctaccctaaacctgaacaccagcagtggatctacatgaacaggacgcctactaacagaggggaggattatgtcaaatccgacaaccaaagcaacatcagatatgtgaacgaacttcgcctgaccagattgaaaggcacagaaggaggcacttacacctttctggtgtccaactctgatgtcagtgcttccgtgacatttgatgtttatgtgaacacaaaaccagaaatcctgacatatgacaggctcatgaatggcaggctccagtgtgtggcggcgggattcccggagcccacaatagattggtatttttgtacaggggcagagcaaaggtgtaccgttcctgtcccgccagtagacgtacagatccagaatgcgtctgtgtcaccatttggaaaactggtggttcagagttccatagactccagcgtcttccggcacaacggcacggtggagtgtaaggcctccaacgctgtgggcaagagctctgccttctttaactttgcatttaaaggtaacagcaaagagcaaatccagccccacaccctgttcacgccgctgctcattggcttcgtggtcacagccggcttgatggggatcattgtgatggttcttgcctacaaatatttgcagaaacccatgtatgaagtacaatggaaggttgtcgaggagataaatgggaacaattatgtttacatagacccaacgcagcttccttatgaccacaaatgggagtttcccagaaacaggctgagttttggaaagaccttgggagctggtgcctttgggaaggtagttgaggccactgcctatggcttaattaagtcggatgccgccatgacggttgccgtgaagatgctcaaaccaagtgcccatttaacggaaagggaggccctaatgtcagaactgaaggtcctgagctacctgggtaatcacatgaatatcgtcaacctccttggagcgtgtaccgtgggagggcccaccctggtcattacagaatactgttgctatggtgatcttttgaatttcttgagaagaaagcgtgactcgtttattttctcaaagcaagaagaacaggcagacgccgcactttataagaaccttctgcattcaaaggagtcttcctgtgacagctcaaacgagtacatggacatgaagcctggcgtttcctacgtcgtaccaaccaagacagacaaaaggagatccgcaagaatagactcgtatatagaaagagacgtgactcccgccatcatggaagatgacgagctggctctggacctggaagatttgctgagcttttcctaccaggtggccaagggcatggcgttcctcgcctccaagaactgtattcacagagatttggcagccaggaatatcctcctcactcacgggcggatcacaaagatttgcgatttcggcctagccagagacatcaggaatgattcgaattacgtggtaaaaggaaatgcacggctgcccgtgaagtggatggcaccggagagcattttcaactgcgtgtacacatttgaaagtgacgtctggtcctatgggattttcctctgggagctattctctctaggaagcagcccctacccagggatgccggtcgattccaagttttacaagatgatcaaggaaggtttccgaatgctcagccctgagcacgcgcctgccgcaatgtatgaagttatgaagacttgctgggatgctgatcccctgaaaaggccaacattcaagcaggttgttcagctcattgagaagcagatctcagacagcagcaaacatatttactccaacttagcaaactgtaaccccaacccagagaaccccgtggtggtggaccattctgtgagggtcaattccgtcggcagcagcacctcttccacacagcctctcctcgtgcatgaggacgcctgagtagaaacggagcccgatgggcattgctgtggtctccaaccccattctcctggcttctatgatggttattttgttttcctttgacttgcatcctactccagggtagcgggatccccgccccacccccaaccccactgtgattctgccttttatgagcacactttagtggctgatggcctttccttttcgccatcagccaccatcccaccaagaaggtccgaacggtatgtatatattttcccattagcaaagtagcccctactgtaaacggaaggcctcatgctttagaggaggaagggtagggtgcaacggggatgcctggagttcttcacagtgctcctccgagtgtgtttgaaaagtatggccagtagttcatttgaagagtttagaagtagtcccgttttggcccagagagccttccataatgacgggcagatgtatgtagcaagactagaaaggaaacccaagccctgtgtgtggaaagtagaccattattagaacagaggacacatgagaacatctaggcctaagaagtctggtcatgctgagaacgagacctaggctgagacggcgcaagccctggaagcgtggacatagatgctctgttctggggctgcgcgggcttttgcgcaagcttttgtacaactgacctggtttttaaatagtctgctgttggggagtagaattggagacaaggcctcctccctagccagcgtttgtatatactcactgtacgttgtatgcgttcatactttggagcgggggatccccccacaagctttagtttctgtgtacaaccctgggattaggtctgctgtgtgtaagaatagattta

SEQ ID NO: 1636 - protein, 978 aa, Rattus norvegicus
  ref <308>: DATABASE ACCESSION NUMBER: SWISS-Prot / BAA02094
  ref <309>: DATABASE ENTRY DATE: 2003-02-01
MRGARGAWDLLCVLLVLLRGQTGTSQPSASPGEPSPPSIQPAQSELIVEAGDTIRLTCTDPAFVKWTFEILDVRIENKQSEWIREKAEATHTGKYTCVSGSGLRSSIYVFVRDPAVLFLVGLPLFGKEDNDALVRCPLTDPQVSNYSLIECDGKSLPTDLKFVPNPKAGITIKNVKRAYHRLCIRCAAQREGKWMRSDKFTLKVRAAIKAIPVVSVPETSHLLKEGDTFTVICTIKDVSTSVDSMWIKLNPQPQSKAQVKRNSWHQGDFNYERQETLTISSARVNDSGVFMCYANNTFGSANVTTTLKVVEKGFINIFPVKNTTVFVTDGENVDLVVEFEAYPKPEHQQWIYMNRTPTNRGEDYVKSDNQSNIRYVNELRLTRLKGTEGGTYTFLVSNSDVSASVTFDVYVNTKPEILTYDRLMNGRLQCVAAGFPEPTIDWYFCTGAEQRCTVPVPPVDVQIQNASVSPFGKLVVQSSIDSSVFRHNGTVECKASNAVGKSSAFFNFAFKGNSKEQIQPHTLFTPLLIGFVVTAGLMGIIVMVLAYKYLQKPMYEVQWKVVEEINGNNYVYIDPTQLPYDHKWEFPRNRLSFGKTLGAGAFGKVVEATAYGLIKSDAAMTVAVKMLKPSAHLTEREALMSELKVLSYLGNHMNIVNLLGACTVGGPTLVITEYCCYGDLLNFLRRKRDSFIFSKQEEQADAALYKNLLHSKESSCDSSNEYMDMKPGVSYVVPTKTDKRRSARIDSYIERDVTPAIMEDDELALDLEDLLSFSYQVAKGMAFLASKNCIHRDLAARNILLTHGRITKICDFGLARDIRNDSNYVVKGNARLPVKWMAPESIFNCVYTFESDVWSYGIFLWELFSLGSSPYPGMPVDSKFYKMIKEGFRMLSPEHAPAAMYEVMKTCWDADPLKRPTFKQVVQLIEKQISDSSKHIYSNLANCNPNPENPVVVDHSVRVNSVGSSTSSTQPLLVHEDA

SEQ ID NO: 1637 - DNA, 5084 bp, Homo sapiens
  ref <308>: DATABASE ACCESSION NUMBER: Refseq / NM_000222
  ref <309>: DATABASE ENTRY DATE: 2000-10-31
gatcccatcgcagctaccgcgatgagaggcgctcgcggcgcctgggattttctctgcgttctgctcctactgcttcgcgtccagacaggctcttctcaaccatctgtgagtccaggggaaccgtctccaccatccatccatccaggaaaatcagacttaatagtccgcgtgggcgacgagattaggctgttatgcactgatccgggctttgtcaaatggacttttgagatcctggatgaaacgaatgagaataagcagaatgaatggatcacggaaaaggcagaagccaccaacaccggcaaatacacgtgcaccaacaaacacggcttaagcaattccatttatgtgtttgttagagatcctgccaagcttttccttgttgaccgctccttgtatgggaaagaagacaacgacacgctggtccgctgtcctctcacagacccagaagtgaccaattattccctcaaggggtgccaggggaagcctcttcccaaggacttgaggtttattcctgaccccaaggcgggcatcatgatcaaaagtgtgaaacgcgcctaccatcggctctgtctgcattgttctgtggaccaggagggcaagtcagtgctgtcggaaaaattcatcctgaaagtgaggccagccttcaaagctgtgcctgttgtgtctgtgtccaaagcaagctatcttcttagggaaggggaagaattcacagtgacgtgcacaataaaagatgtgtctagttctgtgtactcaacgtggaaaagagaaaacagtcagactaaactacaggagaaatataatagctggcatcacggtgacttcaattatgaacgtcaggcaacgttgactatcagttcagcgagagttaatgattctggagtgttcatgtgttatgccaataatacttttggatcagcaaatgtcacaacaaccttggaagtagtagataaaggattcattaatatcttccccatgataaacactacagtatttgtaaacgatggagaaaatgtagatttgattgttgaatatgaagcattccccaaacctgaacaccagcagtggatctatatgaacagaaccttcactgataaatgggaagattatcccaagtctgagaatgaaagtaatatcagatacgtaagtgaacttcatctaacgagattaaaaggcaccgaaggaggcacttacacattcctagtgtccaattctgacgtcaatgctgccatagcatttaatgtttatgtgaatacaaaaccagaaatcctgacttacgacaggctcgtgaatggcatgctccaatgtgtggcagcaggattcccagagcccacaatagattggtatttttgtccaggaactgagcagagatgctctgcttctgtactgccagtggatgtgcagacactaaactcatctgggccaccgtttggaaagctagtggttcagagttctatagattctagtgcattcaagcacaatggcacggttgaatgtaaggcttacaacgatgtgggcaagacttctgcctattttaactttgcatttaaaggtaacaacaaagagcaaatccatccccacaccctgttcactcctttgctgattggtttcgtaatcgtagctggcatgatgtgcattattgtgatgattctgacctacaaatatttacagaaacccatgtatgaagtacagtggaaggttgttgaggagataaatggaaacaattatgtttacatagacccaacacaacttccttatgatcacaaatgggagtttcccagaaacaggctgagttttgggaaaaccctgggtgctggagctttcgggaaggttgttgaggcaactgcttatggcttaattaagtcagatgcggccatgactgtcgctgtaaagatgctcaagccgagtgcccatttgacagaacgggaagccctcatgtctgaactcaaagtcctgagttaccttggtaatcacatgaatattgtgaatctacttggagcctgcaccattggagggcccaccctggtcattacagaatattgttgctatggtgatcttttgaattttttgagaagaaaacgtgattcatttatttgttcaaagcaggaagatcatgcagaagctgcactttataagaatcttctgcattcaaaggagtcttcctgcagcgatagtactaatgagtacatggacatgaaacctggagtttcttatgttgtcccaaccaaggccgacaaaaggagatctgtgagaataggctcatacatagaaagagatgtgactcccgccatcatggaggatgacgagttggccctagacttagaagacttgctgagcttttcttaccaggtggcaaagggcatggctttcctcgcctccaagaattgtattcacagagacttggcagccagaaatatcctccttactcatggtcggatcacaaagatttgtgattttggtctagccagagacatcaagaatgattctaattatgtggttaaaggaaacgctcgactacctgtgaagtggatggcacctgaaagcattttcaactgtgtatacacgtttgaaagtgacgtctggtcctatgggatttttctttgggagctgttctctttaggaagcagcccctatcctggaatgccggtcgattctaagttctacaagatgatcaaggaaggcttccggatgctcagccctgaacacgcacctgctgaaatgtatgacataatgaagacttgctgggatgcagatcccctaaaaagaccaacattcaagcaaattgttcagctaattgagaagcagatttcagagagcaccaatcatatttactccaacttagcaaactgcagccccaaccgacagaagcccgtggtagaccattctgtgcggatcaattctgtcggcagcaccgcttcctcctcccagcctctgcttgtgcacgacgatgtctgagcagaatcagtgtttgggtcacccctccaggaatgatctcttcttttggcttccatgatggttattttcttttctttcaacttgcatccaactccaggatagtgggcaccccactgcaatcctgtctttctgagcacactttagtggccgatgatttttgtcatcagccaccatcctattgcaaaggttccaactgtatatattcccaatagcaacgtagcttctaccatgaacagaaaacattctgatttggaaaaagagagggaggtatggactgggggccagagtcctttccaaggcttctccaattctgcccaaaaatatggttgatagtttacctgaataaatggtagtaatcacagttggccttcagaaccatccatagtagtatgatgatacaagattagaagctgaaaacctaagtcctttatgtggaaaacagaacatcattagaacaaaggacagagtatgaacacctgggcttaagaaatctagtatttcatgctgggaatgagacataggccatgaaaaaaatgatccccaagtgtgaacaaaagatgctcttctgtggaccactgcatgagcttttatactaccgacctggtttttaaatagagtttgctattagagcattgaattggagagaaggcctccctagccagcacttgtatatacgcatctataaattgtccgtgttcatacatttgaggggaaaacaccataaggtttcgtttctgtatacaaccctggcattatgtccactgtgtatagaagtagattaagagccatataagtttgaaggaaacagttaataccattttttaaggaaacaatataaccacaaagcacagtttgaacaaaatctcctcttttagctgatgaacttattctgtagattctgtggaacaagcctatcagcttcagaatggcattgtactcaatggatttgatgctgtttgacaaagttactgattcactgcatggctcccacaggagtgggaaaacactgccatcttagtttggattcttatgtagcaggaaataaagtataggtttagcctccttcgcaggcatgtcctggacaccgggccagtatctatatatgtgtatgtacgtttgtatgtgtgtagacaaatatttggaggggtatttttgccctgagtccaagagggtcctttagtacctgaaaagtaacttggctttcattattagtactgctcttgtttcttttcacatagctgtctagagtagcttaccagaagcttccatagtggtgcagaggaagtggaaggcatcagtccctatgtatttgcagttcacctgcacttaaggcactctgttatttagactcatcttactgtacctgttccttagaccttccataatgctactgtctcactgaaacatttaaattttaccctttagactgtagcctggatattattcttgtagtttacctctttaaaaacaaaacaaaacaaaacaaaaaactccccttcctcactgcccaatataaaaggcaaatgtgtacatggcagagtttgtgtgttgtcttgaaagattcaggtatgttgcctttatggtttcccccttctacatttcttagactacatttagagaactgtggccgttatctggaagtaaccatttgcactggagttctatgctctcgcacctttccaaagttaacagattttggggttgtgttgtcacccaagagattgttgtttgccatactttgtctgaaaaattcctttgtgtttctattgacttcaatgatagtaagaaaagtggttgttagttatagatgtctaggtacttcaggggcacttcattgagagttttgtcttgccatactttgtctgaaaaattcctttgtgtttctattgacttcaatgatagtaagaaaagtggttgttagttatagatgtctaggtacttcaggggcacttcattgagagttttgtcaatgtcttttgaatattcccaagcccatgagtccttgaaaatattttttatatatacagtaactttatgtgtaaatacataagcggcgtaagtttaaaggatgttggtgttccacgtgttttattcctgtatgttgtccaattgttgacagttctgaagaattc

SEQ ID NO: 1638 - protein, 976 aa, Homo sapiens [sequence omitted]

SEQ ID NO: 1639 - DNA, 1561 bp, Rattus norvegicus
  ref <308>: DATABASE ACCESSION NUMBER: EMBL / D12573
  ref <309>: DATABASE ENTRY DATE: 1999-06-29
gagtgtgtggtctggggccacctctctctttttgggtcaaatgagagtttggggtatcttgtgtctgagggcccttctggagtagtgtcaagggactaaaaggatgtaaccattgctctctcctttcacttcctttggttggggggaacccaggtgggacttggctcttctgccatgggcaagcagaatagcaagctgcggccagagatgctgcaggacctgcgagagaacaccgagttctctgagctggagcttcaggagtggtacaagggcttcctgaaggactgcccgactggcatcctcaacgtggatgagttcaagaagatctacgccaacttcttcccctacggcgatgcctccaagttcgccgagcatgtcttccgcacttttgacaccaacagcgacggcaccatcgacttccgggagttcatcatcgctctgagcgtgacctcgcgtggccgcctggagcagaagctcatgtgggccttcagcatgtacgacctggacggcaatggctacatcagccgggaggagatgctagaaattgtgcaggccatttacaagatggtttcgtccgtgatgaagatgcctgaggatgagtctaccccggaaaagaggactgagaaaatcttccgccaaatggacacaaacaatgacggcaagctgtcactggaggagttcatccgcggggccaaaagcgacccatcgatcgtgcgcctgctgcaatgcgatcccagcagcgcttcccagttctgagctgagaggagccagctcgcctccctgccttcaccggccctccggctctcagcttcctctccctcgtgtctatccaggctggggaatccccttctgggtctgcactgtgggggggcctctggagaagcgaaccctgcaaggaaggggctaagcaaggcagccgttagtccccacggcctaagaggcagaatctcccttagtggaccgagattacccccgggtcaggttctgtatctttccccagacagctgatcaccttccacgccacccacaacccgaggctcttccacaacacgggaagaggggctaggtccttcttgggtggtcctcagcctggagggaggtggggatttgtgccaaggtgaagagtctttttgtttgttttggtggggaagaccggaggattactgggctgtgggactttgaagaagttccctgatctacttccctgcagaagaacacttcctgtcccagctcttgctgctggaggcatggtaaaaagaagatctcccaggattccaactgggggtccccaaacccagcctgcctctttgcacttggataacacagatttacccgtctgtcctctgtatttctctctccttccccacctcacacacgcacggggccgcgcgacatgcgcgcgcaacacacacacacacacacacgcacgatatgcacgcacacatgcacagcacccgcgcacacagaggccggcagacagatgagcagagcccctccacagcgttctgtgtgggaaagaagtgcagcccctgccaagccccatgtccctctgcatgcgccg

SEQ ID NO: 1640 - protein, 192 aa, Rattus norvegicus
  ref <308>: DATABASE ACCESSION NUMBER: SWISS-Prot / P32076
  ref <309>: DATABASE ENTRY DATE: 2002-06-15
GKQNSKLRPEMLQDLRENTEFSELELQEWYKGFLKDCPTGILNVDEFKKIYANFFPYGDASKFAEHVFRTFDTNSDGTIDFREFIIALSVTSRGRLEQKLMWAFSMYDLDGNGYISREEMLEIVQAIYKMVSSVMKMPEDESTPEKRTEKIFRQMDTNNDGKLSLEEFIRGAKSDPSIVRLLQCDPSSASQF

SEQ ID NO: 1641 - DNA, 1440 bp, Homo sapiens
  ref <308>: DATABASE ACCESSION NUMBER: Refseq / NM_002143
  ref <309>: DATABASE ENTRY DATE: 2002-11-05
ggtgtctccgcgtcgctgggtgggacttggctcggcggccatgggcaagcagaacagcaagctgcggcccgagatgttgcaggacctgcgagagaacacagagttctcagagctggagctgcaggagtggtacaagggcttcctcaaggactgccccacaggaatcctcaatgtggatgagttcaagaagatctacgccaacttctttccctatggtgacgcctccaagtttgccgagcacgtcttccgcacctttgacaccaacagcgatggcaccatagactttcgggagttcatcattgcgctgagcgtgacctcgcgcggccgcctggagcagaagctcatgtgggccttcagcatgtatgacctggacggcaacggctacatcagccgggaggagatgctggagatcgtgcaggccatttacaagatggtttcgtccgtgatgaagatgccggaggacgagtcgaccccggaaaagaggactgagaaaatcttccgccaaatggacacaaacaacgacggcaagctgtccttggaggagttcatccgcggggccaaaagcgacccgtccatcgtgcgtctgctgcagtgcgaccccagcagcgcctcccagttctgagaggagccaggttccccttcctccctcccttcaccggccccctcccggctcttagcttccactcccttgtgtgtattctggctgggggccagattggggaagcccttctccccgggtctgccctgtggggggcttccggaaaagggaaccctgcggtacccccaggccaaagcaagtaagcggttagcaccccccaatcccagaggcaacaatagagacacaggctgggttggtctgcccctcagtcaggcccccttacccacccaccagccccaaggcccgacccctcccccaaaggggcagtccccttcttgcaggtctcagcttgcggggtggggggagtcatgcccaggggaggagactttttatctggaggggagagaaggattctaggggtgtggagttggagaaagaggcttccttgagccacccttcccaccccagcccttgctggtccctaggccaagccaccaagtgaaaccttccaggatactagcccgccagctgtgggccccagaaagccagcctgccttttagcacttggatacacacagacccacggagctctctgtgtttggcctctcacacacacacaggcccatagacagatgggcagatgcacccagagccccatgcacagtgtcctgcgtgggaaagagacacggtccccctggctgagcccctgtcctcccctctgtccccccaaccgccccccctgcatgcagccaaatggagcatctctgttctttttaataatttcagaataaagtctcatttcagtgcaaaaaaaaaaaaaaaaaaaaaaaaaaaaaaaaaaa

SEQ ID NO: 1642 - protein, 192 aa, Homo sapiens; identical to SEQ ID NO: 1640

SEQ ID NO: 1643 - DNA, 2721 bp, Rattus norvegicus
  ref <308>: DATABASE ACCESSION NUMBER: EMBL / D12769
  ref <309>: DATABASE ENTRY DATE: 1999-09-29
gcggccgtcggcggacgcgggaagaagtgtcttgtaggcgcggcgccccactcagccccggcccccctcatccgcgtactcggctgatgcctcagggcgtcagctcggcggagaggcggtcgaggcgtgcgcctggctagcagttggctttccccgtgactcggacacgtttgcagtcgaataaacttgcgaccgccacgtgtggcatctctccaaggaaccggctcaggaggagggcgcgcccatcgtgggatcgcgcggggcgcccggcagggcggcggcgacagcggcagagccggccgcggctgctgcgtgcggaggcgctgccggttacgtaaagatgaggggctgaggtcgcctcggcgctcccgcgagtcgcaagctcccgcgcccccgccccctcggccgcgccgcaccgcgctcgtcgtccgagaccagggcagggctagccgaagctccgcagccaccctcaagtttggccgcaccgcccgggctgccgtcgcccgcaccatgtccgcggccgcctacatggacttcgtggctgcccagtgtctggtttccatctccaaccgcgccgctgtgccggagcacgggggcgctccggacgccgagcgactgcgactacctgagcgcgaggtgaccaaggaacacggtgacccgggggacacctggaaggattattgcacactggtcaccatcgccaagagcttgttggacctgaacaaataccgacccatccagaccccctcggtgtgcagcgacagtctggagagtcccgatgaggatataggatccgacagcgacgtgaccaccgaatctgggtcgagtccttcccacagcccggaggagagacaggattctggcagcgcgcccagcccgctctccctcctccactctggagtggcttcgaaggggaaacacgcctccgaaaagaggcacaagtgcccctacagtggctgtgggaaagtctatggaaaatcctcccatcttaaagcccattacagagtgcatacaggtgaacggcccttcccctgcacgtggccagactgccttaaaaagttctcgcgctcggacgagctgacccgccactaccggacccacactggcgagaagcagttccgctgtccgctgtgtgagaagagattcatgaggagtgaccacctcaccaagcatgcccggcgccacaccgacttccaccccagcatgatcaagagatcaaaaaaggctcttgccagccccttgtgaggtgctccccatatggcaaccaggcagagatggtcccggaaggacagagctcccaggaaacagacggacacatggaaatctgccaccgcagagttgtgctggccacaggaggtcactgctctttggtcaatattctgacactctccctgcgctgtttccaaaaagcacacggtagcctaagatcaaagtcaacatttggtccccttgcagaggccactctgaaccgtctctgactgttggagggcaggcaaataaatgcttttggtattttctcctttgttttggggggtggggggagggggcaaggccaagacttggggtaggatttttgaagattcaggctggtgtacatacgtctgactgggtgagttgacccctggcctcccacagtgactctggatccttgatgcttgctgactctcagaattgtttttcttctctctcaatgtcacgaccagagtgcttcagcttgtttagcagagccactctcgaatcacgttaacttttgagatttaaaaaacaaaacaaaacaacaaaaaaaaaaaaaaacccctccatagcacagctgtcttttatgcaagcaagagcacacctactccagcatgatctgtcatctaaggacttcaaaacaaaacaaaacaaaaaaaaaagttacttatagtcagtggataagcagagtccgaatttacactaaacaagacagaccttcgaggggtcataagtccggaactttcaaaccttgcttcgtatgaatcgtactatctgaacataaactgcacttttattttctaataccgagggtgaatacggtaaatccatgccttgagggtagaagccgacattctgtttggcacacgttattatctgcttattttccaggatacacatttccctgagaacccacggcagagatgtgagggcagaatgtatggaaacacatgctgaggaggggaaggaggaggggagtgctttaaagatacaaaaaaaaaaaaaaaaaaaaaaagagcaaacaattttaacttcatgaatttgtttgaattttcccaagcttcagataacaacgccactcacgggactaggacgctgcaagagcattgggctctgtgtagcattagctgataaatgggtgtatagccatcaccagacctggaaatgcccccttttggtgggggtgggggtgtttcttggtctctctttcgttcctatgaaatttccactaagaggtgcaagagttatatcaaaggaaagggaactgaaatatggaaaaaaaaaagtttgcccctgtaagtagtctctagggaaggaagatgccacaatggtttcagaggcgactctgcagaacagtcccttctgctgaacataggtcagagaaacactcgtgaatggcatcacatcgccaactgtctgcatcatggcccaccactacttagcttgtatctcggtgtctacacaatggcctgaaccactggtcaccat

SEQ ID NO: 1644 - protein, 244 aa, Rattus norvegicus
  ref <308>: DATABASE ACCESSION NUMBER: SWISS-Prot / Q01713
  ref <309>: DATABASE ENTRY DATE: 2002-06-15
MSAAAYMDFVAAQCLVSISNRAAVPEHGGAPDAERLRLPEREVTKEHGDPGDTWKDYCTLVTIAKSLLDLNKYRPIQTPSVCSDSLESPDEDIGSDSDVTTESGSSPSHSPEERQDSGSAPSPLSLLHSGVASKGKHASEKRHKCPYSGCGKVYGKSSHLKAHYRVHTGERPFPCTWPDCLKKFSRSDELTRHYRTHTGEKQFRCPLCEKRFMRSDHLTKHARRHTDFHPSMIKRSKKALASPL

SEQ ID NO: 1645 - DNA, 4859 bp, Homo sapiens
  ref <308>: DATABASE ACCESSION NUMBER: Refseq / NM_001206
  ref <309>: DATABASE ENTRY DATE: 2000-10-31
cacgttgggtgacataatggggtttttttaattatagattcacactgcatttattcatcacccctgtcctctcatccataactcaaatttactaccagcaacacaaaatacaaagatgtgtccagtttcactacagctcttcgcgtttacaagtgtcgagcgcttgctttcggaacgcccttgtgattggccgagccaatgccagtgacatcaaccaacttacttttgattggaaggctggttgctgggactgtagcgtttgcaggaagtcacttaactgtttgggagctggaaaaccgaagctgaagttctcttttgccataggaacgagcgcaactgactaggaaagatgtgtcccaaagctccgcaagctggaacgtgagccaggaggcccggaccggccacgggaccgcgaggcactccgaaagtgtgcggctgccccttccctgcctcccagctgttacccttttaaatgtcagtgttcgaggctgtaggggtagcacgaggcagcgaaacggaacagtcggattggccgcacgcctcagttctagacgcacctctccaccgaagccgttctgactggcagggggagaaagtaaacagagttgaatcaccctccccactggccaattggagggggtttggtttgtgacgtgatgggattctgcgaaattgttactgagcaagagaatgccggaacgtgcggaccggccggagcaggggttcagaagccgtcagtggactcgggaaaaagtgtctcttagacctggcgctcggcggggccctcgccacccgcgtcggggtgatcgggtgaatgtcctggggctttggctcgacggcgaggcggccgagggcgtgcacctctcttgcagtttcctctcccagcgcctcgggggcgttttcagtcgaataaacttgcgaccgccacgtgtggcatctttccaagggagccggctcagaggggccggcgcgcccgtcgggggatcgcggccggcgcggggcaggggcggcggctagaggcggcggcgcggcggagcccggggccgtggatgctgcgtgcggaggcgctgccggttacgtaaagatgaggggctgaggtcgcctcggcgctcctgcgagtcggaagcgccccgcgcccccgcccccttggccgccgcgccgtgccgggcgggcgggtcgtcgtccgaggccagggagggcgagccgaacctccgcagccaccgccaagtttgtccgcgccgcctgggctgccgtcgcccgcaccatgtccgcggccgcctacatggacttcgtggctgcccagtgtctggtttccatttcgaaccgcgctgcggtgccggagcatggggtcgctccggacgccgagcggctgcgactacctgagcgcgaggtgaccaaggagcacggtgacccgggggacacctggaaggattactgcacactggtcaccatcgccaagagcttgttggacctgaacaagtaccgacccatccagaccccctccgtgtgcagcgacagtctggaaagtccagatgaggatatgggatccgacagcgacgtgaccaccgaatctgggtcgagtccttcccacagcccggaggagagacaggatcctggcagcgcgcccagcccgctctccctcctccatcctggagtggctgcgaaggggaaacacgcctccgaaaagaggcacaagtgcccctacagtggctgtgggaaagtctatggaaaatcctcccatctcaaagcccattacagagtgcatacaggtgaacggcccttcccctgcacgtggccagactgccttaaaaagttctcccgctcagacgagctgacccgccactaccggacccacactggggaaaagcagttccgctgtccgctgtgtgagaagcgcttcatgaggagtgaccacctcacaaagcacgcccggcggcacaccgagttccaccccagcatgatcaagcgatcgaaaaaggcgctggccaacgctttgtgaggtgctgcccgtggaagccagggagggatggaccccgaaaggacaaaagtactcccaggaaacagacgcgtgaaaactgagccccagaagaggcacacttgacggcacaggaagtcactgctctttggtcaatattctgattttcctctccctgcattgtttttaaaaagcacattgtagcctaagatcaaagtcaacaacactcggtccccttgaagaggcaactctctgaacccgtctctgactgttggagggaaggcaaatgcttttgggttttttggtttttgtttttgtttttttttctccttttatttttttgcgggggagggtagggagtgggtgggggggagggggtaaggccaagactgggtagattttaaagattcaacactggtgtacatatgtccgctgggtgagttgacctgtggcctcgcacagtgattctaggccctttatgcttgctgtctctcagaattgttttcttaccttttaatgtaatgacgagtgtgcttcagtttgtttagcaaaaccactctcttgaatcacgttaacttttgagattaaaaaaaaaaacgccatagcacagctgtctttatgcaagcaagagcacatctactccagcatgatctgtcatctaaagacttgaaaacaaaaaacagttacttatagtcaatgggtaagcagagtctgaatttatactaatcaagacaaacctttgaaaggttacactaagtacagaacttttaaaccttgctttgtatgagttgtactttttgaacataagctgcacttttattttctaatgcagaggatgaataagttaaatacatgctttgaggatagaagcagatgttctgtttggcaccacgttataatctgcttattttacaatatacacgtttccctaagaaatcatgcgcagagatgtgagggcagaatatacacaacagatgctgaaggagaaggagggtagtgttttgcaaaagaaaaagaaaagaaccaacagaattttaactctattaacttttccaaattttcctatgcttttagttaacatcattattgtatcctaatgccactaggggagagagcttttgactctgttgggttttatttgaatgtgtgcataacagtaatgagatctggaaacacctattttttggggaaaaaggtttgttggtctccttcctgtgttcctacaaaactcccactctcaggtgcaagagttatgtagaaggaaagggagctgaaataggaacagaaaaatcaacccctataactagtgaacaccaagggaaaataccacaatgatttcagaggagactctgcaaaatcgtcccttgtggagaatgcaggcaacatggaatactacgaatgaaatcacatcactgtatcttttacatcaatagcctcaccactaatatatcttgtatctaggtgtctataatggctgaaaccactacatccatctatgccatttacctgaaaacttaactgtggcctttatgaggccagaaaagtgaactgagttttgtagttaagacctcaaatgaggggagtcagcagtgatcatgggggaaatgtttacattttttttttcttcagaagtaacgctttctgatgattttatctgatatttaaaacagggagctatggtgcactctagtttatacttgcgctctgaaatgtgtaaacatagggtgcctacctatttcacctgacccatactcgtttctgattcagaatcagtgtgggctcctgcagtgggcgcgggtcacggctgactccaacttccaatacaacagccatcactagcacagtgtttttttgtttaaccaacgtagtgttattagtagttctataaagagaactgcttttaacattagggactgggagcagtccatgggataaaaaggaaagtgttttctcacgagaaaacatgtcaggaaaaataaagaacactttctacctctgtttcagatttttgaaacacttattttaaaccaaattttaatttctgtgtccaaaataagttttaaggacatctgttcttccatacgaaataggttaggctgcctatttctcactgagctcatggaatggttctgcttatgatactctgcacgctgccttttagtgagtgaggagtttggggttgcctagcacttgctaacttgtaaaaagtcatctttccctcacagaaagaaacgaaagaaagcaaagcaaagtcagtgaaagacaatctttatagtttcaggagtaaatctaaatgtggcttttgtcaagcacttagatggatataaatgcagcaacttgttttaaaaaaatgcacatttacttcccaaaaaagttgttacttgccttttcaagtgtgacaaactcacatttgatattctcttatatgttatagtaatgtaacgtataaactcaagcctttttattctttgtgattaaatcctgttttaaaatgtcacaaaacaggaaccagcattctaattagatttactatatcaagatatggttcaaataggactactagagttcattgaacactaaaactatgaaacaattactttttatattaaaaagaccatggatttaacttatgaaaatccaaatgcaggatagtaatttttgtttacttttttaaccaaactgaatttttgaaagactattgcaggtgtttaaaaagaaagaaaagttgttttatctaatactgtaagtagttgtcatattctggaaaatttaatagttttagagttaagatatctcctctctttggttagggaagaagaaagcccttcaccattgtggaatgatgccctggctttaaggtttagctccacatcatgcttctctt

SEQ ID NO: 1646 - protein, 244 aa, Homo sapiens
  ref <308>: DATABASE ACCESSION NUMBER: SWISS-Prot / Q13886
  ref <309>: DATABASE ENTRY DATE: 2002-06-15
MSAAAYMDFVAAQCLVSISNRAAVPEHGVAPDAERLRLPEREVTKEHGDPGDTWKDYCTLVTIAKSLLDLNKYRPIQTPSVCSDSLESPDEDMGSDSDVTTESGSSPSHSPEERQDPGSAPSPLSLLHPGVAAKGKHASEKRHKCPYSGCGKVYGKSSHLKAHYRVHTGERPFPCTWPDCLKKFSRSDELTRHYRTHTGEKQFRCPLCEKRFMRSDHLTKHARRHTEFHPSMIKRSKKALANAL

SEQ ID NO: 1647 - DNA, 2721 bp, Rattus norvegicus; identical to SEQ ID NO: 1643
  ref <308>: DATABASE ACCESSION NUMBER: EMBL / D12769
  ref <309>: DATABASE ENTRY DATE: 1999-09-29

SEQ ID NO: 1648 - protein, 244 aa, Rattus norvegicus; identical to SEQ ID NO: 1644
  ref <308>: DATABASE ACCESSION NUMBER: SWISS-Prot / Q01713
  ref <309>: DATABASE ENTRY DATE: 2002-06-15

SEQ ID NO: 1649 - DNA, 4859 bp, Homo sapiens; identical to SEQ ID NO: 1645
  ref <308>: DATABASE ACCESSION NUMBER: Refseq / NM_001206
  ref <309>: DATABASE ENTRY DATE: 2000-10-31

SEQ ID NO: 1650 - protein, 244 aa, Homo sapiens; identical to SEQ ID NO: 1646
  ref <308>: DATABASE ACCESSION NUMBER: SWISS-Prot / Q13886
  ref <309>: DATABASE ENTRY DATE: 2002-06-15

SEQ ID NO: 1651 - DNA, 1151 bp, Rattus norvegicus
  ref <308>: DATABASE ACCESSION NUMBER: EMBL / D12927
  ref <309>: DATABASE ENTRY DATE: 1998-12-04
cggaccgcggatctaggcggcggcggccgaggtccggccgggcggcgcaaccggcgcaatccgccgccaccgaggtagtgatgggcaaggaggaggagattgctcgtatcgcccggaggctggacaaaatggtgaccaggaagaacgcggagggagccatggatttgctgcgggagctgaagaatatgcctattacattgcacttgctccagtccacccgtgttgggatgtctgtcaacgctctgcggaagcagagttcagacgaggagctcattgcacttgccaagtccctcatcaagtcctggaagaagctcttggatgtttctgatggcaaatccagggatcaagggaggggcacacctttgcctacatcgtcctcaaaggatgcctcagggactacggatctcagctgcaagaaaccagacccacctaggacctcatccactccgaggatcaccacatttccccaagtgcccatcacctgtgatgctgtgcgaaacaaatgtcgtgagatgctgactttggccctgcaaactgaccacgaccacgtggctgttggtgtgagctgtgagcatctgtcatctcagatcgaggagtgcatcttcctggatgtgggaaacactgacatgaagtacaagaaccgtgttcggagccgaatctctaacctgaaagatgccaagaaccctggcctacgccggaatgtgttgtgtggtgccattacaccccagcagatagctgtgatgacatcagaggagatggccagtgacgagctgaaggagatccgcaaggctatgaccaaggaggccatccgagagcaccagatggcccgtacaggtggcacacagaccgacctgttcacctgcaacaagtgcaggaagaagaactgcacctacacgcaggtgcagacccgtagctctgatgagcccatgaccacctatgttgtctgcaatgagtgtgggaatcgatggaagttctgctgagtccttgtactgatgtagccctggccatggctaaccctgaacctcctgcaacgctcttggtggacacagcttctctggagataccctgcaggtggcatgccccgttccagcctgcctggtgtgcacctgcctgccctttgcccctcatcattaaatgtttctttttgcctt

SEQ ID NO: 1652 - protein, 299 aa, Rattus norvegicus
  ref <308>: DATABASE ACCESSION NUMBER: SWISS-Prot / BAA02310
  ref <309>: DATABASE ENTRY DATE: 2003-02-01
MGKEEEIARIARRLDKMVTRKNAEGAMDLLRELKNMPITLHLLQSTRVGMSVNALRKQSSDEELIALAKSLIKSWKKLLDVSDGKSRDQGRGTPLPTSSSKDASGTTDLSCKKPDPPRTSSTPRITTFPQVPITCDAVRNKCREMLTLALQTDHDHVAVGVSCEHLSSQIEECIFLDVGNTDMKYKNRVRSRISNLKDAKNPGLRRNVLCGAITPQQIAVMTSEEMASDELKEIRKAMTKEAIREHQMARTGGTQTDLFTCNKCRKKNCTYTQVQTRSSDEPMTTYVVCNECGNRWKFC

SEQ ID NO: 1653 - DNA, 1204 bp, Homo sapiens
  ref <308>: DATABASE ACCESSION NUMBER: Refseq / NM_003195
  ref <309>: DATABASE ENTRY DATE: 2002-05-14
ggcacgagggtcggctgcggcgggtgtgggaggtggcgacggccggggccggggtcctgcccggctgcggaggcgggcgcgacgggcgcgggggtcgctgctcctgaggcgatgatgggcaaggaagaggagattgcgcggatcgcccggaggctggacaagatggtgaccaagaagagcgcggagggagccatggatttgctgcgggagctgaaggccatgcctatcacgctgcacctgctccagtccacccgagtcgggatgtctgtcaacgcccttcggaagcagagctcggatgaggaggtcattgcactggccaagtctctcatcaagtcctggaagaagctcctggatgcttccgatgccaaagccagggagcgggggaggggcatgcctctgcccacgtcctcgagggatgcctcagaggccccggatcccagccgcaagaggccggagctgcccagggcaccgtcgactccgaggatcaccacatttcctccggtgcctgtcacctgtgatgccgtgcgcaacaagtgccgcgagatgctgaccgctgccctgcagacggaccatgaccacgtggccatcggtgcggactgcgagcgcctgtcggctcagatcgaggaatgcatcttccgggacgttggaaacacagacatgaagtataagaaccgtgtacggagtcgtatctccaacctgaaggatgccaagaaccctgacctgcggcggaatgtgctgtgtggggccataacaccccagcagatcgctgtgatgacctcagaggagatggccagtgatgagctgaaggagatccgtaaggccatgaccaaggaggccatccgagagcaccagatggcccgcactggcggcacgcagacagacctgttcacctgcggcaagtgcaggaaaaagaactgcacctacacacaggtgcagacccgcagctctgatgagcccatgaccacctttgttgtctgcaacgagtgtggaaaccgctggaagttctgctgacccctcgtgtagatgtgctgcagccttgggccctccccggcccacgtcctccgttgacacagcttctctggagaccctagaaggcggcatgtcctgccctcaacctgcctgcctggattgcacctttctgccctttccccctcattattaaatgtttctttttgccaaaaaaaacaaaaaaaaaaaaaaaaaa

SEQ ID NO: 1654 - protein, 299 aa, Homo sapiens
  ref <308>: DATABASE ACCESSION NUMBER: Refseq / NP_003186
  ref <309>: DATABASE ENTRY DATE: 2002-05-14
MMGKEEEIARIARRLDKMVTKKSAEGAMDLLRELKAMPITLHLLQSTRVGMSVNALRKQSSDEEVIALAKSLIKSWKKLLDASDAKARERGRGMPLPTSSRDASEAPDPSRKRPELPRAPSTPRITTFPPVPVTCDAVRNKCREMLTAALQTDHDHVAIGADCERLSAQIEECIFRDVGNTDMKYKNRVRSRISNLKDAKNPDLRRNVLCGAITPQQIAVMTSEEMASDELKEIRKAMTKEAIREHQMARTGGTQTDLFTCGKCRKKNCTYTQVQTRSSDEPMTTFVVCNECGNRWKFC

SEQ ID NO: 1655 - DNA, 481 bp, Rattus norvegicus
  ref <308>: DATABASE ACCESSION NUMBER: EMBL / D13122
  ref <309>: DATABASE ENTRY DATE: 1999-02-01
caaccacgcccgcaacggagctgagcaacgccgaagataatggcaggctcggcgttggcggttcgggctcggctcggtgtctggggtatgagggtcctgcaaacccgaggcttcggctcggactcgtcggagagcatggattcgggcgctggctccatccgagaagctggtggggccttcgggaaacgagagaaggctgaagaggatcggtacttccgagagaagactagagagcagctggctgccttgaagaagcaccatgaagatgagattgaccaccattcgaaggagatagagcgtctgcaaaaacagatcgaacggcataagaagaagattaaatacctaaagaatagtgagcattgagtgcacacagtcagtctctcacagagtggccagtatcattccccacttctatagagattgttttgaatgattgatgtttgacctgtgtgctactaacagataataaattatcaccagg

SEQ ID NO: 1656 - protein, 107 aa, Rattus norvegicus
  ref <308>: DATABASE ACCESSION NUMBER: SWISS-Prot / Q03344
  ref <309>: DATABASE ENTRY DATE: 2001-10-16
MAGSALAVRARLGVWGMRVLQTRGFGSDSSESMDSGAGSIREAGGAFGKREKAEEDRYFREKTREQLAALKKHHEDEIDHHSKEIERLQKQIERHKKKIKYLKNSEH

SEQ ID NO: 1657 - DNA, 515 bp, Homo sapiens
  ref <308>: DATABASE ACCESSION NUMBER: Refseq / NM_016311
  ref <309>: DATABASE ENTRY DATE: 2002-11-04
cgagagactgcttgctgcggcagagacgccagaggtgcagctccagcagcaatggcagtgacggcgttggcggcgcggacgtggcttggcgtgtggggcgtgaggaccatgcaagcccgaggcttcggctcggatcagtccgagaatgtcgaccggggcgcgggctccatccgggaagccggtggggccttcggaaagagagagcaggctgaagaggaacgatatttccgagcacagagtagagaacaactggcagctttgaaaaaacaccatgaagaagaaatcgttcatcataagaaggagattgagcgtctgcagaaagaaattgagcgccataagcagaagatcaaaatgctaaaacatgatgattaagtgcacaccgtgtgccatagaatggcacatgtcattgcccacttctgtgtagacatggttctggtttaactaatatttgtctgtgtgctactaacagattataataaattgtcatcagtgaaaaaaaaaaaaaaaaaaaaaaa

SEQ ID NO: 1658 - protein, 106 aa, Homo sapiens
  ref <308>: DATABASE ACCESSION NUMBER: SWISS-Prot / Q9UII2
  ref <309>: DATABASE ENTRY DATE: 2002-06-15
MAVTALAARTWLGVWGVRTMQARGFGSDQSENVDRGAGSIREAGGAFGKREQAEEERYFRAQSREQLAALKKHHEEEIVHHKKEIERLQKEIERHKQKIKMLKHDD

SEQ ID NO: 1659 - DNA, 481 bp, Rattus norvegicus; identical to SEQ ID NO: 1655
  ref <308>: DATABASE ACCESSION NUMBER: EMBL / D13122
  ref <309>: DATABASE ENTRY DATE: 1999-02-01

SEQ ID NO: 1660 - protein, 107 aa, Rattus norvegicus; identical to SEQ ID NO: 1656
  ref <308>: DATABASE ACCESSION NUMBER: SWISS-Prot / Q03344
  ref <309>: DATABASE ENTRY DATE: 2001-10-16

SEQ ID NO: 1661 - DNA, 515 bp, Homo sapiens; identical to SEQ ID NO: 1657
  ref <308>: DATABASE ACCESSION NUMBER: Refseq / NM_016311
  ref <309>: DATABASE ENTRY DATE: 2002-11-04

SEQ ID NO: 1662 - protein, 106 aa, Homo sapiens; identical to SEQ ID NO: 1658
  ref <308>: DATABASE ACCESSION NUMBER: SWISS-Prot / Q9UII2
  ref <309>: DATABASE ENTRY DATE: 2002-06-15

SEQ ID NO: 1663 - DNA, 481 bp, Rattus norvegicus; identical to SEQ ID NO: 1655
  ref <308>: DATABASE ACCESSION NUMBER: EMBL / D13122
  ref <309>: DATABASE ENTRY DATE: 1999-02-01

SEQ ID NO: 1664 - protein, 107 aa, Rattus norvegicus; identical to SEQ ID NO: 1656
  ref <308>: DATABASE ACCESSION NUMBER: SWISS-Prot / Q03344
  ref <309>: DATABASE ENTRY DATE: 2001-10-16

SEQ ID NO: 1665 - DNA, 515 bp, Homo sapiens; identical to SEQ ID NO: 1657
  ref <308>: DATABASE ACCESSION NUMBER: Refseq / NM_016311
  ref <309>: DATABASE ENTRY DATE: 2002-11-04

SEQ ID NO: 1666 - protein, 106 aa, Homo sapiens; identical to SEQ ID NO: 1658
  ref <308>: DATABASE ACCESSION NUMBER: SWISS-Prot / Q9UII2
  ref <309>: DATABASE ENTRY DATE: 2002-06-15

SEQ ID NO: 1667 - DNA, 481 bp, Rattus norvegicus; identical to SEQ ID NO: 1655
  ref <308>: DATABASE ACCESSION NUMBER: EMBL / D13122
  ref <309>: DATABASE ENTRY DATE: 1999-02-01

SEQ ID NO: 1668 - protein, 107 aa, Rattus norvegicus; identical to SEQ ID NO: 1656
  ref <308>: DATABASE ACCESSION NUMBER: SWISS-Prot / Q03344
  ref <309>: DATABASE ENTRY DATE: 2001-10-16

SEQ ID NO: 1669 - DNA, 515 bp, Homo sapiens; identical to SEQ ID NO: 1657
  ref <308>: DATABASE ACCESSION NUMBER: Refseq / NM_016311
  ref <309>: DATABASE ENTRY DATE: 2002-11-04

SEQ ID NO: 1670 - protein, 106 aa, Homo sapiens; identical to SEQ ID NO: 1658
  ref <308>: DATABASE ACCESSION NUMBER: SWISS-Prot / Q9UII2
  ref <309>: DATABASE ENTRY DATE: 2002-06-15

SEQ ID NO: 1671 - DNA, 1015 bp, Rattus norvegicus
  ref <308>: DATABASE ACCESSION NUMBER: EMBL / D13126
  ref <309>: DATABASE ENTRY DATE: 1999-09-09
cgctacacctcgctctctcctgggccggcggatccttttgtctctccaagcggtgaaggtcgcagagtcggcgcggcggttgcgggcgcactgacgcccgttctattggttatctccccagcctcagccaccgccgaacttgagctcgagaagccagcggatcgcgtccagttccggagccggggcatggtctagcagctcagtcaagcctgtgcatcatctgatccccagcagttctggtcccccttggcctctacttggctctaggtttagtctccactgccagctgccatgggcaagcagaacagcaaactgcggcctgaggtgctgcaggacctgcgggaacacacagagttcactgaccatgagctgcaggagtggtataagggcttcctcaaggactgtcccaccggccacttgacagtggacgaattcaagaagatctacgccaacttcttcccctatggcgacgcctctaagtttgccgaacacgtcttccgcacctttgacaccaacagcgatggcaccatcgacttccgggagttcatcatcgcactgagcgtgacctctcggggcaagctggagcagaagctcaagtgggccttcagcatgtacgacctggacggcaacggctacatcagccgcagtgaaatgctggagattgtgcaggccatctacaagatggtgtcctccgtgatgaagatgcccgaggatgagtccacacccgagaagcgaacagacaagatcttcaggcagatggacacaaacaatgatggcaaactgtccctggaagaattcatcaaaggtgccaagagcgacccgtccattgtccggttgctgcagtgtgaccccagcagtgctagccagttctgaggggaacgggcttttggacagttgtgagaaacacaggcttgacctgccatcttcagctttgcttgcaaaagtggattcctccgtgatctctcctgctctcccaggacctgggccaggcagcacatcacacccacccgacctg

SEQ ID NO: 1672 - protein, 192 aa, Rattus norvegicus
  ref <308>: DATABASE ACCESSION NUMBER: SWISS-Prot / P35333
  ref <309>: DATABASE ENTRY DATE: 2002-06-15
GKQNSKLRPEVLQDLREHTEFTDHELQEWYKGFLKDCPTGHLTVDEFKKIYANFFPYGDASKFAEHVFRTFDTNSDGTIDFREFIIALSVTSRGKLEQKLKWAFSMYDLDGNGYISRSEMLEIVQAIYKMVSSVMKMPEDESTPEKRTDKIFRQMDTNNDGKLSLEEFIKGAKSDPSIVRLLQCDPSSASQF

SEQ ID NO: 1673 - DNA, 1769 bp, Homo sapiens
  ref <308>: DATABASE ACCESSION NUMBER: Refseq / NM_002149
  ref <309>: DATABASE ENTRY DATE: 2002-11-05
cggcggcggcgggcagcggacgggcggactgacgggcgcctccaccttgctccctccctggctgccggcttccttttgtctttctgggcggcgatgagcgcagggccggcgcagcagctgcgggcgcacggaggcccgcgctgctagtcactcctcccggcctcggcgcgcttgtcccgggcagcggcccgggcccgctgcagccgccgccggcgccgaacttgggctcgggaagccggcggaccgcgtcctgcgccggagcaggggcatggtctagtggcccagtcaggacgcggaaacactccctggaggttctgacccactccctctcagcctccgcctggtctctggtgtagtcgccgccgccagccgccatgggcaaacagaacagcaagctgcggcccgaggtgctgcaggacctgcgggagaacacggagttcaccgaccacgagctgcaggagtggtacaagggcttcctcaaggactgccccaccggccacctgaccgtggacgagttcaagaagatctacgccaacttcttcccctacggcgacgcttccaagttcgccgagcacgtcttccgcaccttcgacaccaacggcgacggcaccatcgacttccgggagttcatcattgcgctgagcgtgacctcgcggggcaagctggagcagaagctcaagtgggccttcagcatgtacgacctggacggcaacggctacatcagccgcagcgagatgctggagatcgtgcaggccatctacaagatggtgtcgtctgtgatgaagatgccggaggatgagtccaccccggagaagcgcacagacaagatcttcaggcagatggacaccaacaatgacggcaaactgtccttggaagaattcatcagaggtgccaagagcgacccctccatcgtccgcctgctgcagtgcgaccccagcagtgccagtcagttctgagcgagcggcccctggacagttgcagagaaacacaggcttgtcgtgccgtttaagctttgcttgcaagagtggatgccccgcaatcgttcctgctctcccgggccccgggcctggggcatgcgttgcacctgcccggcccggtggctgcgcctccctcctccacctgaccaacgcgacattcctcccctcacgcctggcccggtcccttccagggcaactcccagggatgtggtgacatgcagggttcaagtgttcttggttccaggcacctcccggctcacggggagctcagaggtccatgccgaggagaccaggcaggacctcccgaggctgcgccccggccggcccatgcgttttgtgatcccaagtgactctgtgggaagggtggggacgaggcgtcgggagggtatacagggagcccctcccgtgcatggctgcccccccgttcattttctccaccacagccgcttgcacgtatagatactgtggtcccctttcttttaatatataaattatgtatggtgaagtggagtgtattgtgtaggtcccgtatttaatgcctctgactgcctttgaagcgcagccctctgtggcccgcagccccctgagcctggctgttgtgtggtatttatgctctctttgtctgcctgtttctaaggaaatgcatgtgtgccctgagccgtgatgatcctcccatccgtgttgtgagcacaggcatttgtgtctggtctgtcctccctgttgattggtctggcatttccggtattaaaatgataaaataaatggcattttctgaaaaaaaaaaaaaaaaaa

SEQ ID NO: 1674 - protein, 192 aa, Homo sapiens
  ref <308>: DATABASE ACCESSION NUMBER: SWISS-Prot / P37235
  ref <309>: DATABASE ENTRY DATE: 2002-06-15
GKQNSKLRPEVLQDLRENTEFTDHELQEWYKGFLKDCPTGHLTVDEFKKIYANFFPYGDASKFAEHVFRTFDTNGDGTIDFREFIIALSVTSRGKLEQKLKWAFSMYDLDGNGYISRSEMLEIVQAIYKMVSSVMKMPEDESTPEKRTDKIFRQMDTNNDGKLSLEEFIRGAKSDPSIVRLLQCDPSSASQF

SEQ ID NO: 1675 - DNA, 707 bp, Rattus norvegicus
  ref <308>: DATABASE ACCESSION NUMBER: EMBL / D13127
  ref <309>: DATABASE ENTRY DATE: 1999-02-01
aaagatggccgcaccagcaacatccgtgctgtcccgacaggtgcggagtttcagcacatctgtggtcaggcccttttcgaagcttgtaaggccccctgtccaggtctacggcatcgaaggccgctatgcaaccgccctgtactctgctgcgtctaagcagaaaaggctggaccaggtggaaaaggagttgctgcgagtggggcaactcttgaaggaccccaaggtgtcccttgctgttctgaacccctacattaagcgctccatcaaagtgaaaagcctgaaggacatcactacaaaggaaaaattctctccgctgacggccaacctcatgaatttacttgctgaaaatggtcgcctaggcaacacccagggcgtcatctctgccttctccaccatcatgagtgtccaccgtggagaagtgccgtgcacagtgaccacagcgtttcctttagatgaagctgttctctctgagttaaagacagtgctgaatagcttcctgagtaaaggccagatactgaacctggaggtcaagactgacccatcaatcatgggtgggatgattgtccgaattggagagaaatacgttgatatgtctgcaaagagcaagattcagaagctcagcaaggccatgcgggatctgctctgagagactgtcacctgtgtgagcgcttgtctttggagcacaataaaatgcttcctgaacagag

SEQ ID NO: 1676 - protein, 213 aa, Rattus norvegicus
  ref <308>: DATABASE ACCESSION NUMBER: SWISS-Prot / Q06647
  ref <309>: DATABASE ENTRY DATE: 2002-06-15
MAAPATSVLSRQVRSFSTSVVRPFSKLVRPPVQVYGIEGRYATALYSAASKQKRLDQVEKELLRVGQLLKDPKVSLAVLNPYIKRSIKVKSLKDITTKEKFSPLTANLMNLLAENGRLGNTQGVISAFSTIMSVHRGEVPCTVTTAFPLDEAVLSELKTVLNSFLSKGQILNLEVKTDPSIMGGMIVRIGEKYVDMSAKSKIQKLSKAMRDLL

SEQ ID NO: 1677 - DNA, 386 bp, Homo sapiens
  ref <308>: DATABASE ACCESSION NUMBER: EMBL / AW449493
  ref <309>: DATABASE ENTRY DATE: 2000-02-20
tttttttttttttttttcaggaagcattttattgttgctccaaggacaagagctcacacaggtgacagtctctcagagcatctcccgcatggccttgctgagcttctgaatcttgctctttgcagacatatcaacgtacttttccccaattcggacaatcatcccgcccatgattgacgggtcagtcttgatctccagtttcagtatttggtttggactcaggaagctcttcagcaccgtctttaactcagagagaacagcgtcatctagaggagatgctgtggtcactgtgcacggcacttctccgcggtggacactcatgatggtggaaaaggcagagatgataccctgggtgttgcctaggcgaccattttcagcaagtaaat

SEQ ID NO: 1678 - protein, 213 aa, Homo sapiens
  ref <308>: DATABASE ACCESSION NUMBER: SWISS-Prot / CAA58219
  ref <309>: DATABASE ENTRY DATE: 2002-06-15
MAAPAVSGLSRQVRCFSTSVVRPFAKLVRPPVQVYGIEGRYATALYSAASKQNKLEQVEKELLRVAQILKEPKVAASVLNPYVKRSIKVKSLNDITAKERFSPLTTNLINLLAENGRLSNTQGVVSAFSTMMSVHRGEVPCTVTSASPLEEATLSELKTVLKSFLSQGQVLKLEAKTDPSILGGMIVRIGEKYVDMSVKTKIQKLGRAMREIV

SEQ ID NO: 1679 - DNA, 707 bp, Rattus norvegicus; identical to SEQ ID NO: 1675
  ref <308>: DATABASE ACCESSION NUMBER: EMBL / D13127
  ref <309>: DATABASE ENTRY DATE: 1999-02-01

SEQ ID NO: 1680 - protein, 213 aa, Rattus norvegicus; identical to SEQ ID NO: 1676
  ref <308>: DATABASE ACCESSION NUMBER: SWISS-Prot / Q06647
  ref <309>: DATABASE ENTRY DATE: 2002-06-15

SEQ ID NO: 1681 - DNA, 386 bp, Homo sapiens; identical to SEQ ID NO: 1677
  ref <308>: DATABASE ACCESSION NUMBER: EMBL / AW449493
  ref <309>: DATABASE ENTRY DATE: 2000-02-20

SEQ ID NO: 1682 - protein, 213 aa, Homo sapiens; identical to SEQ ID NO: 1678
  ref <308>: DATABASE ACCESSION NUMBER: SWISS-Prot / CAA58219
  ref <309>: DATABASE ENTRY DATE: 2002-06-15

SEQ ID NO: 1683 - DNA, 1570 bp, Rattus norvegicus
  ref <308>: DATABASE ACCESSION NUMBER: EMBL / D13907
  ref <309>: DATABASE ENTRY DATE: 1999-09-02
gcggcggctgtatcccggacgttgttgccggtggccggacggcgcctgtggggatttacgcgaaggcttccgctccgcgccgccgctgctcagccattgtactttggaggggaccgactcagaagtacacaggctgctccacaagttgttctgaatgttcctgagacacaagtcacttgtttggaaaatggactcagggtagcttctgaaaactctgggatctcaacatgcaccgttgggctgtggatcgatgctggcagtcggtatgagaatgaaaagaacaatggcaccgctcactttctggagcacatggctttcaagggcactaaaaagaggtcccagttagaccttgaacttgagattgagaacatgggtgcccatctcaatgcctatacctccagagagcagactgtctactacgccaaagccttctccaaagatttgccaagagctgtagaaattcttgctgacataattcagaacagtacattgagagaggcagagattgaacgtgagcgtggagtcatcctcagagaaatgcaggaagttgagaccaacttgcaagaagttgtctttgattatctgcacgccacagcctatcaaaacaccgcgctcggacggacaattctgggaccaaccgagaacatcaaatctataagccgtaaggacttagtggactacataaccacacattataagggaccaagaatcgtgctggctgctgctggaggtgtttgccataacgaactgctggagttagcgaagtttcattttggtgactctttgtgcgcacacaaaggagatgtaccagctctgcctccctgtaaattcactggaagcgagattcgggtgagggatgacaagatgccactggcgcacctcgcagtggctattgaagcagttggttggacgcacccagacacgatctgtctcatggtcgcaaacacactgataggcaactgggaccgctctttcggaggaggaatgaatttatcgagcaagctggcccagctcacgtgccatggcaatctctgccacagcttccagtccttcaacacctcctacacagacacaggattgtgggggctctatatggtttgtgaacaagccacagttgctgacatgctgcacgctgtacaaaaggaatggatgcgtctgtgcacagctgttagtgagagtgaggtcgcacgcgccaaaaaccttctcaagacaaacatgctgctgcagcttgatgggtcaactccgatctgtgaagacatcggtaggcagatgctatgctacaacaggagaatccccatccctgagcttgaggccaggatcgatgctgtggacgcggagatggttcgagaagtgtgcaccaagtacatttatggcaaaagcccggccattgctgctctcggtcctattgagcgcttaccagattttaaccagatttgtagtaacatgcgctggactcgtgactgatttttgtgatgaattatcctacacatacatatttataaaactgagacctagaagttttgaaagactgctcatcttcaagtgaaaaaataaaaactttatttgaaac

SEQ ID NO: 1684 - protein, 489 aa, Rattus norvegicus
  ref <308>: DATABASE ACCESSION NUMBER: SWISS-Prot / Q03346
  ref <309>: DATABASE ENTRY DATE: 2002-06-15
MAAAAVSRTLLPVAGRRLWGFTRRLPLRAAAAQPLYFGGDRLRSTQAAPQVVLNVPETQVTCLENGLRVASENSGISTCTVGLWIDAGSRYENEKNNGTAHFLEHMAFKGTKKRSQLDLELEIENMGAHLNAYTSREQTVYYAKAFSKDLPRAVEILADIIQNSTLGEAEIERERGVILREMQEVETNLQEVVFDYLHATAYQNTALGRTILGPTENIKSISRKDLVDYITTHYKGPRIVLAAAGGVCHNELLELAKFHFGDSLCAHKGDVPALPPCKFTGSEIRVRDDKMPLAHLAVAIEAVGWTHPDTIRLMVANTLIGNWDRSFGGGMNLSSKLAQLTCHGNLCHSFQSFNTSYTDTGLWGLYMVCEQATVADMLHAVQKEWMRLCTAVSESEVARAKNLLKTNMLLQLDGSTPICEDIGRQMLCYNRRIPIPELEARIDAVDAEMVREVCTKYIYGKSPAIAALGPIERLPDFNQICSNMRWTRD

SEQ ID NO: 1685 - DNA, 1771 bp, Homo sapiens
  ref <308>: DATABASE ACCESSION NUMBER: EMBL / AF054182
  ref <309>: DATABASE ENTRY DATE: 2001-06-01
gttcgtagcagaaatggcggctgcggcggctcgagtggtgttgtcatccgcggcgcgaggcggcctctggggtttcagcgagagtcttctaatccgaggcgctgcgggacggtcattatattttggagagaacagattaagaagtacacaggctgctacccaagttgttctgaatgttcctgaaacaagagtaacatgtttagaaagtggactcagagtagcttcggaagactctgggctctcaacatgcacagttggactctggattgatgctggaagtagatacgaaaatgagaagaacaatggaacagcacactttctggagcatatggctttcaagggcaccaagaagagatcccagttagatctggaacttgagattgaaaatatgggtgctcatctcaatgcctatacctccagagagcagactgtatactatgccaaagcattctctaaagacttgccaagagctgtagaaattcttgctgatataatacaaaacagcacattgggagaagcagagattgaacgtgagcgtggagtaatccttagagagatgcaggaagttgaaaccaatttacaagaagttgtttttgattatcttcatgccacagcttatcaaaatactgcacttggacggacaattttgggaccaactgaaaatatcaaatctataagtcgtaaggacttagtggattatataaccacacattataaggggccaagaatagtgcttgctgctgctggaggtgtttcccatgatgaattgcttgacttagcaaagtttcatttcggtgactctttatgcacacacaaaggagaaataccagctctgcctccctgcaaattcacaggaagtgagattcgtgtgagggatgacaagatgcctttggcgcaccttgcaatagctgttgaagctgttggttgggcacatccagatacaatctgtctcatggttgcaaacacgctgattggcaactgggatcgctcttttgggggaggaatgaatttatctagcaagctggcccagctcacttgtcatggcaatctttgccatagctttcagtctttcaacacttcctacacagatacaggattatggggactgtatatggtttgtgaatcatccactgttgcagacatgctacatgttgttcaaaaagaatggatgcgactctgtacaagtgtcacagaaagtgaggttgcacgagccagaaatcttctgaaaacaaacatgttgttgcagcttgatggttcaactccaatttgtgaagatattggtaggcaaatgttatgctataatagaaggattcccatccctgagcttgaagcaagaattgatgctgtgaatgctgagacaattcgagaagtatgtaccaaatacatttataataggagtccagctattgctgctgttggtcccattaagcaactaccagattttaaacagatacgcagtaacatgtgttggcttcgtgattaaaatgctcctaatcaagattgtttgaacacatgtatttataaaacagagctagagaaaaataaaaatgaacatgtatatacatttggaaatttgaattaaatactgtatcatactttcaaaggataaaaagactacccctctgaaggttgttttgtattaatggtcagtctttgttctctgagaaattatgttggaagcagcatactttcaaattattaccatgagtataattttaagaatgaaaatgtttacagtattttcagttttattataaaaatgcacacacaa

SEQ ID NO: 1686 - protein, 489 aa, Homo sapiens
  ref <308>: DATABASE ACCESSION NUMBER: SWISS-Prot / O75439
  ref <309>: DATABASE ENTRY DATE: 2002-06-15
MAAAAARVVLSSAARGGLWGFSESLLIRGAAGRSLYFGENRLRSTQAATQVVLNVPETRVTCLESGLRVASEDSGLSTCTVGLWIDAGSRYENEKNNGTAHFLEHMAFKGTKKRSQLDLELEIENMGAHLNAYTSREQTVYYAKAFSKDLPRAVEILADIIQNSTLGEAEIERERGVILREMQEVETNLQEVVFDYLHATAYQNTALGRTILGPTENIKSISRKDLVDYITTHYKGPRIVLAAAGGVSHDELLDLAKFHFGDSLCTHKGEIPALPPCKFTGSEIRVRDDKMPLAHLAIAVEAVGWAHPDTICLMVANTLIGNWDRSFGGGMNLSSKLAQLTCHGNLCHSFQSFNTSYTDTGLWGLYMVCESSTVADMLHVVQKEWMRLCTSVTESEVARARNLLKTNMLLQLDGSTPICEDIGRQMLCYNRRIPIPELEARIDAVNAETIREVCTKYIYNRSPAIAAVGPIKQLPDFKQIRSNMCWLRD

SEQ ID NO: 1687 - DNA, 1570 bp, Rattus norvegicus; identical to SEQ ID NO: 1683
  ref <308>: DATABASE ACCESSION NUMBER: EMBL / D13907
  ref <309>: DATABASE ENTRY DATE: 1999-09-02

SEQ ID NO: 1688 - protein, 489 aa, Rattus norvegicus; identical to SEQ ID NO: 1684
  ref <308>: DATABASE ACCESSION NUMBER: SWISS-Prot / Q03346
  ref <309>: DATABASE ENTRY DATE: 2002-06-15

SEQ ID NO: 1689 - DNA, 1771 bp, Homo sapiens; identical to SEQ ID NO: 1685
  ref <308>: DATABASE ACCESSION NUMBER: EMBL / AF054182
  ref <309>: DATABASE ENTRY DATE: 2001-06-01

SEQ ID NO: 1690 - protein, 489 aa, Homo sapiens; identical to SEQ ID NO: 1686
  ref <308>: DATABASE ACCESSION NUMBER: SWISS-Prot / O75439
  ref <309>: DATABASE ENTRY DATE: 2002-06-15

SEQ ID NO: 1691 - DNA, 1570 bp, Rattus norvegicus; identical to SEQ ID NO: 1683
  ref <308>: DATABASE ACCESSION NUMBER: EMBL / D13907
  ref <309>: DATABASE ENTRY DATE: 1999-09-02

SEQ ID NO: 1692 - protein, 489 aa, Rattus norvegicus; identical to SEQ ID NO: 1684
  ref <308>: DATABASE ACCESSION NUMBER: SWISS-Prot / Q03346
  ref <309>: DATABASE ENTRY DATE: 2002-06-15

SEQ ID NO: 1693 - DNA, 1771 bp, Homo sapiens; identical to SEQ ID NO: 1685
  ref <308>: DATABASE ACCESSION NUMBER: EMBL / AF054182
  ref <309>: DATABASE ENTRY DATE: 2001-06-01

SEQ ID NO: 1694 - protein, 489 aa, Homo sapiens; identical to SEQ ID NO: 1686
  ref <308>: DATABASE ACCESSION NUMBER: SWISS-Prot / O75439
  ref <309>: DATABASE ENTRY DATE: 2002-06-15

SEQ ID NO: 1695 - DNA, 1570 bp, Rattus norvegicus; identical to SEQ ID NO: 1683
  ref <308>: DATABASE ACCESSION NUMBER: EMBL / D13907
  ref <309>: DATABASE ENTRY DATE: 1999-09-02

SEQ ID NO: 1696 - protein, 489 aa, Rattus norvegicus; identical to SEQ ID NO: 1684
  ref <308>: DATABASE ACCESSION NUMBER: SWISS-Prot / Q03346
  ref <309>: DATABASE ENTRY DATE: 2002-06-15

SEQ ID NO: 1697 - DNA, 1771 bp, Homo sapiens; identical to SEQ ID NO: 1685
  ref <308>: DATABASE ACCESSION NUMBER: EMBL / AF054182
  ref <309>: DATABASE ENTRY DATE: 2001-06-01

SEQ ID NO: 1698 - protein, 489 aa, Homo sapiens; identical to SEQ ID NO: 1686
  ref <308>: DATABASE ACCESSION NUMBER: SWISS-Prot / O75439
  ref <309>: DATABASE ENTRY DATE: 2002-06-15

SEQ ID NO: 1699 - DNA, 1673 bp, Rattus norvegicus
  ref <308>: DATABASE ACCESSION NUMBER: EMBL / D13962
  ref <309>: DATABASE ENTRY DATE: 2000-04-27
ggcttaaggaaacttgctgcggaggaaagacattggctggacacctctagatctaccttaagacttgagagctaggttgggaccatggggacagcgaaggtgaccccatctctggtgttcgctgttactgttgccacaatcggttctttccagtttggctacaacaccggagtcatcaatgcgcctgagacaatcattaaggactttcttaactacacgttggaagagcggttggaagacctaccaagggaggggctgctgaccacgctctggtcgttatgtgtggccatcttctccgttgggggcatgattggctctttttctgtcggactctttgtcaaccgctttggcagacgcaactccatgcttctagtcaacctgattgccatccttgggggttgccttatgggcttcgccaagatagcggagtcggttgaaatgctgatcctgggccgcctgattattggcatcttctgtggtctgtgcacgggctttgtgccgatgtacattggagaggtgtctcccactgccctacggggtgcatttggcacgctaaaccagctgggcatcgttgttgggatccttgtggctcaggtctttggtttggactttattctgggctctgaggagctgtggcctggactactgggcttaaccatcattccagctatcctacagagcgcagcccttccgttttgccccgagagtccaaggttcttgctcattaacagaaaggaggaagaccaagcaacggagatcctccagcggttgtggggcaccccggatgtgatccaggagatccaggagatgaaagacgagagtatcaggatgtcacaggagaagcaggtcactgtgctggagctcttcaagtctcctagctacttccagccccttctcatctccgttgtcctccagttgtctcagcagttctctgggatcaatgctgtgttctattactcgacgggaatcttccaggatgcgggtgtccaggagcccatctatgccacgattggagcgggtgtggtcaacactatcttcactgtagtctctctgttcctggtggagcgggcaggaaggagaaccctgcacatgataggcctgggaggcatggctgtttgctccgttttcatgacgatttctctgttactgaaggatgaatatgaagccatgagctttgtctgtattgtggctatcttggtctacgtggccttctttgagattggccctggccccattccctggtttattgtggctgaactcttcagccagggcccccgaccagctgccatggctgtggctggctgttctaactggacctccaactttttggtgggaatgttcttcccctcggctgcggcctacttgggagcctacgtttttatcatcttcgctgccttcctcgttttcttcctaatcttcacctccttcaaagtcccagagaccaaaggcaggactttcgaggatattacccgggccttcgaggggcaggcgcactctgggaaaggctctgctggtgtggagttgaacagcatgcagcctgtcaaggagacccctggcaatgcctgagccggacctcctccctcacctccctccactgtggaaagccaacctcccctgaagtggcgagacctcatcaggatgaaccaggactgcttctgagcgctcgtatcaca

SEQ ID NO: 1700 - protein, 493 aa, Rattus norvegicus
  ref <308>: DATABASE ACCESSION NUMBER: SWISS-Prot / Q07647
  ref <309>: DATABASE ENTRY DATE: 2002-06-15
MGTAKVTPSLVFAVTVATIGSFQFGYNTGVINAPETIIKDFLNYTLEERLEDLPREGLLTTLWSLCVAIFSVGGMIGSFSVGLFVNRFGRRNSMLLVNLIAILGGCLMGFAKIAESVEMLILGRLIIGIFCGLCTGFVPMYIGEVSPTALRGAFGTLNQLGIVVGILVAQVFGLDFILGSEELWPGLLGLTIIPAILQSAALPFCPESPRFLLINRKEEDQATEILQRLWGTPDVIQEIQEMKDESIRMSQEKQVTVLELFKSPSYFQPLLISVVLQLSQQFSGINAVFYYSTGIFQDAGVQEPIYATIGAGVVNTIFTVVSLFLVERAGRRTLHMIGLGGMAVCSVFMTISLLLKDEYEAMSFVCIVAILVYVAFFEIGPGPIPWFIVAELFSQGPRPAAMAVAGCSNWTSNFLVGMFFPSAAAYLGAYVFIIFAAFLVFFLIFTSFKVPETKGRTFEDITRAFEGQAHSGKGSAGVELNSMQPVKETPGNA

SEQ ID NO: 1701 - DNA, 3915 bp, Homo sapiens
  ref <308>: DATABASE ACCESSION NUMBER: EMBL / M20681
  ref <309>: DATABASE ENTRY DATE: 1999-07-02
gtggggtggggtggggctgggggcttgtcgccctttcaggctccaccctttgcggagattataaatagtcatgatcccagcgagacccagagatgcctgtaatggtgagactttggatccttcctgaggacgtggagaaaactttctgctgagaaggacattttgaaggttttgttggctgaaaaagctgtttctggaatcacccctagatctttcttgaagacttgaattagattacagcgatggggacacagaaggtcaccccagctctgatatttgccatcacagttgctacaatcggctctttccaatttggctacaacactggggtcatcaatgctcctgagaagatcataaaggaatttatcaataaaactttgacggacaagggaaatgccccaccctctgaggtgctgctcacgtctctctggtccttgtctgtggccatattttccgtcgggggtatgatcggctccttttccgtcggactcttcgtcaaccgctttggcaggcgcaattcaatgctgattgtcaacctgttggctgtcactggtggctgctttatgggactgtgtaaagtagctaagtcggttgaaatgctgatcctgggtcgcttggttattggcctcttctgcggactctgcacaggttttgtgcccatgtacattggagagatctcgcctactgccctgcggggtgcctttggcactctcaaccagctgggcatcgttgttggaattctggtggcccagatctttggtctggaattcatccttgggtctgaagagctatggccgctgctactgggttttaccatccttcctgctatcctacaaagtgcagcccttccattttgccctgaaagtcccagatttttgctcattaacagaaaagaagaggagaatgctaagcagatcctccagcggttgtggggcacccaggatgtatcccaagacatccaggagatgaaagatgagagtgcaaggatgtcacaagaaaagcaagtcaccgtgctagagctctttagagtgtccagctaccgacagcccatcatcatttccattgtgctccagctctctcagcagctctctgggatcaatgctgtgttctattactcaacaggaatcttcaaggatgcaggtgttcaagagcccatctatgccaccatcggcgcgggtgtggttaatactatcttcactgtagtttctctatttctggtggaaagggcaggaagaaggactctgcatatgataggccttggagggatggctttttgttccacgctcatgactgtttctttgttattaaaggataactataatgggatgagctttgtctgtattggggctatcttggtctttgtagccttctttgaaattggaccaggccccattccctggtttattgtggccgaactcttcagccagggcccccgcccagctgcgatggcagtggccggctgctccaactggacctccaacttcctagtcggattgctcttcccctccgctgctcactatttaggagcctacgtttttattatcttcaccggcttcctcattaccttcttggcttttaccttcttcaaagtccctgagacccgtggcaggacttttgaggatatcacacgggcctttgaagggcaggcacacggtgcagatagatctggaaaggacggcgtcatggagatgaacagcatcgagcctgctaaggagaccaccaccaatgtctaagtcgtgcctccttccacctccctcccggcatgggaaagccacctctccctcaacaagggagagacctcatcaggatgaacccaggacgcttctgaatgctgctacttaattcctttctcatcccacgcactccatgagcaccccaaggctgcggtttgttggatcttcaatggctttttaaattttatttcctggacatcctcttctgcttaggagagaccgagtgaacctaccttcatttcaggagggattggccgcttggcacatgacaactttgccagcttttcctcccttgggttctgatattgccgcactaggggatataggagaggaaaagtaaggtgcagttcccccaacctcagacttaccaggaagcagatacatatgagtgtggaagccggagggtgtttatgtaagagcaccttcctcacttccatacagctctacgtggcaaattaacttgagttttatttattttatcctctggtttaattacataatttttttttttttactttaagtttcaggatacatgtgccgaatgtgcaggtttgttacataggtatatatatgccatgatggaaatatttatttttttaagcgtaattttgccaaataataaaaacagaaggaaattgagattagagggaggtgtttaaagagaggttatagagtagaagatttgatgctggagaggttaaggtgcaataagaatttagggagaaatgttgttcattattggagggtaaatgatgtggtgcctgaggtctgtacgttacctcttaacaatttctgtccttcagatggaaactctttaacttctcgtaaaagtcatatacctatataataaagctactgatttccttggagcttttttctttaagataatagtttacatgtagtagtacttgaaatctaggattattaactaatatgggcattgtagttaatgatggttgatgggttctaattttggatggagtccagggaagagaaagtgatttctagaaagcctgttcccctcactggatgaaataactccttcttgtagtagtctcattacttttgaagtaatcccgccacctatctcgtgggagagccatccaaataagaaacctaaaataattggttcttggtagagattcattatttttccactttgttctttaggagattttaggtgttgattttctgttgtattttaactcatacctttaaaggaattccccaaagaatgtttatagcaaacttggaatttgtaacctcagctctgggagaggatttttttctgagcgattattatctaaagtgtgttgttgctttaggctcacggcacgcttgcgtatgtctgttaccatgtcactgtggtcctatgccgaatgccctcaggggacttgaatctttccaataaaccaggtttagacagtatgagtcaatgtgcagtgtagcccacacttgagaggatgaatgtatgtgcactgtcactttgctctgggtggaagtacgttattgttgacttattttctctgtgtttgttcctacagcccctttttcatatgttgctcagtctccctttcccttcttggtgcttacacatctcagaccctttagccaaacccttgtcagtgacagtattttggttcttagttctcactgttccctctgctcctggagcctttgaataaaaatgcacgtagctgaggccggatgcggtggctcacgcctgtaatcccagcactttgggaggcctaggcgggcggtcaggggttcgagaccagtctggccaacatcgtgaaaccctgtctctactaaaaatgcaaaaattagccgggcgtggtggcgggcgcctgtaatcccagctacttgggaagctgaggcgggagaatcatgtgaacccgggacgcaggggttgcagtgagcggagatcgcatcattgcactctagcctgggccacagggcgagactccgtctcaaaaaaaaaaaaatgcacatagctatcgagtgtgctttagcttgaaaaggtgaccttgcaacttcatgtcaactttctggctcctcaaacagtaggttggcagtaaggcagggtcccatttctcactgagaagattgtgaatatttccatatggattttctattgttactctggttctttgttttaaaataaaaattctgaatgtacacg

SEQ ID NO: 1702 - protein, 496 aa, Homo sapiens
  ref <308>: DATABASE ACCESSION NUMBER: SWISS-Prot / P11169
  ref <309>: DATABASE ENTRY DATE: 2002-06-15
MGTQKVTPALIFAITVATIGSFQFGYNTGVINAPEKIIKEFINKTLTDKGNAPPSEVLLTSLWSLSVAIFSVGGMIGSFSVGLFVNRFGRRNSMLIVNLLAVTGGCFMGLCKVAKSVEMLILGRLVIGLFCGLCTGFVPMYIGEISPTALRGAFGTLNQLGIVVGILVAQIFGLEFILGSEELWPLLLGFTILPAILQSAALPFCPESPRFLLINRKEEENAKQILQRLWGTQDVSQDIQEMKDESARMSQEKQVTVLELFRVSSYRQPIIISIVLQLSQQLSGINAVFYYSTGIFKDAGVQEPIYATIGAGVVNTIFTVVSLFLVERAGRRTLHMIGLGGMAFCSTLMTVSLLLKDNYNGMSFVCIGAILVFVAFFEIGPGPIPWFIVAELFSQGPRPAAMAVAGCSNWTSNFLVGLLFPSAAHYLGAYVFIIFTGFLITFLAFTFFKVPETRGRTFEDITRAFEGQAHGADRSGKDGVMEMNSIEPAKETTTNV

SEQ ID NO: 1703 - DNA, 4418 bp, Rattus norvegicus
  ref <308>: DATABASE ACCESSION NUMBER: EMBL / D13963
  ref <309>: DATABASE ENTRY DATE: 2002-08-06
gaggcgactgagttgctggtgcgcgagtcaccaagtcaccaacttttcctgtgctctcggtgtctggccagattcccggagtgtcagcagagcacggggtgactccttcgtccaccggtgctcaagacctcccggtaactttctttcccgcagcccaggagcagatggggaggctcccggtgctgctgctatggctagcctggtggttgtcgcaggcaggcatagcctgcggtgccggctccgtgcgcctggccggtggcctgacgctgggcggactattcccagtgcacgcgcggggagccgcaggacgcgcgtgcggggcgctgaagaaagagcaaggcgtgcaccggctggaagcgatgctctacgcgctggaccgcgtcaacgctgacccggagctgctgcccggcgtgcggctgggcgcgcggctgctcgacacctgctcgcgggacacctacgctttggagcaggctctgagcttcgtgcaggcgctcatccgaggccgcggagacggcgacgaggccagtgtgcgctgccctgggggagttcccccgctgcgctccgcgcctccagagcgcgtggtggcggtggtgggagcctcggctagctccgtgtccatcatggtggccaacgtcttgcgcctgtttgcgataccccagatcagctatgcctccacagccccagagctcagtgactccacacgctatgacttcttctcccgagtggtgcctcctgactcctaccaggcccaggccatggtggacattgtgcgggcactgggatggaattacgtgtctacattggcctctgagggcaactatggcgagagcggggttgaggcctttgtgcagatttcccgtgaggctggaggtgtctgtattgcccagtcaataaagattcccagggagccaaagccgggagagttccacaaagtgatccggaggctcatggagacacccaacgcccgtggcatcatcatctttgccaatgaggatgacatcaggagggtcttggaggcaacacgccaggccaacctgactggccacttcctgtgggttggctcagacagctggggatccaagatctctcccatcttgaacctagaggaagaggctgtgggggccatcactatcttgcccaaaagggcttcaatcgacggatttgaccaatacttcatgactcgttccttggagaacaaccgcagaaacatctggtttgccgagttctgggaagagaattttaactgcaaactaaccagctccggtggccagtcagatgattccacccggaaatgcacaggtgaggaacgcatcggccaggactccgcctatgagcaggaggggaaggtgcagttcgtgatagacgctgtgtacgccattgctcacgctctgcatagcatgcaccaagcgctctgcccaggccacacaggtctgtgcccagccatggagcctactgatggccggacgctgctgcactacatccgagcagtccgcttcaatggtagtgcaggaaccccagtgatgttcaatgagaatggagatgcccccgggcgctatgacatcttccagtaccaggcaaccaacggaagcgccagcagcggcgggtaccaggccgtgggccaatgggcagaggcccttagactggatatggaagttctacggtggtcaggcgacccccacgaagtgcccccttctcagtgcagcctcccctgcgggcccggtgaacggaaaaagatggtgaagggtgtcccctgctgttggcactgtgaggcctgcgacgggtaccgcttccaggtggacgagttcacatgcgaggcctgcccaggggacatgaggcccacccccaaccacactggttgccgtcccacacccgtggtgcgcctgacctggtcctctccatgggcagctctgccccttctcctggctgtcctgggcatcatggctaccaccaccattatggccaccttcatgcgacacaatgacactcccatagtccgcgcctctggccgtgagcttagctacgtgctgctcactggcatcttcctgatctacgccatcaccttcctcatggtagccgagccttgtgcagccatctgtgctgcccgcagactcttgcttggcttgggcaccacgctcagctactcagccctgctcaccaagaccaaccgcatctaccgcatctttgagcaagggaagcgctctgtcacaccaccacccttcatcagccccacttcgcaactagtcatcaccttcggcctcacctccctgcaggtggtgggagtgatagcatggctgggggcccagcctccacacagcgtgattgactacgaggagcagaggacggtggaccccgagcaggccaggggtgtgctcaagtgtgatatgtctgatctgtccctcattggttgcctgggctacagtctcctgctcatggtcacgtgtacagtgtatgccatcaaggcccgaggtgtgcctgagaccttcaatgaggccaagcccatcggcttcaccatgtacaccacctgtattatctggctggcttttgttcccatcttctttggtaccgcccagtcagctgagaagatctacatccaaaccaccacactaactgtgtcactgagcctgagtgcatcagtgtccctcggcatgctctacgtgcccaaaacctacgtcatcctgttccatccagagcagaacgtacagaagcggaagcgcagcctcaagaagacctccacgatggcagccccaccccagaacgagaacgcagaggacgccaagtagcaaggttgagtgtgggtgccacaggttgctccctgccctttctctgcttctcctggcttcaaagtggaagctgtgaaagatccacagagaccatcggaggccaggaatgtgtaaagaccatgcccatggtcttttccgaaggaaaaagctaaaccccgaccacgctggacttgtgctttcctgggcacgccaaccacatcattctgcccctccgacccactgtaagaaatactgcttccaggaatcttcctgaagagagacgaaactgacaccttctgggcaggcattcaaaaccatagtgaagccagggcttggccaggttgggataagatttatcttgatccaacactacaacctaggggctggccagggtgtctgtcagaatgtgtaaaccccaacaagaaatccaggattagagctgggtggggggtgcaatcaccacaataggaaacttagaggtctgaatttggggaaatatttccctgagcagagcctgtatgagggttctgggaactgagtgtgagcctgcagcagagagaggagcagtacagggaactggggcaggcttctgtgaggtcgcttcccttgtggtcttttccccagggtcatccaaaagattggacagtttttctctgctgtgtatgtttccatagattactccaacttgaagaaatgccaacacattacagtgggtaagagatggtaaggtatagctagactttggtcagagtgtccatgaattgtcttgtttctgcacttaagagttgttgttgttgttgttgttgttgttgttgttgttattattattattattattattattattattatcattatctagagtgagggtctcactatgtaactctggctgtcctagaacttactatgtagaccaggttggccatgaactcacagagatctgctggcttctgcctcccaagtgctgggatcaaaggtgtgtgtcactatgcccagcttaaaattttaattactaggatgagcacaaaagctcccttgcatagagtcttggagcgcccacctgaaaggtggtggaggcatgtggagggactcatgggaacaccatgcacgggctttagttttgactattagttttacagagctggtttttagttagggaacttttctttcgtcgttttttgttgttgtttcgttgtttgggtttttttttcatttgtttgttttaatgtatagagctaaatgctttaatttattgtgaattctccagtatttaaggtacagaactaagttttgaaagtatgctagctacacttcaatggacagatgctccaaggtgtaatgagctttgatcttgagatgtaatactttacttagtatcttaaaggcaacaggcttctctctagaacatctctgctgttccgctcttcctcacttgctgtgttcccggtttcccacggtgcaaagcacagctcagcatttactgctgagtgagctctgatgctccgttctgaggcttctgtgctaggtcaaccctcaaagtgtgaaatgtgttctcccgggagagccttgtccacgtgaccgtctgcatggtgtttttctcctctgggatctcttctagagtcggtgagccaaggtctgaataaaggttttcttgcactt

SEQ ID NO: 1704 - protein, 871 aa, Rattus norvegicus
  ref <308>: DATABASE ACCESSION NUMBER: SWISS-Prot / P35349
  ref <309>: DATABASE ENTRY DATE: 2002-06-15
MGRLPVLLLWLAWWLSQAGIACGAGSVRLAGGLTLGGLFPVHARGAAGRACGALKKEQGVHRLEAMLYALDRVNADPELLPGVRLGARLLDTCSRDTYALEQALSFVQALIRGRGDGDEASVRCPGGVPPLRSAPPERVVAVVGASASSVSIMVANVLRLFAIPQISYASTAPELSDSTRYDFFSRVVPPDSYQAQAMVDIVRALGWNYVSTLASEGNYGESGVEAFVQISREAGGVCIAQSIKIPREPKPGEFHKVIRRLMETPNARGIIIFANEDDIRRVLEATRQANLTGHFLWVGSDSWGSKISPILNLEEEAVGAITILPKRASIDGFDQYFMTRSLENNRRNIWFAEFWEENFNCKLTSSGGQSDDSTRKCTGEERIGQDSAYEQEGKVQFVIDAVYAIAHALHSMHQALCPGHTGLCPAMEPTDGRTLLHYIRAVRFNGSAGTPVMFNENGDAPGRYDIFQYQATNGSASSGGYQAVGQWAEALRLDMEVLRWSGDPHEVPPSQCSLPCGPGERKKMVKGVPCCWHCEACDGYRFQVDEFTCEACPGDMRPTPNHTGCRPTPVVRLTWSSPWAALPLLLAVLGIMATTTIMATFMRHNDTPIVRASGRELSYVLLTGIFLIYAITFLMVAEPCAAICAARRLLLGLGTTLSYSALLTKTNRIYRIFEQGKRSVTPPPFISPTSQLVITFGLTSLQVVGVIAWLGAQPPHSVIDYEEQRTVDPEQARGVLKCDMSDLSLIGCLGYSLLLMVTCTVYAIKARGVPETFNEAKPIGFTMYTTCIIWLAFVPIFFGTAQSAEKIYIQTTTLTVSLSLSASVSLGMLYVPKTYVILFHPEQNVQKRKRSLKKTSTMAAPPQNENAEDAK

SEQ ID NO: 1705 - DNA, 6122 bp, Homo sapiens
  ref <308>: DATABASE ACCESSION NUMBER: Refseq / NM_000843
  ref <309>: DATABASE ENTRY DATE: 2000-10-31
cggaggcccgggcaggccggctgagctaactccccagagccaaagtggaaggcgcgccccgagcgccttctccccaggaccccggtgtccctccccgcgccccgagcccgcgctctccttcccccgccctcagagcgctccccgcccctctgtctccccgcagcccgctagacgagccgatggcgcggccccggagagcccgggagccgctgctcgtggcgctgctgccgctggcgtggctggcgcaggcgggcctggcgcgcgcggcgggctctgtgcgcctggcgggcggcctgacgctgggcggcctgttcccggtgcacgcgcggggcgcggcgggccgggcgtgcgggccgctgaagaaggagcagggcgtgcaccggctggaggccatgctgtacgcgctggaccgcgtcaacgccgaccccgagctgctgcccggcgtgcgcctgggcgcgcggctgctggacacctgctcgcgggacacctacgcgctggagcaggcgctgagcttcgtgcaggcgctgatccgcggccgcggcgacggcgacgaggtgggcgtgcgctgcccgggaggcgtccctccgctgcgccccgcgccccccgagcgcgtcgtggccgtcgtgggcgcctcggccagctccgtctccatcatggtcgccaacgtgctgcgcctgtttgcgataccccagatcagctatgcctccacagccccggagctcagcgactccacacgctatgacttcttctcccgggtggtgccacccgactcctaccaggcgcaggccatggtggacatcgtgagggcactgggatggaactatgtgtccacgctggcctccgagggcaactatggcgaaagtggggttgaggccttcgttcagatctcccgagaggctgggggggtctgtattgcccagtctatcaagattcccagggaaccaaagccaggagagttcagcaaggtgatcaggagactcatggagacgcccaacgcccggggcatcatcatctttgccaatgaggatgacatcaggcgggtcctggaggcagctcgccaggccaacctgaccggccacttcctgtgggtcggctcagacagctggggagccaagacctcacccatcttgagcctggaggacgtggccgttggggccatcaccatcctgcccaaaagggcctccatcgacggatttgaccagtacttcatgactcgatccctggagaacaaccgcaggaacatctggttcgccgagttctgggaagagaattttaactgcaaactgaccagctcaggtacccagtcagatgattccacccgcaaatgcacaggcgaggaacgcatcggccgggactccacctacgagcaggagggcaaggtgcagtttgtgattgatgcggtgtatgccattgcccacgccctccacagcatgcaccaggcgctctgccctgggcacacaggcctgtgcccggcgatggaacccaccgatgggcggatgcttctgcagtacattcgagctgtccgcttcaacggcagcgcaggaacccctgtgatgttcaacgagaacggggatgcgcccgggcggtacgacatcttccagtaccaggcgaccaatggcagtgccagcagtggcgggtaccaggcagtgggccagtgggcagagaccctcagactggatgtggaggccctgcagtggtctggcgacccccacgaggtgccctcgtctctgtgcagcctgccctgcgggccgggggagcggaagaagatggtgaagggcgtcccctgctgttggcactgcgaggcctgtgacgggtaccgcttccaggtggacgagttcacatgcgaggcctgtcctggggacatgaggcccacgcccaaccacacgggctgccgccccacacctgtggtgcgcctgagctggtcctccccctgggcagccccgccgctcctcctggccgtgctgggcatcgtggccactaccacggtggtggccaccttcgtgcggtacaacaacacgcccatcgtccgggcctcgggccgagagctcagctacgtcctcctcaccggcatcttcctcatctacgccatcaccttcctcatggtggctgagcctggggccgcggtctgtgccgcccgcaggctcttcctgggcctgggcacgaccctcagctactctgccctgctcaccaagaccaaccgtatctaccgcatctttgagcagggcaagcgctcggtcacaccccctcccttcatcagccccacctcacagctggtcatcaccttcagcctcacctccctgcaggtggtggggatgatagcatggctgggggcccggcccccacacagcgtgattgactatgaggaacagcggacagtggaccccgagcaggccagaggggtgctcaagtgcgacatgtcggatctgtctctcatcggctgcctgggctacagcctcctgctcatggtcacgtgcacagtgtacgccatcaaggcccgtggcgtgcccgagaccttcaacgaggccaagcccatcggcttcaccatgtacaccacctgcatcatctggctggcattcgtgcccatcttctttggcactgcccagtcagctgaaaagatctacatccagacaaccacgctaaccgtgtccttgagcctgagtgcctcggtgtccctcggcatgctctacgtacccaaaacctacgtcatcctcttccatccagagcagaatgtgcagaagcgaaagcggagcctcaaggccacctccacggtggcagccccacccaagggcgaggatgcagaggcccacaagtagcagggcaggtgggaacgggactgcttgctgcctctcctttcttcctcttgcctcgaggtggaagctgtatagagcccgggtccacggtgaacagtcagtggcagggagtttgccaagaccatgctccgcgtcggtggggctggccttgagaaggaactggacccagctctaccccgattccagcatgtgagcttcatgcttcctcaccacagaccagactcgcttcccatggtgggaaacagccaccgagaaggttctagctctagaaagggactaaacttattctctcatccgaagtccaaagaggatgatgaagccctgggctttgcctggtttgcgggagatttcctcccctcagtcaacccccataacctggggattgggcagtgtggaagaacgtgtagaccccagaatgaaacatggggttggagtggaggaggagctgtctcagcaagaggagacctggggctgtgcatctggatggaggcactcaggcctgggtaggattcctctggcacggagggagagaccctgggtgagacccctgtgagcatgggaagggcctgcagtgggcgcgggagtgagctgaggaactggggtgcgcccccatgagattcccaatgccatgggctttcccccatccccccgggattgggcaaggtcagacttagagtacagctgttttcctcccctctgtgtactcccttaaatcaccccaaccttggccaggcatggtggctcacacctgtaatcccagcactttgggaggccgaggcaggtggatcacctgaggtccggagttcgagaccagcctggccaatgtggtgaaaccctgtctctactaaaaatacaaaaattagccaggtgtgatggtgggtgcctgtaatcccagttacttgggaggctgaggcaggagaatcgcttgaacctgggaggtggaggttgcagtgagctgtgattgtgccactgtactccagcctgggtgacagagcgagactctgtctcaaaaaaacaaaacaaaaaaacaccaaaaaaacccccaaacctgaagaaattcagatacacgtgtgtaatgttagtgatgtgagaacaaggagcaggggtgcatttgtgttgtgttcgggttggggatgggtttaggagctccaggttgggagcagtgacagagagtcatggccgtggtgagggtgaatcccaagtggatggctcaggacgggtatggaaacccttcattcctcataggtactgggaagtccatttgcaagctgagcgccaggcctggggaggaagaggcttgggctgcagatgcacgcacatttgtttttcactgatagtttttacaaaaagcttggtttaagttatggaattttatgtccctgggagtagaatttacatttgttaaattgaccactgtttaagatcagtatacattctctagtctgtgatgtctggagctagttttgagggtgaaccacactttatccaacatacaaactttcccatgcagcttctctggtgcgcagttggttttgaccgtgggactaggtgcttctgcaggttttaagtaattaacttaaaagcttctcctctgagaaacatttctgttgcgctactgactctccttctccacatttgttgtgttcctagggcttctctatagtgcacattaggacgtttcatttgttgctgaatgctttccagaattatttattccatagggtttctctcctgtgcagctctctcatgggtaatggggcgtgttttcttgccaaaggcggttccaccctcgtgattgtatagggctcttctcctgtatgaactctgagatcagtgagctctgatctccaagggaaagttttcctgcatttgctgttttctcatgtctctcccagtgtgaattctctggcttctagctgaaaacttttccacagttttacattcatgtggttttctccactgtgaactctgtgattcagaatcagaagcagttcttagtagaggcatttctacactgattgcactgaggatatctccccagtgtgaagtttctggcatagagtcctggcttcccgcagacgactttcacactctgccatgttcatgcctgtgggcctctctggcaggaactctgatgcaccgcgaggcccatgtactcctgtggctttctcacattcggtctacttgcagggtatctccacagcatgcaccattctgggtacagggggacatcctctgttactgaagatgttgtcatatttagtaccttcacaaggtttctctccttccagaattttctgatgtacacaaataactgacttccacaagagggcttttccacactcggtgtgtgcatacagtttctgcctgtgatcatttctttatgttattattttattttttcgagatagggtcttgctcaatttcttaggctggagtgcagtggcacgatcatagctcactgaagtttcgacctgggctcaagcaatcctcccgcttcagcctcctgagtagctggtgcgcacgaccatacccagctaatgttttattttttgtagagacgaggtctcactatgttgcccaggctggtctcgaacttctgagctcgagcgatcctcctgcctccacctcccaaagtgttcggattacaaacgtgagccatcgcacctagcctctttgatcatttctgtggtgttcagtgggggttgacagctccctaaagattttcctgtttttttgcatgcatgggtttgaattctttgaggtccaatttatttggacccctgaataaagttttgtgggttttcttctatgtgtggaattatataggcattcttccagtgtggtttctcttatgtcgagtgagagctgacctgcaccgaagtttgtcccatttgttgcccttgaattatctgtatgaattatatgttccagtgaaaatggagttctgggttggaggcttattccatgtttacacaattaaaattgcagtgttcctctctgggatgagagctctaaagcagagtaagattacgttctgatgtaagctttaaccacctatttataaggtctcacctgtggtccactgtgttgagacttctacagaagagcttctgtatagtaaccattttcttaggctgtctcacttgtgtgaatcttctgacacatttattatagctttgtcccatttcttatcctttttgctctttagaaatttccctttaatttattacattcattgcttactgtaaagagtccaggtaactgactttaattcaagttacttcctgttcaataaatttaacttttccc

SEQ ID NO: 1706 - protein, 877 aa, Homo sapiens
  ref <308>: DATABASE ACCESSION NUMBER: Refseq / NP_000834
  ref <309>: DATABASE ENTRY DATE: 2000-10-31
MARPRRAREPLLVALLPLAWLAQAGLARAAGSVRLAGGLTLGGLFPVHARGAAGRACGPLKKEQGVHRLEAMLYALDRVNADPELLPGVRLGARLLDTCSRDTYALEQALSFVQALIRGRGDGDEVGVRCPGGVPPLRPAPPERVVAVVGASASSVSIMVANVLRLFAIPQISYASTAPELSDSTRYDFFSRVVPPDSYQAQAMVDIVRALGWNYVSTLASEGNYGESGVEAFVQISREAGGVCIAQSIKIPREPKPGEFSKVIRRLMETPNARGIIIFANEDDIRRVLEAARQANLTGHFLWVGSDSWGAKTSPILSLEDVAVGAITILPKRASIDGFDQYFMTRSLENNRRNIWFAEFWEENFNCKLTSSGTQSDDSTRKCTGEERIGRDSTYEQEGKVQFVIDAVYAIAHALHSMHQALCPGHTGLCPAMEPTDGRMLLQYIRAVRFNGSAGTPVMFNENGDAPGRYDIFQYQATNGSASSGGYQAVGQWAETLRLDVEALQWSGDPHEVPSSLCSLPCGPGERKKMVKGVPCCWHCEACDGYRFQVDEFTCEACPGDMRPTPNHTGCRPTPVVRLSWSSPWAAPPLLLAVLGIVATTTVVATFVRYNNTPIVRASGRELSYVLLTGIFLIYAITFLMVAEPGAAVCAARRLFLGLGTTLSYSALLTKTNRIYRIFEQGKRSVTPPPFISPTSQLVITFSLTSLQVVGMIAWLGARPPHSVIDYEEQRTVDPEQARGVLKCDMSDLSLIGCLGYSLLLMVTCTVYAIKARGVPETFNEAKPIGFTMYTTCIIWLAFVPIFFGTAQSAEKIYIQTTTLTVSLSLSASVSLGMLYVPKTYVILFHPEQNVQKRKRSLKATSTVAAPPKGEDAEAHK

SEQ ID NO: 1707 - DNA, 2424 bp, Rattus norvegicus
  ref <308>: DATABASE ACCESSION NUMBER: EMBL / D13978
  ref <309>: DATABASE ENTRY DATE: 1998-09-23
ggctgactgacagcctttttttttttttttttaatatttaattggagatagggtctataacccaggctaccttgagctactttatgcagcttgggatgacctagaacttctgatcttcctacttcaatctcccgaaagctgaggttactggcatacacaccatgcttcgttagtagtctgtgttggcctagaacctgcgacaagccttttgcctcagctcccagagtactggaatgatcagcatacaaaaccatacctgatttagcacgtgacctaccttctgcccactattttgagacagggtctcactatctagtactggttggcccataactcactatgcaaactaagctgtcttagaactggcagatccgtctgtctctgcctcccaagggttgaaattgttttgaaacaggttcatctgcaacctagacctggaactcccagcaatcttcctgcctcggcctcccaaatgctgctgggatgacaggcctctcatgtcttcaccccagtacagaccttatgtgcttgcccctcagtacagctagtgctgattccctgaaaaatcacctcttcctgctactagtagctcaaccagagatagtcccgcccataggcgtgattgatgagtcacacccacctctcccaattggttctactcttccaggaggcggggacaaggcaggggcagcagacgccatccggaccagaaaaagccaggagagaccagaaggtgcctggtccctgagagtctggtccactaactccagggactgtgggacagaggaacaaacaagaaagaactcgaggcctcgctgagtggcgcgcttgctgagtgctgccacatcccgcaagctgagcaggtatcccaactctgttcctgcccggtagaccacccgaggtggtgagtgtggtcttgtcttccagattcgtaggacagaagctccaggaggaggacccgcccaacatggcatcggagagcgggaagctatggggtggccgatttgcaggctcggtcgaccccaccatggacaagttcaactcatctatcgcctatgaccggcatctgtggaatgtggacctgcagggaagcaaggcctacagcaggggcctggagaaggcagggcttctcaccaaagctgagatgcagcagatactgcaaggcctggacaaggtggctgaagagtgggcccaaggcatcttcaaattgtaccctaatgatgaagacatccacacggccaacgagcggcgcctgaaggaactcattggtgaagctgcagggaagttacacacaggcagaagtcgcaatgaccaggtggtcacggacctcaggctgtggatgaggcaaacctgctcaaaactctccaccttcctcaaggtgctcattgaagccatggtagaccgggcagaggcggagtgtgaagtcctcttccctgggtacacacacttgcagagagctcagcccatccgctggagccactggatcctgagtcacgccgttgcgctgacacgagatttagagagactgaaggaggtgcagaagcggatcaatgtcctgccactgggcagtggggccattgcaggcaaccctctgggtgtggaccgggagttcctctgtgcagaactgaactttggagccattacgctcaacagtatggatgccaccagcgagagagacttcgtggctgagttcctgttttgggcttctctgtgcatgacccatctcagcaggatggcagaagacctgattctctacggtaccaaggaattcaactttgtgcagctctccgatgcctacagcaccggaagcagcttgatgccccagaagaaaaacccagacagcttggagctgatccggagcaaggcgggccgagtgtttggacggtgcgcaggactcctgatgaccctcaagggacttccaagcacctacaacaaggacttacaggaagacaaggaggctgtgtttgaagtgtctgacaccatgacagctgtcctccaagtagccactggagtcatctctacactgcagattcatcgtgagaacatggcacaggcactcagccctgacatgctggctaccgaccttgcctactacctggtccgcaaagggatgccattccgccaggcccacgaggcctcagggaaagctgtggtcgtggcagagatgaaaggggtggctctcaaccagctgtcacttcaggagctgcagaccgtcagtcccctgttctcgagtgacgtgaatctcgtgtgggactacagccacagcgtggagcagtacacagccttgggtggcacagcacagtccagtgttgagtggcagatcagccaggtgcgggccctgctgcagatgtagcagccctagattccacccagtcaaacgtgcgccccaataaagtggagccctggagaggccgccataaaccc

SEQ ID NO: 1708 - protein, 461 aa, Rattus norvegicus
  ref <308>: DATABASE ACCESSION NUMBER: SWISS-Prot / BAA03088
  ref <309>: DATABASE ENTRY DATE: 2000-05-30
MASESGKLWGGRFAGSVDPTMDKFNSSIAYDRHLWNVDLQGSKAYSRGLEKAGLLTKAEMQQILQGLDKVAEEWAQGIFKLYPNDEDIHTANERRLKELIGEAAGKLHTGRSRNDQVVTDLRLWMRQTYSKLSTFLKVLIEAMVDRAEAECEVLFPGYTHLQRAQPIRWSHWILSHAVALTRDLERLKEVQKRINVLPLGSGAIAGNPLGVDREFLCAELNFGAITLNSMDATSERDFVAEFLFWASLCMTHLSRMAEDLILYGTKEFNFVQLSDAYSTGSSLMPQKKNPDSLELIRSKARRVFGRCAGLLMTLKGLPSTYNKDLQEDKEAVFEVSDTMTAVLQVATGVISTLQIHRENMAQALSPDMLATDLAYYLVRKGMPFRQAHEASGKAVVVAEMKGVALNQLSLQELQTVSPLFSSDVNLVWDYSHSVEQYTALGGTAQSSVEWQISQVRALLQM

SEQ ID NO: 1709 - DNA, 1563 bp, Homo sapiens
  ref <308>: DATABASE ACCESSION NUMBER: EMBL / BC008195
  ref <309>: DATABASE ENTRY DATE: 2001-07-13
gcgcgacactatccgtgcggccaggcggagacccggaggaccgaagcttccggacgacgaggaaccgcccaacatggcctcggagagtgggaagctttggggtggccggtttgtgggtgcagtggaccccatcatggagaagttcaacgcgtccattgcctacgaccggcacctttgggaggtggatgttcaaggcagcaaagcctacagcaggggcctggagaaggcagggctcctcaccaaggccgagatggaccagatactccatggcctagacaaggtggctgaggagtgggcccagggcaccttcaaactgaactccaatgatgaggacatccacacagccaatgagcgccgcctgaaggagctcattggtgcaacggcagggaagctgcacacgggacggagccggaatgaccaggtggtcacagacctcaggctgtggatgcggcagacctgctccacgctctcgggcctcctctgggagctcattaggaccatggtggatcgggcagaggcggaacgtgatgttctcttcccggggtacacccatttgcagagggcccagcccatccgctggagccactggattctgagccacgccgtggcactgacccgagactctgagcggctgctggaggtgcggaagcggatcaatgtcctgcccctggggagtggggccattgcaggcaatcccctgggtgtggaccgagagctgctccgagcagaactcaactttggggccatcactctcaacagcatggatgccactagtgagcgggactttgtggccgagttcctgttctgggcttcgctgtgcatgacccatctcagcaggatggccgaggacctcatcctctactgcaccaaggaattcagcttcgtgcagctctcagatgcctacagcacgggaagcagcctgatgccccagaagaaaaaccccgacagtttggagctgatccggagcaaggctgggcgtgtgtttgggcggtgtgccgggctcctgatgaccctcaagggacttcccagcacctacaacaaagacttacaggaggacaaggaagctgtgtttgaagtgtcagacactatgagtgccgtgctccaggtggccactggcgtcatctctacgctgcagattcaccaagagaacatgggacaggctctcagccccgacatgctggccactgaccttgcctattacctggtccgcaaagggatgccattccgccaggcccacgaggcctccgggaaagctgtgttcatggccgagaccaagggggtcgccctcaaccagctgtcactgcaggagctgcagaccatcagccccctgttctcgggcgacgtgatctgcgtgtgggactacgggcacagtgtggagcagtatggtgccctgggcggcactgcgcgctccagcgtcgactggcagatccgccaggtgcgggcgctactgcaggcacagcaggcctaggtcctcccacacctgccccctaataaagtgggcgcgagaggaaaaaaaaaaaaaaaaaaaaaaaaaaaaaaaaaaaaaaaaaaaaaaaaaaaaaa

SEQ ID NO: 1710 - protein, 464 aa, Homo sapiens
  ref <308>: DATABASE ACCESSION NUMBER: SWISS-Prot / P04424
  ref <309>: DATABASE ENTRY DATE: 2002-06-15
MASESGKLWGGRFVGAVDPIMEKFNASIAYDRHLWEVDVQGSKAYSRGLEKAGLLTKAEMDQILHGLDKVAEEWAQGTFKLNSNDEDIHTANERRLKELIGATAGKLHTGRSRNDQVVTDLRLWMRQTCSTLSGLLWELIRTMVDRAEAERDVLFPGYTHLQRAQPIRWSHWILSHAVALTRDSERLLEVRKRINVLPLGSGAIAGNPLGVDRELLRAELNFGAITLNSMDATSERDFVAEFLFWRSLCMTHLSRMAEDLILYCTKEFSFVQLSDAYSTGSSLMPQKKNPDSLELIRSKAGRVFGRCAGLLMTLKGLPSTYNKDLQEDKEAVFEVSDTMSAVLQVATGVISTLQIHQENMGQALSPDMLATDLAYYLVRKGMPFRQAHEASGKAVFMAETKGVALNQLSLQELQTISPLFSGDVICVWDYGHSVEQYGALGGTARSSVDWQIRQVRALLQAQQA

SEQ ID NO: 1711 - DNA, 978 bp, Rattus norvegicus
  ref <308>: DATABASE ACCESSION NUMBER: EMBL / D13985
  ref <309>: DATABASE ENTRY DATE: 2000-04-25
aatggaagctggggcggccggggagacccaggtcttgcagccaggcatactggggatgatggatcgtgctctgctttcttggttcctgtggagcaatgctttcgcccgcaatgagcttcctcaaaagcttcccgccccctgggtccgcagatggactccggctgcagcagccagacaccgaagctgtgctgaacgggaaggggctcggcaccggcacgctttacattgcggagagccgcctgtcttggctagatggttctggattaggattctcactggagtaccccaccattagtttacatgcggtatccagggacccaaatgcttatcctcaagaacatctgtatgtcatggtgaatgccagatttggagaagaatcaaaagaacctttctctgatgaagatgaggacgacaatgatgatgttgaacccatttctgagtttagatttgtgcccagtgataagtcagcattggaggcgatgttcacagcaatgtgtgagtgccaggccctgcatccagaccctgaggatgaagactcggatgactatgatggagaagagtatgatgtggaagcacatgagcaaggacagggggacatccctacattttacacctatgaagaaggactatcccatttaacagcagaagggcaagccacgctggagagattagaaggaatgctttctcagtctgtgagcagccagtataatatggcaggcgtccgaacagaagattcagtaagaacttacgaagatggcatggaggtagagaccacaccaactgttgccggacagttcgaggatgcagacgttgaccactgaggatgactcgtgtgacttacagtgaattctgctcataactataggcaagaacttgatgcctcttcactccagaatggagctggtgaaaggcttatttcttctccaaaactcatttctcaagacaaactataatgagacagcaagctgtcaccagcag

SEQ ID NO: 1712 - protein, 236 aa, Rattus norvegicus
  ref <308>: DATABASE ACCESSION NUMBER: SWISS-Prot / Q04753
  ref <309>: DATABASE ENTRY DATE: 2001-10-16
MSFLKSFPPPGSADGLRLQQPDTEAVLNGKGLGTGTLYIAESRLSWLDGSGLGFSLEYPTISLHAVSRDPNAYPQEHLYVMVNARFGEESKEPFSDEDEDDNDDVEPISEFRFVPSDKSALEAMFTAMCECQALHPDPEDEDSDDYDGEEYDVEAHEQGQGDIPTFYTYEEGLSHLTAEGQATLERLEGMLSQSVSSQYNMAGVRTEDSVRTYEDGMEVETTPTVAGQFEDADVDH

SEQ ID NO: 1713 - DNA, 421 bp, Homo sapiens
  ref <308>: DATABASE ACCESSION NUMBER: EMBL / AA832121
  ref <309>: DATABASE ENTRY DATE: 2000-03-03
ttttttttccaattgttgaataaaataatttaaaagtgttctgtttgtttagaacaaggacaaggggacatccctacattttatacctatgaagaaggactatcccatttaacagcggaagggcaagccacgttggagagattagaagggatgctttctcagtctgtgagcagccaatataatatggcaggcgtccgaacagaagactcagtaagaaattatgaaggtgagtgttttttctcttcagactgggaaatcgtagccaagttttctcttagaagccagaagactgcagagtcattgctccagactctcatacagttttggctctgaaggagtgacatgtggcagtcctgtgctttctaaccccaagccgattgtgtgccacacctggatttaaagcacatctctcaatatttac

SEQ ID NO: 1714 - protein, 237 aa, Homo sapiens
  ref <308>: DATABASE ACCESSION NUMBER: Refseq / NP_001284
  ref <309>: DATABASE ENTRY DATE: 2000-10-31
MSFLKSFPPPGPAEGLLRQQPDTEAVLNGKGLGTGTLYIAESRLSWLDGSGLGFSLEYPTISLHALSRDRSDCLGEHLYVMVNAKFEEESKEPVADEEEEDSDDDVEPITEFRFVPSDKSALEAMFTAMCECQALHPDPEDEDSDDYDGEEYDVEAHEQGQGDIPTFYTYEEGLSHLTAEGQATLERLEGMLSQSVSSQYNMAGVRTEDSIRDYEDGMEVDTTPTVAGQFEDADVDH

SEQ ID NO: 1715 - DNA, 978 bp, Rattus norvegicus; identical to SEQ ID NO: 1711
  ref <308>: DATABASE ACCESSION NUMBER: EMBL / D13985
  ref <309>: DATABASE ENTRY DATE: 2000-04-25

SEQ ID NO: 1716 - protein, 236 aa, Rattus norvegicus; identical to SEQ ID NO: 1712
  ref <308>: DATABASE ACCESSION NUMBER: SWISS-Prot / Q04753
  ref <309>: DATABASE ENTRY DATE: 2001-10-16

SEQ ID NO: 1717 - DNA, 421 bp, Homo sapiens; identical to SEQ ID NO: 1713
  ref <308>: DATABASE ACCESSION NUMBER: EMBL / AA832121
  ref <309>: DATABASE ENTRY DATE: 2000-03-03

SEQ ID NO: 1718 - protein, 237 aa, Homo sapiens; identical to SEQ ID NO: 1714
  ref <308>: DATABASE ACCESSION NUMBER: Refseq / NP_001284
  ref <309>: DATABASE ENTRY DATE: 2000-10-31

SEQ ID NO: 1719 - DNA, 3751 bp, Rattus norvegicus
  ref <308>: DATABASE ACCESSION NUMBER: EMBL / D14014
  ref <309>: DATABASE ENTRY DATE: 1999-01-21
agaaagagagctacagactccgcgcgctccggaagaccgggtcgtagagctcgagacaactcccgccagcagcaagacacgggagacccaaccaggatgacaaccctccccaggccgcccgctccatggaacaccagctcctgtgctgcgaagtggagaccatccgccgcgcgtaccctgacaccaatctcctcaaccgaccgggtctgcgagccatgcttaagactgaggagacctgcgcgccctccgtttcttacttcaagtgcgtgcagagggagattgtgccatccatgcggaaaatcgtggccacctggatgctagaggtctgcgaggagcagaagtgcgaagaggaggtcttcccgctggccatgaactacctggaccgtttcttgtctctggagcccctgaagaagagccgcctgcagcttctgggggccacctgcatgttcgtggcctctaagatgaaggagaccattcccctgactgccgagaagttgtgcatctacactgacaactctatccgccccgaggagttgctgcaaatggaactgcttctggtgaacaagctcaaatggaacctggccgccatgactccccacgatttcatcgaacacttcctctccaaaatgccagaggcggatgagaacaagcagatcatccgcaaacatgcacagacctttgtggccctctgtgccacagatgtgaagttcatttccaacccaccctccatggtggctgctgggagtgtggtggccgcgatgcagggcctgaacctgggcagccccaacaacttcctctcctgctaccgcacaacgcactttctttccagagtcatcaagtgtgacccggactgcctccgtgcctgccaggaacagattgaagcccttctggagtcaagcctgcgccaggcccagcagaacatcgatcccaaggccaccgaggaggaaggggaagtggaggaagaagctggtctggcttgcacacccaccgacgtccgagatgtggacatctgagggcccaccgggcaggcgggagtcaccaagtagtggcatccgcgaagagaaaggagccagcccgggtgctcctgacgaggtcccccttggggatgtgttgttaccagaaggggaagttttgttctctttgttggttgtttttccttaatctttctcctttctatctgatttaagcaaaagagaaaaaaatacctgaaagctgtcttaaagagagagagagagatagaattcgcatcaccctgagtatagggagacgggggggtgcctacaaaaatagaattctgtaccccagtaatcaactagttttctattaatgtgcttgtctgttctaagaataggattaacacacaggaagtcttgagaaggatttttgattcttttatgtgtttaagaaaaaaaagcttaagaaacattgctttaaaaaaagaaggaaaaaaaatacagcaaaccattgttaaagtagaagggttttaggtagagaaatgtactctgctttggtgaaaaggcacagatttgggaaggtcctcaacctcactcccctgcttgttcagtgcctacagacctgttacctgatgatacctgtgctttatcccaggagtggggcagacctcttaaccttactgatggtcgattcgacctctagcgggctcgtgggtgtggcaacctccagggctcatgttatgggccctctgccccccacaacctgcaggttcacagagcgccagccagcacgcaggggtagggatgaaatagtgacataatatattctatttttggggaaccttcctgttttgggggttcctgtttagagagatgctggtttttggctggtggccctgcagcccactcaacatcaggttgaacccacagcttttcttttgtgtgtggtttgttttgttatgtttttccttctccatgttcccaaaaccattccatttcaaagcacttttggtcagctagctggaggcagtgttgctgggtgtgtgtgtgtgtgtgtgtgtgtgtgtgtgtgtgtgtgtgtgtcggtgggggagggggtctagtggaatggttggggatgtccacacactcaattctgatggctgcacagcaggtgtgtagggctggtagcatgaggtgcttgggaagttgtgttgggtcgagaagagaaagctctgttctcgtaccaccgggatcttcctgcaaagtcggagggatcttttggtgccagctggcgtttggaagtagggaccgtgatggcattacctggacaaggggattcaggacgactcttaagtctttcacacaggaggcttttaaacactaaaatctctaatttatacgtaaggctacagaagagtatttattgggaaggttgcccatgacccgtgtgactcaaagcaatgtgatcttcccttgattcaaacgcacaccttcttccctgctggcgaaggttttaggccattgtctgagagactggtcttttattggccaagtggggtgtcctccaaaaaaaccaaaccacaaagacggagatgtgggtctccttgactttcccaacccaattgcccccattggagagccatccaaacctgaggaaaattaggggaccccaaaagagtcttgagtctggcacattcttgccgccgctcccaagttagcaacagtaggtaatttgcacacctctggctctgtgcctttctgttcaggatgtgttggtgggaggtggagagcgggtggctggagaggggatgtgagagaagaagtatggagggtagggaccacacgggacagaccgcggctcctttcacagcgctgctaccaatgactcccaggatccccggcgttcggaaccagattcacgttgctttgtatctttcatgttgttttcgctgctattggagggtcagttttattttgttgttgttggtttgtttgtttttttttacaatgtcataaactgccatgttcaagttttaatttcctcgtagaagagtgtatttacagatgccctctccgggactttttctatttattgtgattcaattttggattaatgtgattaccgctgtattcccaacaaaaggtgttttccacacacacacacacacacacacacacacacacacacacacacaggttcctgtacacaatacctcatgtatcacctaacaatacataggcctgccaggcgggtggggcggtctgcctccagggaccctgggaccctgctggggatcatcctgtcatgctgggccttcatttgatctgggacatagcatcacagcagtcaggccaactgtgttctgttagttatcaatattgttacttgtagcggcctgttgtgcatgccaccatgctgctggacccggagagatttgttctgagtctctggtgcatcatataatctgttaggttctagtgttctgtcttgttttgtgttactcacagcattgtgctaatgtaaagccagccgcaatgctgtaggccccaggttccctagcaagctgccaaaccaaaagggtcaccaccagcttagctgaggcgtcccaaccaggcaggacccttgagggctgctgtgtccatggtgatggggtgaagttttggccaaagggccaaaggctggtggatccacacagtctgccctgtgacatgaatggctttgaggggctctggctggtggtcaggttggctttgtgtattctggttgacacaccatggcgcttcccagcacagacatgtgaccagcatggtccagg

SEQ ID NO: 1720 - protein, 295 aa, Rattus norvegicus
  ref <308>: DATABASE ACCESSION NUMBER: SWISS-Prot / BAA03115
  ref <309>: DATABASE ENTRY DATE: 1999-07-15
MEHQLLCCEVETIRRAYPDTNLLNDRVLRAMLKTEETCAPSVSYFKCVQREIVPSMRKIVATWMLEVCEEQKCEEEVFPLAMNYLDRFLSLEPLKKSRLQLLGATCMFVASKMKETIPLTAEKLCIYTDNSIRPEELLQMELLLVNKLKWNLAAMTPHDFIEHFLSKMPEADENKQIIRKHAQTFVALCATDVKFISNPPSMVAAGSVVAAMQGLNLGSPNNFLSCYRTTHFLSRVIKCDPDCLRACQEQIEALLESSLRQAQQNIDPKATEEEGEVEEEAGLACTPTDVRDVDI

SEQ ID NO: 1721 - DNA, 4244 bp, Homo sapiens
  misc_feature (1)..(4244): n=a, c, g or t
  ref <308>: DATABASE ACCESSION NUMBER: EMBL / X59798
  ref <309>: DATABASE ENTRY DATE: 1993-06-18
ggcgcagtagcagcgagcagcagagtccgcacgctccggcgaggggcagaagagcgcgagggagcgcggggcagcagaagcgagagccgagcgcggacccagccaggacccacagccctccccagctgcccaggaagagccccagccatggaacaccagctcctgtgctgcgaagtggaaaccatccgccgcgcgtaccccgatgccaacctcctcaacgaccgggtgctgcgggccatgctgaaggcggaggagacctgcgcgccctcggtgtcctacttcaaatgtgtgcagaaggaggtcctgccgtccatgcggaagatcgtcgccacctggatgctggaggtctgcgaggaacagaagtgcgaggaggaggtcttcccgctggccatgaactacctggaccgcttcctgtcgctggagcccgtgaaaaagagccgcctgcagctgctgggggccacttgcatgttcgtggcctctaagatgaaggagaccatccccctgacggccgagaagctgtgcatctacaccgacaactccatccggcccgaggagctgctgcaaatggagctgctcctggtgaacaagctcaagtggaacctggccgcaatgaccccgcacgatttcattgaacacttcctctccaaaatgccagaggcggaggagaacaaacagatcatccgcaaacacgcgcagaccttcgttgccctctgtgccacagatgtgaagttcatttccaatccgccctccatggtggcagcggggagcgtggtggccgcagtgcaaggcctgaacctgaggagccccaacaacttcctgtcctactaccgcctcacacgcttcctctccagagtgatcaagtgtgacccagactgcctccgggcctgccaggagcagatcgaagccctgctggagtcaagcctgcgccaggcccagcagaacatggaccccaaggccgccgaggaggaggaagaggaggaggaggaggtggacctggcttgcacacccaccgacgtgcgggacgtggacatctgagggcgccaggcaggcgggcgccaccgccacccgcagcgagggcggagccggccccaggtgctccactgacagtccctcctctccggagcattttgataccagaagggaaagcttcattctccttgttgttggttgttttttcctttgctctttcccccttccatctctgacttaagcaaaagaaaaagattacccaaaaactgtctttaaaagagagagagagaaaaaaaaaatagtatttgcataaccctgagcggtgggggaggagggttgtgctacagatgatagaggattttataccccaataatcaactcgtttttatattaatgtacttgtttctctgttgtaagaataggcattaacacaaaggaggcgtctcgggagaggattaggttccatcctttacgtgtttaaaaaaaagcataaaaacattttaaaaacatagaaaaattcagcaaaccatttttaaagtagaagagggttttaggtagaaaaacatattcttgtgcttttcctgataaagcacagctgtagtggggttctaggcatctctgtactttgcttgctcatatgcatgtagtcactttataagtcattgtatgttattatattccgtaggtagatgtgtaacctcttcaccttattcatggctgaagtcacctcttggttacagtagcgtagcgtggccgtgtgcatgtcctttgcgcctgtgaccaccaccccaacaaaccatccagtgacaaaccatccagtggaggtttgtcgggcaccagccagcgtagcagggtcgggaaaggccacctgtcccactcctacgatacgctactataaagagaagacgaaatagtgacataatatattctatttttatactcttcctatttttgtagtgacctgtttatgagatgctggttttctacccaacggccctgcagccagctcacgtccaggttcaacccacagctacttggtttgtgttcttcttcatattctaaaaccattccatttccaagcactttcagtccaataggtgtaggaaatagcgctgtttttgttgtgtgtgcagggagggcagttttctaatggaatggtttgggaatatccatgtacttgtttgcaagcaggactttgaggcaagtgtgggccactgtggtggcagtggaggtggggtgtttgggaggctgcgtgccagtcaagaagaaaaaggtttgcattctcacattgccaggatgataagttcctttccttttctttaaagaagttgaagtttaggaatcctttggtgccaactggtgtttgaaagtagggacctcagaggtttacctagagaacaggtggtttttaagggttatcttagatgtttcacaccggaaggtttttaaacactaaaatatataatttatagttaaggctaaaaagtatatttattgcagaggatgttcataaggccagtatgatttataaatgcaatctccccttgatttaaacacacagatacacacacacacacacacacacacacaaaccttctgcctttgatgttacagatttaatacagtttatttttaaagatagatccttttataggtgagaaaaaaacaatctggaagaaaaaaaccacacaaagacattgattcagcctgtttggcgtttcccagagtcatctgattggacaggcatgggtgcaaggaaaattagggtactcaacctaagttcggttccgatgaattcttatcccctgccccttcctttaaaaaacttagtgacaaaatagacaatttgcacatcttggctatgtaattcttgtaatttttatttaggaagtgttgaagggaggtggcaagagtgtggaggctgacgtgtgagggaggacaggcgggaggaggtgtgaggaggaggctcccgaggggaaggggcggtgcccacaccggggacaggccgcagctccattttcttattgcgctgctaccgttgacttccaggcacggtttggaaatattcacatcgcttctgtgtatctctttcacattgtttgctgctattggaggatcagttttttgttttacaatgtcatatactgccatgtactagttttagttttctcttagaacattgtattacagatgccttttttgtagttttttttttttttatgtgatcaattttgacttaatgtgattactgctctattccaaaaaggttgctgtttcacaatacctcatgcttcacttagccatggtggacccagcgggcaggttctgcctgctttggcgggcagacacgcgggcgcgatcccacacaggctggcgggggccggccccgaggccgcgtgcgtgagaaccgcgccggtgtccccagagaccaggctgtgtccctcttctcttccctgcgcctgtgatgctgggcacttcatctgatcgggggcgtagcatcatagtagtttttacagctgtgttatnctttgcgtgtagctatggaagttgcataattattattattattattataacaagtgtgtcttacgtgccaccacggcgttgtacctgtaggactctcattcgggatgattggaatagcttctggaatttgttcaagttttgggtatgtttaatctgttatgtactagtgttctgtttgttattgttttgttaattacaccataatgctaatttaaagagactccaaatctcaatgaagccagctcacagtgctgtgtgccccggtcacctagcaagctgccgaaccaaaagaatttgcaccccgctgcgggcccacgtggttggggccctgccctggcagggtcatcctgtgctcggaggccatctcgggcacaggcccaccccgccccacccctccagaacacggctcacgcttacctcaaccatcctggctgcggcgtctgtctgaaccacgcgggggccttgagggacgctttgtctgtcgtgatggggcaagggcacaagtcctggatgttgtgtgtntcgagaggccaaaggctggtggcaagtgcacggggcacagcggagtctgtcctgtgacgcgcaagtctgagggtctgggcggcgggcggctgggtctgtgcatttctggttgcaccgcggcgcttcccagcaccaacatgtaaccggcatgtttccagcagaagacaaaaagacaaacatgaaagtctagaaataaaactggtaaaaccccaaaaaaaaaaaaaaaa

SEQ ID NO: 1722 - protein, 295 aa, Homo sapiens
  ref <308>: DATABASE ACCESSION NUMBER: SWISS-Prot / P24385
  ref <309>: DATABASE ENTRY DATE: 2002-06-15
MEHQLLCCEVETIRRAYPDANLLNDRVLRAMLKAEETCAPSVSYFKCVQKEVLPSMRKIVATWMLEVCEEQKCEEEVFPLAMNYLDRFLSLEPVKKSRLQLLGATCMFVASKMKETIPLTAEKLCIYTDNSIRPEELLQMELLLVNKLKWNLAAMTPHDFIEHFLSKMPEAEENKQIIRKHAQTFVALCATDVKFISNPPSMVAAGSVVAAVQGLNLRSPNNFLSYYRLTRFLSRVIKCDPDCLRACQEQIEALLESSLRQAQQNMDPKAAEEEEEEEEEVDLACTPTDVRDVDI

SEQ ID NO: 1723 - DNA, 3751 bp, Rattus norvegicus; identical to SEQ ID NO: 1719
  ref <308>: DATABASE ACCESSION NUMBER: EMBL / D14014
  ref <309>: DATABASE ENTRY DATE: 1999-01-21

SEQ ID NO: 1724 - protein, 295 aa, Rattus norvegicus; identical to SEQ ID NO: 1720
  ref <308>: DATABASE ACCESSION NUMBER: SWISS-Prot / BAA03115
  ref <309>: DATABASE ENTRY DATE: 1999-07-15

SEQ ID NO: 1725 - DNA, 4244 bp, Homo sapiens; identical to SEQ ID NO: 1721
  misc_feature (1)..(4244): n=a, c, g or t
  ref <308>: DATABASE ACCESSION NUMBER: EMBL / X59798
  ref <309>: DATABASE ENTRY DATE: 1993-06-18

SEQ ID NO: 1726 - protein, 295 aa, Homo sapiens; identical to SEQ ID NO: 1722
  ref <308>: DATABASE ACCESSION NUMBER: SWISS-Prot / P24385
  ref <309>: DATABASE ENTRY DATE: 2002-06-15

SEQ ID NO: 1727 - DNA, 3751 bp, Rattus norvegicus; identical to SEQ ID NO: 1719
  ref <308>: DATABASE ACCESSION NUMBER: EMBL / D14014
  ref <309>: DATABASE ENTRY DATE: 1999-01-21

SEQ ID NO: 1728 - protein, 295 aa, Rattus norvegicus; identical to SEQ ID NO: 1720
  ref <308>: DATABASE ACCESSION NUMBER: SWISS-Prot / BAA03115
  ref <309>: DATABASE ENTRY DATE: 1999-07-15

SEQ ID NO: 1729 - DNA, 4244 bp, Homo sapiens; identical to SEQ ID NO: 1721
  misc_feature (1)..(4244): n=a, c, g or t
  ref <308>: DATABASE ACCESSION NUMBER: EMBL / X59798
  ref <309>: DATABASE ENTRY DATE: 1993-06-18

SEQ ID NO: 1730 - protein, 295 aa, Homo sapiens; identical to SEQ ID NO: 1722
  ref <308>: DATABASE ACCESSION NUMBER: SWISS-Prot / P24385
  ref <309>: DATABASE ENTRY DATE: 2002-06-15

SEQ ID NO: 1731 - DNA, 3751 bp, Rattus norvegicus; identical to SEQ ID NO: 1719
  ref <308>: DATABASE ACCESSION NUMBER: EMBL / D14014
  ref <309>: DATABASE ENTRY DATE: 1999-01-21

SEQ ID NO: 1732 - protein, 295 aa, Rattus norvegicus; identical to SEQ ID NO: 1720
  ref <308>: DATABASE ACCESSION NUMBER: SWISS-Prot / BAA03115
  ref <309>: DATABASE ENTRY DATE: 1999-07-15

SEQ ID NO: 1733 - DNA, 4244 bp, Homo sapiens; identical to SEQ ID NO: 1721
  misc_feature (1)..(4244): n=a, c, g or t
  ref <308>: DATABASE ACCESSION NUMBER: EMBL / X59798
  ref <309>: DATABASE ENTRY DATE: 1993-06-18

SEQ ID NO: 1734 - protein, 295 aa, Homo sapiens; identical to SEQ ID NO: 1722
  ref <308>: DATABASE ACCESSION NUMBER: SWISS-Prot / P24385
  ref <309>: DATABASE ENTRY DATE: 2002-06-15

SEQ ID NO: 1735 - DNA, 1957 bp, Rattus norvegicus
  ref <308>: DATABASE ACCESSION NUMBER: EMBL / D14015
  ref <309>: DATABASE ENTRY DATE: 1999-01-21
tcgaggtcgacggtatcgataagtttgatatcgatttcctgcagcccgggggggatcccgccagcgccgcgcgctccggccgccgcctcccgcctcctgcttcccgcctgccgtcggcctcctgtccgctcgagcgcgcctgtctgcgggggacacagcttcgggtctgagttccaagtcctgagccatgccaagggagaggaaggagagagactcgaaggaccacaccaaatgaaagaagaaggtggttccgacctctcagtccgatccagaaaaaggaagccaaatgtgcccgtttttttgcaagatccggatgaagaaattgccaagattgacaagactgtgaaaagccaggatagcagtcagccttgggatgatgattcagcgtgcgtggacccctgctctttcatccccacccctaacaaagaagaggacaatgagcttgagtaccccaagactgcatttcagcctcggaaaatcagaccgcccagagcctccccacttcccgtcttgaattgggccaatagagaagaggtctggaggatcatgttaaacaaagagaagacttacctgagagatgagcactttctgcagcgccaccctctcctgcaggcgaggatgagagcagttcttctggactggctgatggaggtgtgtgaagtctataagctccacagagagacattctacttggcacaggacttctttgatcgttacatggcatcacaacagaatatcataaaaacacttttacagcttattgggatttcagccttatttattgcttctaaacttgaggaaatctaccctccaaagttgcaccagtttgcttatgttactgatggtgcttgctccggggatgaaattcttaccatggaactgatgatgatgaaggcccttaagtggcgtttaagccccctgaccattgtgtcctggctgaatgtttatgtccaagtggcctacgtcaacgacacgggagaagtgctgatgcctcagtacccacagcaggtcttcgtgcagatcgcagagcttttagacctgtgcgtcctggatgttggctgcttagaatttccttatggtgtcctcgctgcttctgctttgtatcatttttcctcgttggagttgatgcagaaggtctcaggttatcagtggtgtgatatagagaagtgtgtcaagtggatggttccattcgccatggttatccgggagatgggaagttccaagctcaagcacttccggggagttcccatggaagactcccacaacatccagacccacaccaacagcttggacttgctggacaaagcccaagcaaagaaagccatattgtcagaacaaaataggatttctcctcctccgagtggggtcctgacacccccacacagcagtaagaagcagagcagtgagcaggagacagaatgaccagacctgccatcgcctccaaagacagtggtgtggaagcacctgcctggagctccttgtgctgccttggaggtcaggagcccctgcagatgctatgctctgtggagaggtgtctcttccagagcagcaggggtctacaagatgccttggacggaagtgctttgattgaatgctaggtgttttaactatagggtcgagtacaccagccacctccagaacaccactgagtgctccagaagctgctaaggagggtgctacttggacccactggactcttcacacagacggcaaaagcttgaagttaaggaggccatggtgcttgctggcctctgctgggtgtcgcagggttgctgttgatagggtacggcgagtggtcgtgagcaagcatgggatgcagagccacagcctggcctgagctgcccttctccactgtcagttgacagcatatcctgccttcatgaacactcttgttttggaagtgctgctacgtctatcaattttaataaagataattctatctctgagaaacaaccaa

SEQ ID NO: 1736 - protein, 396 aa, Rattus norvegicus
  ref <308>: DATABASE ACCESSION NUMBER: SWISS-Prot / BAA03116
  ref <309>: DATABASE ENTRY DATE: 2001-10-16
MKEEGGSDLSVRSRKRKPNVPVFLQDPDEEIAKIDKTVKSQDSSQPWDDDSACVDPCSFIPTPNKEEDNELEYPKTAFQPRKIRPPRASPLPVLNWANREEVWRIMLNKEKTYLRDEHFLQRHPLLQARMRAVLLDWLMEVCEVYKLHRETFYLAQDFFDRYMASQQNIIKTLLQLIGISALFIASKLEEIYPPKLHQFAYVTDGACSGDEILTMELMMMKALKWRLSPLTIVSWLNVYVQVAYVNDTGEVLMPQYPQQVFVQIAELLDLCVLDVGCLEFPYGVLAASALYHFSSLELMQKVSGYQWCDIEKCVKWMVPFAMVIREMGSSKLKHFRGVPMEDSHNIQTHTNSLDLLDKAQAKKAILSEQNRISPPPSGVLTPPHSSKKQSSEQETE

SEQ ID NO: 1737 - DNA, 1680 bp, Homo sapiens
  ref <308>: DATABASE ACCESSION NUMBER: EMBL / M73812
  ref <309>: DATABASE ENTRY DATE: 2000-03-04
gtgctcacccggcccggtgccacccgggtccacagggatgcgaaggagcgggacaccatgaaggaggacggcggcgcggagttctcggctcgctccaggaagaggaaggcaaacgtgaccgtttttttgcaggatccagatgaagaaatggccaaaatcgacaggacggcgagggaccagtgtgggagccagccttgggacaataatgcagtctgtgcagacccctgctccctgatccccacacctgacaaagaagatgatgaccgggtttacccaaactcaacgtgcaagcctcggattattgcaccatccagaggctccccgctgcctgtactgagctgggcaaatagagaggaagtctggaaaatcatgttaaacaaggaaaagacatacttaagggatcagcactttcttgagcaacaccctcttctgcagccaaaaatgcgagcaattcttctggattggttaatggaggtgtgtgaagtctataaacttcacagggagaccttttacttggcacaagatttctttgaccggtatatggcgacacaagaaaatgttgtaaaaactcttttacagcttattgggatttcatctttatttattgcagccaaacttgaggaaatctatcctccaaagttgcaccagtttgcgtatgtgacagatggagcttgttcaggagatgaaattctcaccatggaattaatgattatgaaggcccttaagtggcgtttaagtcccctgactattgtgtcctggctgaatgtatacatgcaggttgcatatctaaatgacttacatgaagtgctactgccgcagtatccccagcaaatctttatacagattgcagagctgttggatctctgtgtcctggatgttgactgccttgaatttccttatggtatacttgctgcttcggccttgtatcatttctcgtcatctgaattgatgcaaaaggtttcagggtatcagtggtgcgacatagagaactgtgtcaagtggatggttccatttgccatggttataagggagacggggagctcaaaactgaagcacttcaggggcgtcgctgatgaagatgcacacaacatacagacccacagagacagcttggatttgctggacaaagcccgagcaaagaaagccatgttgtctgaacaaaatagggcttctcctctccccagtgggctcctcaccccgccacagagcggtaagaagcagagcagcgggccggaaatggcgtgaccaccccatccttctccaccaaagacagttgcgcgcctgctccacgttctcttctgtctgttgcagcggaggcgtgcgtttgcttttacagatatctgaatggaagagtgtttcttccacaacagaagtatttctgtggatggcatcaaacagggcaaagtgttttttattgaatgcttataggttttttttaaataagtgggtcaagtacaccagccacctccagacaccagtgcgtgctcccgatgctgctatggaaggtgctacttgacctaaaggactcccacaacaacaaaagcttgaagctgtggagggccacggtggcgtggctctcctcgcaggtgttctgggctccgttgtaccaagtggagcaggtggttgcgggcaagcgttgtgcagagcccatagccagctgggcagggggctgccctctcc

SEQ ID NO: 1738 - protein, 410 aa, Homo sapiens
  ref <308>: DATABASE ACCESSION NUMBER: SWISS-Prot / P24864
  ref <309>: DATABASE ENTRY DATE: 2002-06-15
MPRERRERDAKERDTMKEDGGAEFSARSRKRKANVTVFLQDPDEEMAKIDRTARDQCGSQPWDNNAVCADPCSLIPTPDKEDDDRVYPNSTCKPRIIAPSRGSPLPVLSWANREEVWKIMLNKEKTYLRDQHFLEQHPLLQPKMRAILLDWLMEVCEVYKLHRETFYLAQDFFDRYMATQENVVKTLLQLIGISSLFIAAKLEEIYPPKLHQFAYVTDGACSGDEILTMELMIMKALKWRLSPLTIVSWLNVYMQVAYLNDLHEVLLPQYPQQIFIQIAELLDLCVLDVDCLEFPYGILAASALYHFSSSELMQKVSGYQWCDIENCVKWMVPFAMVIRETGSSKLKHFRGVADEDAHNIQTHRDSLDLLDKARAKKAMLSEQNRASPLPSGLLTPPQSGKKQSSGPEMA

SEQ ID NO: 1739 - DNA, 1957 bp, Rattus norvegicus; identical to SEQ ID NO: 1735
  ref <308>: DATABASE ACCESSION NUMBER: EMBL / D14015
  ref <309>: DATABASE ENTRY DATE: 1999-01-21

SEQ ID NO: 1740 - protein, 396 aa, Rattus norvegicus; identical to SEQ ID NO: 1736
  ref <308>: DATABASE ACCESSION NUMBER: SWISS-Prot / BAA03116
  ref <309>: DATABASE ENTRY DATE: 2001-10-16

SEQ ID NO: 1741 - DNA, 1680 bp, Homo sapiens; identical to SEQ ID NO: 1737
  ref <308>: DATABASE ACCESSION NUMBER: EMBL / M73812
  ref <309>: DATABASE ENTRY DATE: 2000-03-04

SEQ ID NO: 1742 - protein, 410 aa, Homo sapiens; identical to SEQ ID NO: 1738
  ref <308>: DATABASE ACCESSION NUMBER: SWISS-Prot / P24864
  ref <309>: DATABASE ENTRY DATE: 2002-06-15

SEQ ID NO: 1743 - DNA, 467 bp, Rattus norvegicus
  ref <308>: DATABASE ACCESSION NUMBER: EMBL / D14418
  ref <309>: DATABASE ENTRY DATE: 1999-01-21
tgccaagtggcgagtgcggctggccatcattgaatacatgcctctgctggctggacagctcggtgtggaattttttgatgagaaacttaactctttgtgtatggcctggctagtggatcatgtctatgctatccgtgaggctgccaccagcaaccttaagaagctagtggagaagttcgggaaggagtgggcccatgccactatcatccccaaggtcttagccatgtctggagaccctaactacctgcaccgaatgactacactcttctgcatcagtgtattgtctgaggtctgtgggcaggatattaccacgaagcacatgctgcccacagttcttcgtatggctggggacccagtcgccaatgtccgcttcaatgtggccaagtcactacagaagataggacccattcttgataacagcaccctgcaaagtgaagtcaagcctatcctagagaagctgacccagg

SEQ ID NO: 1744 - protein, 155 aa, Rattus norvegicus
  ref <308>: DATABASE ACCESSION NUMBER: SWISS-Prot / BAA21903
  ref <309>: DATABASE ENTRY DATE: 2001-12-01
AKWRVRLAIIEYMPLLAGQLGVEFFDEKLNSLCMAWLVDHVYAIREAATSNLKKLVEKFGKEWAHATIIPKVLAMSGDPNYLHRMTTLFCISVLSEVCGQDITTKHMLPTVLRMAGDPVANVRFNVAKSLQKIGPILDNSTLQSEVKPILEKLTQ

SEQ ID NO: 1745 - DNA, 1767 bp, Homo sapiens
  ref <308>: DATABASE ACCESSION NUMBER: EMBL / M31786
  ref <309>: DATABASE ENTRY DATE: 1999-06-30
atggcggcggccgacggcgacgactcgctgtaccccatcgcggtgctcatagacgaactccgcaatgaggacgttcagcttcgcctcaacagcatcaagaagctgtccaccatcgccttggcccttggggttgaaaggacccgaagtgagcttctgcctttccttacagataccatctatgatgaagatgaggtcctcctggccctggcagaacagctgggaaccttcactaccctggtgggaggcccagagtacgtgcactgcctgctgccaccgctggagtcgctggccacagtggaggagacagtggtgcgggacaaggcagtggagtccttacgggccatctcacacgagcactcgccctctgacctggaggcgcactttgtcgcgctagtgaagcggctggcgggcggcgactggttcacctcccgcacctcggcctgcggcctcttctccgtctgctacccccgagtgtccagtgctgtgaaggcggaacttcgacagtacttccggaacctgtgctcagatgacacccccatggtgcggcgggccgcagcctccaagctgggggagtttgccaaggtgctggagctggacaacgtcaagagtgagatcatccccatgttctccaacctggcctctgacgagcaggactcggtgcggctgctggcggtggaggcgtgcgtgaacatagcccagcttctgccccaggaggatctggaggccctggtgatgcccactctgcgccaggccgctgaagacaagtcctggcgcgtccgctacatggtggctgacaagttcacagagctccagaaagcagtggggcctgagatcaccaagacagacctggtccctgccttccagaacctgatgaaagactgtgaggccgaggtgagggccgcagcctcccacaaggtcaaagagttctgtgaaaacctctcagctgactgtcgggagaatgtgatcatgtcccagatcttgccctgcatcaaggagctggtgtccgatgccaaccaacatgtcaagtctgccctggcctcagtcatcatgggtctctctcccatcttggggaaagacaacaccatcgagcacctcttgcccctcttcctggctcagctgaaggatgagtgccctgaggtacggctgaacatcatctctaacctggactgtgtgaacgaggtgattggcatccggcagctgtcccagtccctgctccctgccattgtggagctggctgaggacgccaagtggcgggtgcggctggccatcattgagtacatgcccctcctggctggacagctgggagtggagttctttgatgagaaacttaactccttgtgcatggcctggcttgtggatcatgtatatgccatccgcgaggcagccaccagcaacctgaagaagctagtggaaaagtttgggaaggagtgggcccatgccacaatcatccccaaggtcttggccatgtccggagaccccaactacctgcaccgcatgactacgctcttctgcatcaatgtgctgtctgaggtctgtgggcaggacatcaccaccaagcacatgctacccacggttctgcgcatggctggggacccggttgccaatgtccgcttcaatgtggccaagtctctgcagaagatagggcccatcctggacaacagcaccttgcagagtgaagtcaagcccatcctagagaagctgacccaggaccaggatgtggacgtcaaatactttgcccaggaggctctgactgttctgtctctcgcc

SEQ ID NO: 1746 - protein, 588 aa, Homo sapiens
  ref <308>: DATABASE ACCESSION NUMBER: SWISS-Prot / AAA35531
  ref <309>: DATABASE ENTRY DATE: 2002-06-15
AAADGDDSLYPIAVLIDELRNEDVQLRLNSIKKLSTIALALGVERTRSELLPFLTDTIYDEDEVLLALAEQLGTFTTLVGGPEYVHCLLPPLESLATVEETVVRDKAVESLRAISHEHSPSDLEAHFVPLVKRLAGGDWFTSRTSACGLFSVCYPRVSSAVKAELRQYFRNLCSDDTPMVRRAAASKLGEFAKVLELDNVKSEIIPMFSNLASDEQDSVRLLAVEACVNIAQLLPQEDLEALVMPTLRQAAEDKSWAVRYMVADKFTELQKAVGPEITKTDLVPAFQNLMKDCEAEVRAAASHKVKEFCENLSADCRENVIMSQILPCIKELVSDANQHVKSALASVIMGLSPILGKDNTIEHLLPLFLAQLKDECPEVRLNIISNLDCVNEVIGIRQLSQSLLPAIVELAEDAKWRVRLAIIEYMPLLAGQLGVEFFDEKLNSLCMAWLVDHVYAIREAATSNLKKLVEKFGKEWAHATIIPKVLAMSGDPNYLHRMTTLFCINVLSEVCGQDITTKHMLPTVLRMAGDPVANVRFNVAKSLQKIGPILDNSTLQSEVKPILEKLTQDQDVDVKYFAQEALTVLSLA

SEQ ID NO: 1747 - DNA, 579 bp, Rattus norvegicus
  ref <308>: DATABASE ACCESSION NUMBER: EMBL / D14419
  ref <309>: DATABASE ENTRY DATE: 1999-01-21
catgagccagaatttgactacttgaaaagcttagaaatagaagagaagatcaacaaaattaggtggttaccccagagaaatgctgcccagtttttattgtctaccaatgataaaacaataaaattatggaaaatcagtgaaagagacaaaagaccagaaggctataacttgaaagaggaagatgggaggtatagagaccctactacagtcactacactacgagtgccggtgtttaggcccatggatctaatggtggaggccagtccgcggagaatatttgccaacgcccatacctaccacatcaactccatttctatcaatagtgattatgaaacctacttatcagcagatgatttgcgaattaatctctggcatctggaaattacagacaggagttttagtattgtggacattaagcctgccaatgtggaggagctcacggaggtgatcacagccgcagagttccatcccaacagctgtaacacgtttgtgtacagcagcagtaaagggaccattcgcttatgtgacatgagggcatctgcactctgtgacaggcattctaaactgtttgaagaaccc

SEQ ID NO: 1748 - protein, 447 aa, Rattus norvegicus
  ref <308>: DATABASE ACCESSION NUMBER: SWISS-Prot / AAA41910
  ref <309>: DATABASE ENTRY DATE: 2001-10-16
MAGAGGGNDIQWCFSQVKGAVDDDVAEADIISTVEFNHSGELLATGDKGGRVVIFQQEQENKIQSHSRGEYNVYSTFQSHEPEFDYLKSLEIEEKINKIRWLPQKNAAQFLLSTNDKTIKLWKISERDKRPEGYNLKEEDGRYRDPTTVTTLRVPVFRPMDLMVEASPRRIFANAHTYHINSISINSDYETYLSADDLRINLWHLEITDRSFNIVDIKPANMEELTEVITAAEFHPNSCNTFVYSSSKGTIRLCDMRASALCDRHSKLFEEPEDPSNRSFFSEIISSISDVKFSHSGRYMMTRDYLSVKVWDLNMENRPVETYQVHEYLRSKLCSLYENDCIFDKFECCWNGSDSVVMTGSYNNFFRMFDRNTKRDITLEASRENNKPRTVLKPRKVCASGKRKKDEISVDSLDFNKKILHTAWHPKENIIAVATTNNLYIFQDKVN

SEQ ID NO: 1749 - DNA, 2131 bp, Homo sapiens
  ref <308>: DATABASE ACCESSION NUMBER: Refseq / NM_002717
  ref <309>: DATABASE ENTRY DATE: 2001-12-10
ccgccgccatccgccctctctacccccccatccccaggtgaggggggtgagttcaggaagcggagaccccgaggaacccagcagggtcaccatttgcagcgcaacatggcaggagctggaggagggaatgatattcagtggtgtttttctcaggtgaaaggagcagtagatgatgatgtagcagaagcagatataatttctacagtagaatttaatcattctggagaattactagcaacaggagataaaggtggtagagttgtcatctttcaacaggagcaggagaacaaaatccagtctcatagcagaggagaatataatgtttacagcaccttccagagccatgaaccagagtttgactacttgaaaagtttagaaatagaagaaaagatcaataaaattaggtggttaccccagaaaaatgctgctcagtttttattgtctaccaatgataaaacaataaaattatggaaaatcagtgaaagggacaaaagaccagaagggtataacttgaaagaggaggatggaaggtatagagatcctactacagttactacactacgagtgccagtctttaggcctatggatctaatggttgaggccagtccacgaagaatatttgccaatgctcatacatatcacatcaactcaatttctattaatagtgattatgaaacatatttatctgcagatgatttgcggattaatctttggcatctggaaattacagacaggagttttaacattgtggatatcaagcctgccaatatggaagagctaacagaggtgattacagcagcagaatttcatccaaacagctgtaacacatttgtatacagcagcagtaaaggaactattcggctatgtgacatgagggcatctgccctctgtgatagacattctaaattgtttgaagaacctgaagatcccagtaacaggtcatttttttccgaaatcatctcctctatttcggatgtaaaattcagccatagtggtcgatatatgatgactagagactatttgtcagtcaaaatttgggacttaaatatggaaaacaggcctgtggaaacataccaggtgcatgaatacctcagaagtaaactctgttcactgtatgaaaatgactgcatatttgacaaatttgaatgttgttggaatggatctgacagtgttgtcatgactggatcttacaataatttcttcagaatgtttgacagaaacacaaagcgagacataaccctagaagcatcgcgggaaaacaataagcctcgcacagttctgaagcctcgcaaagtctgtgcaagtggcaagcgaaagaaagatgaaataagtgttgacagcctagacttcaataagaaaatccttcacacagcctggcaccccaaggaaaatatcattgccgtagctactacaaacaatctgtatatatttcaagacaaagtgaattagggttggcattcctagcagaagaacccacttcctgcttagttgagatagttgaatctagcattcgttcctataaaagagagaggtccattgtggcgcccctttccagtgtttgacagtgtgccattcgacaacacattgttatagctacatggagaaagctctgtggattcatcactgtggtgttctccatgtctgctagccatttaggtaagggtagggcacttttaatttaaatgacttcttgcaccatcttgcctaatggactagattggactgtatcaacattgatttactccactttttatgccttccattgtgatgacgtcaaacacagtgaaagccttcagtcatgctatgggatttaattgtgtatcctcattactgtatcatttgtggggtacaccccttccccctttttttaaattaaatacagctcattcttactgtggcttgtagcattcctcctcttctggcctcctggactgctccccttcatctcttacccttgccccctccacccggtcttggtggtggtatattaaaaaaagaaagaatgaaagcacacaaaatgagtcagtttggggtcagtggtataaagggggtatatgttgcaaacaaatgttttagtaacagttggctgtaatcactcctcgccgtgtctggcactgaaaataaggaaaag

SEQ ID NO: 1750 - protein, 447 aa, Homo sapiens
  ref <308>: DATABASE ACCESSION NUMBER: SWISS-Prot / Q00007
  ref <309>: DATABASE ENTRY DATE: 2001-10-16
MAGAGGGNDIQWCFSQVKGAVDDDVAEADIISTVEFNHSGELLATGDKGGRVVIFQQEQENKIQSHSRGEYNVYSTFQSHEPEFDYLKSLEIEEKINKIRWLPQKNAAQFLLSTNDKTIKLWKISERDKRPEGYNLKEEDGRYRDPTTVTTLRVPVFRPMDLMVEASPRRIFANAHTYHINSISINSDYETYLSADDLRINLWHLEITDRSFNIVDIKPANMEELTEVITAAEFHPNSCNTFVYSSSKGTIRLCDMRASALCDRHSKLFEEPEDPSNRSFFSEIISSISDVKFSHSGRYMMTRDYLSVKIWDLNMENRPVETYQVHEYLRSKLCSLYENDCIFDKFECCWNGSDSVVMTGSYNNFFRMFDRNTKRDITLEASRENNKPRTVLKPRKVCASGKRKKDEISVDSLDFNKKILHTAWHPKENIIAVATTNNLYIFQDKVN

SEQ ID NO: 1751 - DNA, 512 bp, Rattus norvegicus
  ref <308>: DATABASE ACCESSION NUMBER: EMBL / D14421
  ref <309>: DATABASE ENTRY DATE: 1999-01-21
ccgcaaaatcaacaacagtttcctgcgcgaccacagctatgcaaccgaagctgacattatctctacggtagaattcaaccacactggagagttactagcgacgggggacaaggggggtagggttgtaatatttcagcgagaacaggagagtaaaaatcaggttcatcgtaggggtgaatacaatgtttacagcacattccagagccatgaacccgagttcgattacctgaaaagtttagaaatagaagaaaaaatcaataaaataagatggctccctcaacaaaatgcagcttactttcttctgtctaccaacgataaaactgtgaagctatggaaagttagtgagcgtgataagaggccagaaggctacaacctgaaagatgaggagggccggctccgggatcctgccaccatcacaaccctgcgggtgcctgtcctgagacccatggacttgatggtggaggccaccccacgaagagtgtttgccaatgcgcacacataccacatcaact

SEQ ID NO: 1752 - protein, 443 aa, Rattus norvegicus
  ref <308>: DATABASE ACCESSION NUMBER: SWISS-Prot / BAA03313
  ref <309>: DATABASE ENTRY DATE: 2000-05-30
MEEDIDTRKINNSFLRDHSYATEADIISTVEFNHTGELLATGDKGGRVVIFQREQESKNQVHRRGEYNVYSTFQSHEPEFDYLKSLEIEEKINKIRWLPQQNAAYFLLSTNDKTVKLWKVSERDKRPEGYNLKDEEGRLRDPATITTLRVPVLRPMDLMVEATPRRVFANAHTYHINSISVNSDYETYMSADDLRINLWNFEITNQSFNIVDIKPANMEELTEVITAAEFHPHHCNTFVYSSSKGTIRLCDMRASALCDRHTKFFEEPEDPSNRSFFSEIISSISDVKFSHSGRYIMTRDYLTAKVWDLNMENRPVETYQVHDYLRSKLCSLYENDCIFDKFECVWNGSDSVIMTGSYNNFFRMFDRNTKRDVTLEASRENSKPRAILKPRKVCVGGKRRKDEISVDSLDFSKKILHTAWHPSENIIAVAATNNLYIFQDKVN

SEQ ID NO: 1753 - DNA, 3441 bp, Homo sapiens
  ref <308>: DATABASE ACCESSION NUMBER: Refseq / NM_004576
  ref <309>: DATABASE ENTRY DATE: 2000-11-01
ggccaggcaagcctgaatcctgtccctgccatctcgccactgcagctcgggtccagaaaggcaccattttgtcgcggctgcccgctctcccagggggaggagggatcttttttgcattttggagcggctgccaaggaggggaacctgttgggcatctccccagacccgcttgtgagcgcctccggggcgggcgggcgggaccagacccctcggggcacggcgtatcttggcacccggaggcagcggaggcaggcgcagcatcctcgctgggaactggagctggagtgagcgcaccgcgcgggaggagccgccgcagcctcgcagaacccgagtggaggaggtgacagctccattgccgggtttttattttttttctctccgcctccccgtctcctcctcaggctcggaccatggtgcagtcccactggctcccctgcccccctctcctgtgagactggctgcggggagggatcatggatacttgtctgccggcttctggttcccacgcaagtaagcctgctgtcaatggaggaggacattgatacccgcaaaatcaacaacagtttcctgcgcgaccacagctatgcgaccgaagctgacattatctctacggtagaattcaaccacacgggagaattactagcgacaggggacaaggggggtcgggttgtaatatttcaacgagagcaggagagtaaaaatcaggttcatcgtaggggtgaatacaatgtttacagcacattccagagccatgaacccgagttcgattacctgaagagtttagaaatagaagaaaaaatcaataaaataagatggctcccccagcagaatgcagcttactttcttctgtctactaatgataaaactgtgaagctgtggaaagtcagcgagcgtgataagaggccagaaggctacaatctgaaagatgaggagggccggctccgggatcctgccaccatcacaaccctgcgggtgcctgtcctgagacccatggacctgatggtggaggccaccccacgaagagtatttgccaacgcacacacatatcacatcaactccatatctgtcaacagcgactatgaaacctacatgtccgctgatgacctgaggattaacctatggaactttgaaataaccaatcaaagttttaatattgtggacattaagccagccaacatggaggagctcacggaggtgatcacagcagccgagttccacccccatcattgcaacaccttcgtgtacagcagcagcaaagggacaatccggctgtgtgacatgcgggcatctgccctgtgtgacaggcacaccaaattttttgaagagccggaagatccaagcaacagatcatttttctctgaaattatctcttcgatttcggatgtgaagttcagccacagtgggaggtatatcatgaccagggactacttgaccgtcaaagtctgggatctcaacatggaaaaccgccccatcgagacttaccaggttcatgactacctccgcagcaagctgtgttccctctatgaaaatgactgcatttttgataaatttgagtgtgtgtggaatgggtcagacagtgtcatcatgacaggctcctacaacaacttcttcaggatgttcgacagaaacaccaagcgtgatgtgacccttgaggcttcgagggaaaacagcaagccccgggctatcctcaaaccccgaaaagtgtgtgtggggggcaagcggagaaaagacgagatcagtgtcgacagtctggactttagcaaaaagatcttgcatacagcttggcatccttcagaaaatattatagcagtggcggctacaaataacctatatatattccaggacaaggttaactaggtggacaagttattacttaataatctcacatactgaatactagtcaaacaagtttttaaatgtttctttgggtcttcatttgatgcattgactttaatttccctatacaggaaatgattggaatagaattaaaaggagtccaacattcccagctccccagttctaagaaacttttgtcaaacccaataggtttgggacacttctgtttagaattgaaagctgccagctaacagtaattcttccatagttgacttgaacttctgatgcttttattgcccagttttctctggtgggtccagtgttttgttcctaggtgtctgctgcgataaaatgaggttgtctgtagtatttaaggagaaaagagataagttttttttaattaagcaattccatttgattgaaaaaaatcaacaaaaaataaacaccgtttactcttagacaaattcttcttgttttgtgaaaaaccagaactagtcagtatctcctgcccctccaccatttttttttccattttccattttcctttgaacaatttcatttaagccagagatttattgcatgaagctgagaagaggatgcagaatgacaaggaaagggcacatcaaccctgctatgctctttttttgtaagctccatagaaacagcctgagaatttggctagggaacttgaatgcttcaggggacagaaagagagcactttcgacacagtgcttcccagagtgagcttggcagggccaggcggggccaaattccatctgctgccttgttactcttgctttttgtgctcttaaatggctccatataatcttctacttacatgttccttggcttttttctcttcaaccttttccagcttatttattccattgacttctaaaggccgagtcctgggtgcttattatctggtgttctaaatgaagcagtaagttggaagcagtgccaccacccctgagtccctgagaaaggctggtctgttctttttgggtgtttctcctaagcagcaccctcccctcctcctggttttggtaaccaaaagtaacaatccatcaacctccattgtacctagaacaaaaatagccaataaaaacgctgagttgtgaagtccaatcaggcacttctaactcaccccaagctcgccatctggaaaaacagaccagaaggcttctcttctacagaaatgaactgtggggaaatcaagcagctgtgacatgaagtgaatgaagtccacttgaagctgtggaagatggttcatccttttccccagttgaggatccagatttataacttctagaaagccatttccagaaggttctatgtggcacacccctaggaaaggcactaaatgcatgcaaaggatttataaacttaggaaagtagatgggtggagtccagaaaactggttctgggttaatatctctacatctgtcttgatgactcatttctcctaactcccatttagtgcagggtaaatggtttgagatgagagtttttcaatgaaagggaaattttctttcagtttacagatgtattagaagtcctgactttcaagtgtaatttgctttggaggaggaaaaaaaaaaaaaa

SEQ ID NO: 1754 - protein, 443 aa, Homo sapiens
  ref <308>: DATABASE ACCESSION NUMBER: Refseq / NP_004567
  ref <309>: DATABASE ENTRY DATE: 2000-11-01
MEEDIDTRKINNSFLRDHSYATEADIISTVEFNHTGELLATGDKGGRVVIFQREQESKNQVHRRGEYNVYSTFQSHEPEFDYLKSLEIEEKINKIRWLPQQNAAYFLLSTNDKTVKLWKVSERDKRPEGYNLKDEEGRLRDPATITTLRVPVLRPMDLMVEATPRRVFANAHTYHINSISVNSDYETYMSADDLRINLWNFEITNQSFNIVDIKPANMEELTEVITAAEFHPHHCNTFVYSSSKGTIRLCDMRASALCDRHTKFFEEPEDPSNRSFFSEIISSISDVKFSHSGRYIMTRDYLTVKVWDLNMENRPIETYQVHDYLRSKLCSLYENDCIFDKFECVWNGSDSVIMTGSYNNFFRMFDRNTKRDVTLEASRENSKPRAILKPRKVCVGGKRRKDEISVDSLDFSKKILHTAWHPSENIIAVAATNNLYIFQDKVN

SEQ ID NO: 1755 - DNA, 512 bp, Rattus norvegicus; identical to SEQ ID NO: 1751
  ref <308>: DATABASE ACCESSION NUMBER: EMBL / D14421
  ref <309>: DATABASE ENTRY DATE: 1999-01-21

SEQ ID NO: 1756 - protein, 443 aa, Rattus norvegicus; identical to SEQ ID NO: 1752
  ref <308>: DATABASE ACCESSION NUMBER: SWISS-Prot / BAA03313
  ref <309>: DATABASE ENTRY DATE: 2000-05-30

SEQ ID NO: 1757 - DNA, 3441 bp, Homo sapiens; identical to SEQ ID NO: 1753
  ref <308>: DATABASE ACCESSION NUMBER: Refseq / NM_004576
  ref <309>: DATABASE ENTRY DATE: 2000-11-01

SEQ ID NO: 1758 - protein, 443 aa, Homo sapiens; identical to SEQ ID NO: 1754
  ref <308>: DATABASE ACCESSION NUMBER: Refseq / NP_004567
  ref <309>: DATABASE ENTRY DATE: 2000-11-01

SEQ ID NO: 1759 - DNA, 796 bp, Rattus norvegicus
  ref <308>: DATABASE ACCESSION NUMBER: EMBL / D14568
  ref <309>: DATABASE ENTRY DATE: 1999-07-16
gaagatccgggtacgccgcgtcccaaggaacctacagccgccgccagcgccgcccgcctagcaagatgggaaatgaggcgagttaccctttggaaatgtgctcacacttcgatgctgatgagattaaaaggctaggaaagagattcaagaagcttgacttggacaactctggttctttgagcgtggaggagttcatgtctctgcctgagttacaacagaaccctttagtacagcgggtcatagatatattcgacacagacgggaatggagaagtggacttcaaagaattcattgaaggagtctctcagttcagtgtcaaaggcgataaggaacagaagttgaggttcgctttccgtatctacgacatggataaagacggctatatttccaatggagagctcttccaggtgttgaagatgatggtgggcaacaacctgaaagatacgcagttacagcagattgtagacaaaaccataataaacgcagataaggacggggacgggagaatatcctttgaggagttctgtgctgttgtaggtggcctagatatccacaaaaagatggtggtggatgtgtgactctttgaagactctaccacccagcacttttgctttcttctccatctctgaagatctgctcaagacgtccagcagtgctctctgtgtgtgtaaatggaagtatttttctctgtgaagccacattttccaacatgagcctcatgaagccaacgaagtgttattgaactcctaccctctcaataactcagtgtagcactttcaagtttgaggccatggtg

SEQ ID NO: 1760 - protein, 169 aa, Rattus norvegicus
  ref <308>: DATABASE ACCESSION NUMBER: SWISS-Prot / P06705
  ref <309>: DATABASE ENTRY DATE: 2002-06-15
GNEASYPLEMCSHFDADEIKRLGKRFKKLDLDNSGSLSVEEFMSLPELQQNPLVQRVIDIFDTDGNGEVDFKEFIEGVSQFSVKGDKEQKLRFAFRIYDMDKDGYISNGELFQVLKMMVGNNLKDTQLQQIVDKTIINADKDGDGRISFEEFCAVVGGLDIHKKMVVDV

SEQ ID NO: 1761 - DNA, 2548 bp, Homo sapiens
  ref <308>: DATABASE ACCESSION NUMBER: EMBL / M30773
  ref <309>: DATABASE ENTRY DATE: 1999-07-02
aggctgggggacaaccagaggccagggagaaagaggagacagaggaagcaccgagggtgactacgttgtcttccctagatcaattttcttctggatggctcgtgctgagtggtagatgagcgaatcgatgagtccagccactgtgaacatgcccccaatgatggcgcacacacctgtcaggaagtgggtgaaggacctgtgcttctccgtcagcttcaccatcatgggcgagagctcatagaggacgaagactccgggaaggccttggtcgcccaacagcccattggcaaccttctcatgtctggtcacagagaactgatttgtcctcagtacctctccgtccaccttcatgtacacagtgggcaccaccttcacaaagtgctgtaacacctgtgaaggcagcggctccggcgcgagcgcgaggctgcagcccccgagtttcccggccgtcttcgccccctctccccctcctttcttcttctctgcctctcctgcctctcgccgctgctcctcccgcgctctccggctctgaatgtcgaccttaatttatttccccctaccctgcccgctccctcgcgtgcccaatcgcccggccggcgcgggccccgcgcgccgcctccccctccccacgcgcgccccctccccgccggcgacccgagggccgcagctgggccgccgccgccgtttcctgcgagccagcctgagcgcaacacttctccgagccagcgagccagcgagccgccgacccgccgagcaaaatgggaaatgaggcaagttatcctttggaaatgtgctcacactttgatgcggatgaaattaaaaggctaggaaagagatttaagaagcttgatttggacaattctggttctttgagtgtggaagagttcatgtctctgcctgagttacaacagaatcctttagtacagcgagtaatagatatattcgacacagatgggaatggagaagtagactttaaagaattcattgagggcgtctctcagttcagtgtcaaaggagataaggagcagaaattgaggtttgctttccgtatctatgacatggataaagatggctatatttccaatggggaactcttccaggtattgaagatgatggtggggaacaatctgaaagatacacagttacagcaaattgtagacaaaaccataataaatgcagataaggatggagatggaagaatatcctttgaagaattctgtgctgttgtaggtggcctagatatccacaaaaagatggtggtagatgtgtgactcttatcagagagtaccacccaacacttttgctttcttctccatctctgaagatctgctcaagacgtccagcaatgctctctgtgtatttaaatggaagtatttttctctgtgaagccacattttccaacatgagcctcatgaagccaactaagtgttattgaactgtaattctctcaataactcagtgtagcactttaaagtctgaaggacagcaacatgaaaagagcatatcaatgtggtggagaaagggaaggggttggctttttaatttatttttcttcatcttttataacaagaaagtatctatatatacatatgtaaatatttatatatagatatatgtagctttctatatatgtagtaggttggctttaatttaatatccttgattcagaaacaaaacaatagagtacaaaagtgccaagcagaacataaaacatccttacttttatttcacacagttttatatatagatagaagactgtacaatttgagccgggtgttaggccagctattttccttttcctgtgctttctcctttgagagattgacaaagcatttgttaacgtcctattatttaccttaattacatttttgtaacaaaggagtctgtaactttatttatacttatgaatatatccagggactacttctcattgctgagcagcttttaatacacctctgcttgaggagaaagtctagttcattgctactgccaagagctagttcttgtgttcatatagtaactgcacagggcttatagctgcttcattctgctactttgtaactaggagccattgcatttattaaatgtccctcagtaacgttaagtgctagttgtgattttatacataaaggccagaagctgtctgaggcaatcatgattgattgtatgtatcacttactgaagaatacctgaagtgatcatgtaactacttataagggatatccatttgtttgattacatgggtaaataatttgtcattaaacttgtgtttgaatcatgaattcccttgtttcaaaagacttgcagctaatctaaaaaactggtgatatttaatatgcatgtatgtatctaaacacccacatatatttgtggtttaagtgtgagaaatcttgctaatctatatgccacagaagagcaaaattgtatccaaatttatgccacttaaatttctttaccacgagggatagagcatgcatactggtttttttttcttgatttgcccatataattggtaatggataacttaataaatttgtgtgatataaaa

SEQ ID NO: 1762 - protein, 169 aa, Homo sapiens; identical to SEQ ID NO: 1760

SEQ ID NO: 1763 - DNA, 1182 bp, Rattus norvegicus
  ref <308>: DATABASE ACCESSION NUMBER: EMBL / D14591
  ref <309>: DATABASE ENTRY DATE: 2000-03-08
atgcccaagaagaagccgacgcccatccagctgaacccggcccccgatggctccgcggttaacgggaccagctcggccgagaccaacctggaggccttgcagaagaagctggaggagctggagctggatgagcagcagcggaagcgccttgaggcctttctgacgcagaagcagaaggtgggagagttgaaggatgatgactttgagaagatcagtgaactgggggctggcaatggtggagtggtgttcaaggtctcccacaagccatctggcctggttatggctaggaagctaattcacctggagatcaaacccgcaatccggaaccagatcatccgggagctgcaggtgctgcatgagtgcaactccccgtacatagtgggcttctacggggccttctacagtgacggcgagatcagcatctgcatggagcacatggatggtgggtccttggatcaagtgctgaagaaagctggaagaattcctgagcaaattttaggaaaagtcagcatcgctgtgataaaaggcctgacatatctacgagagaagcacaagattatgcacagagatgtcaagccttccaacattctagtgaactcacgtggggagatcaaactctgcgattttggggtcagcgggcagctaattgactccatggccaactccttcgtgggaacaaggtcctacatgtcgcctgagagactccaggggactcactactctgtgcagtcggacatctggagcatggggctctctctggtggagatggcagttggaagataccccattcctcctcctgatgccaaggagctggagctgctgtttggatgccaggtggaaggagacgcggccgaaacgccacccaggccaaggacccctgggaggcccctcagctcatatggaatggatagccgacctcccatggcaatttttgagttgttggattacatcgtcaatgagcctcctccaaaactgcccagtggagtattcagtctggaatttcaggattttgtgaataagtgcttaataaagaaccctgcagagagagcagatctgaagcagctcatggtacatgctttcatcaagagatctgatgccgaggaggtagacttcgcaggctggctctgctccaccattgggcttaaccagcccagcacaccaacccacgctgccagcatctga

SEQ ID NO: 1764 - protein, 392 aa, Rattus norvegicus
  ref <308>: DATABASE ACCESSION NUMBER: SWISS-Prot / Q01986
  ref <309>: DATABASE ENTRY DATE: 2002-06-15
PKKKPTPIQLNPAPDGSAVNGTSSAETNLEALQKKLEELELDEQQRKRLEAFLTQKQKVGELKDDDFEKISELGAGNGGVVFKVSHKPSGLVMARKLIHLEIKPAIRNQIIRELQVLHECNSPYIVGFYGAFYSDGEISICMEHMDGGSLDQVLKKAGRIPEQILGKVSIAVIKGLTYLREKHKIMHRDVKPSNILVNSRGEIKLCDFGVSGQLIDSMANSFVGTRSYMSPERLQGTHYSVQSDIWSMGLSLVEMAVGRYPIPPPDAKELELLFGCQVEGDAAETPPRPRTPGRPLSSYGMDSRPPMAIFELLDYIVNEPPPKLPSGVFSLEFQDFVNKCLIKNPAERADLKQLMVHAFIKRSDAEEVDFAGWLCSTIGLNQPSTPTHAASI

SEQ ID NO: 1765 - DNA, 678 bp, Homo sapiens
  misc_feature (1)..(678): n=a, c, g or t
  ref <308>: DATABASE ACCESSION NUMBER: EMBL / BI549938
  ref <309>: DATABASE ENTRY DATE: 2001-09-06
agcggggagggcggctaggagcacggcggcggcggcactttccccggcaggagctggagctgggctctggtgcgcgcgcggctgtgccgcccgagccggagggactggtggttgagagagagagaggaagggaatcccgggctgccgaaccgcacgttcagcccgctccgctcctgcagggcagcctttcggctctctgcgcgcgaagccgagtcccgggcgggtggggcgggggtccactgagaccgctaccggcccctcggcgctgacgggaccgcgcggggcgcacccactgaaggcagccccggggcccgcggcccggacttggtcctgcgcagcgggcgcggggcagcgcagcgggaggaagcgagaggtgctgccctccccccggagttggaagcgcgttacccgggtccaaaatgcccaagaagaagccgacgcccatccagctgaacccggcccccgacggctctgcagttaacgggaccagctctgcggagaccaacttggaggccttgcagaagaagctggaggagctagagcttgatgagcagcagcgaaagcgccttgaggcctttcttacccagaagcagaaggtgggagaactgaaggatgacgactttgagaagatcagtgagctgggggctggcaatggcggtgtggtgttcaaggtctccn

SEQ ID NO: 1766 - protein, 392 aa, Homo sapiens
  ref <308>: DATABASE ACCESSION NUMBER: SWISS-Prot / Q02750
  ref <309>: DATABASE ENTRY DATE: 2002-06-15
PKKKPTPIQLNPAPDGSAVNGTSSAETNLEALQKKLEELELDEQQRKRLEAFLTQKQKVGELKDDDFEKISELGAGNGGVVFKVSHKPSGLVMARKLIHLEIKPAIRNQIIRELQVLHECNSPYIVGFYGAFYSDGEISICMEHMDGGSLDQVLKKAGRIPEQILGKVSIAVIKGLTYLREKHKIMHRDVKPSNILVNSRGEIKLCDFGVSGQLIDSMANSFVGTRSYMSPERLQGTHYSVQSDIWSMGLSLVEMAVGRYPIPPPDAKELELMFGCQVEGDAAETPPRPRTPGRPLSSYGMDSRPPMAIFELLDYIVNEPPPKLPSGVFSLEFQDFVNKCLIKNPAERADLKQLMVHAFIKRSDAEEVDFAGWLCSTIGLNQPSTPTHAAGV

SEQ ID NO: 1767 - DNA, 1062 bp, Rattus norvegicus
  ref <308>: DATABASE ACCESSION NUMBER: EMBL / D14688
  ref <309>: DATABASE ENTRY DATE: 1998-10-27
cctccgctggaagcagtcgccggtctggtcctcttgtgcgtgcagttcaggtcagatttgaaccgccaccatgtcgagcaaaaaagcaaagaccaagaccaccaaaaagcgccctcagcgcgcaacgtccaacgtgttcgccatgtttgaccagtcccagatccaggagttcaaagaggccttcaacatgatcgaccagaaccgggacggcttcattgacaaggaggacctacacgacatgctcgcgtctctggggaagaaccccaccgacgcctacctggacgccatgatgaacgaggccccgggccccatcaatttcaccatgttcctcaccatgtttggagagaagctgaacggcaccgacccagaggacgtcatcagaacacgcttcgcttgcttcgatgaggacacgacaggcaccatccaggaggattacctgagggagctgctgaccaccatgggtgaccgcttcacagatgaggaagtggatgagctgtacagggaggcccccatcgacaaaaagggcaatttcaactacatcgagttcacgcgcatcctcaagcacggagcgaaagacaaagatgactgaagagctgcagctgacattcctgttgagtttccttattcacttcatgtctcagacacgcaccccataggacctactgtgtgccactttgtccctcagacaccccctcccatagggcctactgtgtgccgcttagtccctcagacaccccctcccatagggcctactgtgtgccacttagtccctcagacaccccctcccatagggcctactgtgtgccactctgtccctcagacaccccctcccataggacctactgtgtaccacttggtttctcagacagccccacccccaaaccccctaaggacctactgcgggccacttagtttcacagcctttcctcttttttaatgtatttattccagaccctttctgccacttagcatgtgtataatcagactggaatggggacaatgttgtaaattgtactgaaaatgagatgcaaataaaaaaatcaaccaatgtgaaagcccagg

SEQ ID NO: 1768 - protein, 171 aa, Rattus norvegicus
  ref <308>: DATABASE ACCESSION NUMBER: SWISS-Prot / P18666
  ref <309>: DATABASE ENTRY DATE: 2001-10-16
SSKKAKTKTTKKRPQRATSNVFAMFDQSQIQEFKEAFNMIDQNRDGFIDKEDLHDMLASLGKNPTDAYLDAMMNEAPGRINFTMFLTMFGEKLNGTDPEDVIRNAFACFDEEATGTIQEDYLRELLTTMGDRFTDEEVDELYREAPIDKKGNFNYIEFTRILKHGAKDKDD

SEQ ID NO: 1769 - DNA, 932 bp, Rattus norvegicus
  ref <308>: DATABASE ACCESSION NUMBER: EMBL / D14819
  ref <309>: DATABASE ENTRY DATE: 1999-02-02
gaattccatcatgcatgagattatgtacaactggaggtgctctatgtcctctgtgtgctgctcatggggcgtccagaaccaggtgggtgctgctccagcctcagagtgggagagccagaagctgagcagagccctcgggggccaggaggatctccgcggcctcagacggcacacactcctgcccagctatgtgcgctgtttccttcttgtgaggaaaccagcctgattctagattcttttctacttatagaagcaaatagtgatacaagaactggggaggcggcttcgacgcggaccctacagagcctgtcgtccgccggatagccagcttcactccccgcggacgctccaggctccgagccatctagcgactcggcgagcggcctcaggtggacaatcatctggagagcccgccttgggccagggactttcacttcaagccgagtccccagttcaagaaggaggtacggccgcctccttacccccagctcaggcccaccatggggaagaacaatagcaagctggcccctgaggagctggaagatctggtccagaacacggagttcagcgagcaggagctaaagcagtggtataagggtttcctgaaggactgccccagcggcatcctcaacctggaggagtttcagcaactctacatcaagttctttccttacggagacgcctccaagtttgcacagcatgctttccgcaccttcgacaagaacggcgatggcaccatcgacttccgggagttcatctgcgccctttctgtcacctcccgtggcagctttgagcagaagctcaactgggcctttgagatgtacgacctggacggtgatggacgcatcacacggctggagatgctggagatcattgaggctatctataagatggtgggcaccgtgatcatgatgcgcatgaaccaggaattc

SEQ ID NO: 1770 - protein, 144 aa, Rattus norvegicus
  ref <308>: DATABASE ACCESSION NUMBER: SWISS-Prot / BAA03557
  ref <309>: DATABASE ENTRY DATE: 2003-02-01
MGKNNSKLAPEELEDLVQNTEFSEQELKQWYKGFLKDCPSGILNLEEFQQLYIKFFPYGDASKFAQHAFRTFDKNGDGTIDFREFICALSVTSRGSFEQKLNWAFEMYDLDGDGRITRLEMLEIIEAIYKMVGTVIMMRMNQEF

SEQ ID NO: 1771 - DNA, 4277 bp, Homo sapiens
  ref <308>: DATABASE ACCESSION NUMBER: Refseq / NM_016257
  ref <309>: DATABASE ENTRY DATE: 2002-11-14
ggcggctccggcgcagaccttggagagcacagctgccggcccgcgagccagcctcggttcccgcggcccgccgaggctcggagccatccagcgacccggcgaccggcctcaggccccgccatggggaagaccaacagcaagctggcccccgaggtgctggaggaccttgttcagaacactgagttcagcgagcaggagctgaagcagtggtacaagggcttcctgaaggactgccccagcggcatcctcaacctggaggagtttcagcagctctacatcaagttcttcccctacggcgacgcctccaagttcgcgcagcacgctttccgcaccttcgacaagaacggcgacggcaccatcgacttccgggagttcatctgcgccctgtcggtcacctcccgcggcagcttcgagcagaagctcaactgggcctttgagatgtacgacctggacggcgacgggcgcatcacgcgcctggagatgctggagatcatcgaggcaatctacaagatggtgggcaccgtgatcatgatgcgcatgaaccaggacgggctcacgccccagcagcgtgtggacaagatcttcaagaagatggaccaggataaggacgaccagattacattggaggagttcaaggaggcagccaagagtgacccatccattgtgttgctgctgcagtgtgacatgcagaagtagaagctggtgaggggcagggtccctggccagaaggggcatggccacctcccaacctgatgacctctctggctggcctcccaggaggagggacactccagcccccctctctggcccacccagtcctctgcccaagcccttcctcccctccatcaagatctttgagggaccacctcaccctgcaaaagagacaggtcctccagtaccctgtcttctagccccacctcccacttggccagaaccaatgtccattgggcataggggagttggcttttgccccaggaggtgaggttaaggagttgggggcctggggttctggttaggaattctcttgatcctgggattatgctttataggatgtggtcccacaggcctgtcacagggccaaattgggtctgtccattcctgaggctccagatcccataaagggggtctcttccccatcccttctactctacctggcccttccagccccagcctttggagcgttcattcagtcctttcttcagctaatgattactgagcacctgtttggtgctaaggatatggtcatttacaagacacatcttgtgccctctggaagctcatagggttgtgaggcaaacttccagccgtcagggtctcagctaagcagaaggtgctggaaggctggttagtctgggaggagctatttcatcttccagctcagctccacacaaagctgcagaaggacgaaatgaaaagcatttggaagtttaggagccacgtgagtgaaagttttaagaaaaatgaaatttatgtcatacttatttttttagtaccctttaaaggagctacagtcattttattatttcaggaggttaaaatatactctatattacttggtttattataaaatgattaaatgaatagagaaaatattaattttcaaggggaaaaaacctgagaagaaagggagaaaagaccatgaaatttaccagataacactttttaagactaagtcctgagctgccactctcagcagtttttgctgcttcagctcttcctttttattacctttttcaattcaacaagcaactttctgctacatacttactccggttgggtgctgacttcagggacaggaaaaagcaaggtttgcaaagagtgaaactagtgtatattccgtatcttggtagttcgtttctggattgggtttagtttcagaactggacttgttccttcactgccacagaatcagaaagagctagaagaaaaggctcacctggccactgtttaggcacccagacataatttatggacgaaatgcctaaaaatgtgccaggcatgctctgtttgagaggctttttctaaccccaaatcttagatctgccaggtagttcaacatcttccaagtgtgctggttctgctttccaatgcctgcttcccaattttggatccatgagctatacagctgcatgctttgactgccggaaaaattaatcttgcttcttcatcaggtctttctcctgtacttgtgatcagaaattacctttgacgtgcagtgacagttgatttcctcttgaactgccggtgaaaacagtctagtacacaggtgctgtcagcccagggtgggagcaggaaatgattgctgagcccggggcaggggaattgcatctgcaggaaagagatgcagcatgctcctcactcctgagtgcccacctgtcctgcttctctgcaggtgaaaactctgggggatgctgatcaatagagcttggtcccaagctctactgggcccttggaggtagcaaggccactgggttgctatcctcttgctggggatagcaaccactggtttgcaaccactgggttgctatccttttgctatcctcttgctcatgaccagccatatggtgaggctggggagttcacatcctcaggcaggaactagcagttgtttatccagcaatgcctcaaggatgttgcattgctcccaggagctggctattaggtatgtcttgtgcggtcagtcagcatcacagacacatagatgctcaccagcctggcttagctgggacctaaatcttctggtgaaaagcttttcactaagtgaggttccttccctgcaaatgctgaatctagcctaattcgcaaccacacagaatttcatggctttcaaaggcttgccatgtgccccatctcattctatactcacatcccatggaggtgaggattttcacttcttttctctagacttggaagctgagattcagagaggaagcatcccttgtgcaagatcacatagtcaggaggtgacacagggctaagacttgaaccaaggctctaagaggatttcttcttttcagagtctcttccctgtccatttctgtgactaagctgtgcagaggttgacagcagggcaagttacattgatattcatcctttataggcttcctgctaaaaagcttctgagattgtggtcttccaaaaaaaataggagcttggttgaagtccccacattttcaagcactcagtgttctgcctctggcagctgtgctaacagctcagtgctgtcctgggagtcctctgactcagaaccctcgaagcatcctgcattgtctttacccaccatcatcgtcactaagagaaacatgcctacccatgaaggcgtgtttgattactccaggcttctggacacacatacccatgggtgatttttgctcctcaggcccaatattctcagacagcccagcagtgtgaacacacaatgccaggccaggaactgggaccaccatcttgctgatggaaggaacaacaggtggcccaggacatgctcctgcatactcctgggtgtcccagggactgtgtgctcaggagcactgtggtagagcactggccctgccttgagaagagacacaggtctcccgtccctgcaccagctgagagagacttgccacaaagcacaaggctggcagagatttatgtatgacttgcacagacacaaaaatatacagacaatcaaaacattgatatattcaaactctcctttaaattccaatcttattgcaacaactctgtgaattgcaaggtcccagaatctgccttctcacatactctaccctcattcatccttttgggctaattgatgagcatcttatttcttatctctaaaaattatcagcaaaggctacttcagatggccactttagtcctttcagctgtagtcaggattatttaacttacctgtatatcaaaagtgaagaaaaagttagttcataagtaaaggcactaaatcctttcctgacaatggcagagtctctagaggtagaaatttgccttgctgcagagagagaaggaatggcgtgggatgggggaaagaaaagaaagagaagaagctggggtctccaggcagggtagtaagctgacactaaatattttttacacaaaaatgtattgaagcaacaaatatttcctgaagatccaccctgggtgaggctttgagctgactttagagatcactgtggggtcaagaatgtcttacatgttttattcatcattcttgaaaaaagaaataattcaaaccttggaattaaaaagtcagaaaaataaaaaaaaaaaaaaaaaaa

SEQ ID NO: 1772 - protein, 191 aa, Homo sapiens
  ref <308>: DATABASE ACCESSION NUMBER: Refseq / NP_057341
  ref <309>: DATABASE ENTRY DATE: 2002-11-14
MGKTNSKLAPEVLEDLVQNTEFSEQELKQWYKGFLKDCPSGILNLEEFQQLYIKFFPYGDASKFAQHAFRTFDKNGDGTIDFREFICALSVTSRGSFEQKLNWAFEMYDLDGDGRITRLEMLEIIEAIYKMVGTVIMMRMNQDGLTPQQRVDKIFKKMDQDKDDQITLEEFKEAAKSDPSIVLLLQCDMQK

SEQ ID NO: 1773 - DNA, 1084 bp, Rattus norvegicus
  ref <308>: DATABASE ACCESSION NUMBER: EMBL / D14839
  ref <309>: DATABASE ENTRY DATE: 1999-01-21
cctcgagatccattgtgctctaaagtttatgcattggatggattgaagaaaagaaccctttttccctctctgtctgcaactgcagcaagggaggggagttggatatacctcgcctagtgtctcctggttgataccatcattattgtttattcttgtgattaaaagccgagtcctctgatggctcccttaggtgaagttgggagctatttcggtgtgcaggacgcggtaccgttcgggaacgtaccggtgttgccggtggacagtccggtgttgctaagtgaccacctgggtcagtccgaagcaggggggctgccccggggacccgcagtcacggacttggatcatttaaaggggattctcaggcggaggcagctgtactgcaggactggatttcacttagaaatcttccccaacggtactatccagggaaccaggaaagaccacagccgattcggcattctggaatttatcagtatagcagtgggcctggtcagcattcgtggtgtggacagtggactctacctcggcatgaacgagaagggggagctgtatggatcagaaaaactaacacaggagtgcgtgttcagagaacagtttgaagaaaactggtacaacacctactcttccaacctgtacaagcacgtggacaccggaaggagatactatgttgcattaaataaggatgggactccaagagaagggaccaggactaaacggcaccagaaatttacacattttttacctagaccagtggaccctgacaaagtacctgaactatataaggatattctaagccaaagttgacaaagacagtgtcttcacttgagcccttaaaacataaccactataaatgcttcatgcggtgggttcttattgattagcagtgccgtcacctcagctccactgttgccaaactttgtcgcatcgatatgtatgatgggagcttggatgaggacttgccgatttgctctgcacttactggctggtcctcctggagggctgcctagggccacttgcttgatttattgtgaaagcagggagagaggctgcgggtgccgaaggttggccatgagtgagtagaggg

SEQ ID NO: 1774 - protein, 208 aa, Rattus norvegicus
  ref <308>: DATABASE ACCESSION NUMBER: SWISS-Prot / P36364
  ref <309>: DATABASE ENTRY DATE: 1997-11-01
MAPLGEVGSYFGVQDAVPFGNVPVLPVDSPVLLSDHLGQSEAGGLPRGPAVTDLDHLKGILRRRQLYCRTGFHLEIFPNGTIQGTRKDHSRFGILEFISIAVGLVSIRGVDSGLYLGMNEKGELYGSEKLTQECVFREQFEENWYNTYSSNLYKHVDTGRRYYVALNKDGTPREGTRTKRHQKFTHFLPRPVDPDKVPELYKDILSQS

SEQ ID NO: 1775 - DNA, 1420 bp, Homo sapiens
  ref <308>: DATABASE ACCESSION NUMBER: Refseq / NM_002010
  ref <309>: DATABASE ENTRY DATE: 2001-08-10
tgaaacagcagattacttttatttatgcatttaatggattgaagaaaagaacctttttttttctctctctctctgcaactgcagtaagggaggggagttggatatacctcgcctaatatctcctgggttgacaccatcattattgtttattcttgtgctccaaaagccgagtcctctgatggctcccttaggtgaagttgggaactatttcggtgtgcaggatgcggtaccgtttgggaatgtgcccgtgttgccggtggacagcccggttttgttaagtgaccacctgggtcagtccgaagcaggggggctccccaggggacccgcagtcacggacttggatcatttaaaggggattctcaggcggaggcagctatactgcaggactggatttcacttagaaatcttccccaatggtactatccagggaaccaggaaagaccacagccgatttggcattctggaatttatcagtatagcagtgggcctggtcagcattcgaggcgtggacagtggactctacctcgggatgaatgagaagggggagctgtatggatcagaaaaactaacccaagagtgtgtattcagagaacagttcgaagaaaactggtataatacgtactcgtcaaacctatataagcacgtggacactggaaggcgatactatgttgcattaaataaagatgggaccccgagagaagggactaggactaaacggcaccagaaattcacacattttttacctagaccagtggaccccgacaaagtacctgaactgtataaggatattctaagccaaagttgacaaagacaatttcttcacttgagcccttaaaaaagtaaccactataaaggtttcacgcggtgggttcttattgattcgctgtgtcatcacatcagctccactgttgccaaactttgtcgcatgcataatgtatgatggaggcttggatgggaatatgctgattttgttctgcacttaaaggcttctcctcctggagggctgcctagggccacttgcttgatttatcatgagagaagaggagagagagagagactgagcgctaggagtgtgtgtatgtgtgtgtgtgtgtgtgtgtgtgtgtgtgtatgtgtgtagcgggagatgtgggcggagcgagagcaaaaggactgcggcctgatgcatgctggaaaaaagacacgcttttcatttctgatcagttgtacttcatcctatatcagcacagctgccatacttcgacttatcaggattctggctggtggcctgcgcgagggtgcagtcttacttaaaagactttcagttaattctcactggtatcatcgcagtgaacttaaagcaaagacctcttagtaaaaaataaaaaaaaataaaaaataaaaataaaaaaagttaaatttatttatagaaattccaaaa

SEQ ID NO: 1776 - protein, 208 aa, Homo sapiens
  ref <308>: DATABASE ACCESSION NUMBER: SWISS-Prot / P31371
  ref <309>: DATABASE ENTRY DATE: 2002-06-15
MAPLGEVGNYFGVQDAVPFGNVPVLPVDSPVLLSDHLGQSEAGGLPRGPAVTDLDHLKGILRRRQLYCRTGFHLEIFPNGTIQGTRKDHSRFGILEFISIAVGLVSIRGVDSGLYLGMNEKGELYGSEKLTQECVFREQFEENWYNTYSSNLYKHVDTGRRYYVALNKDGTPREGTRTKRHQKFTHFLPRPVDPDKVPELYKDILSQS

SEQ ID NO: 1777 - DNA, 2546 bp, Rattus norvegicus
  ref <308>: DATABASE ACCESSION NUMBER: EMBL / D16302
  ref <309>: DATABASE ENTRY DATE: 1999-01-21
ctccagggaagcaacagagagaagaaaagaaaggtacatggctacttcccactctcagcctagaagaataaacccttagattgcgggggaactgagccaggcaagccacaggcagccttgagcgcccccttgcctgccctcccctgcgggggccaggatgctgaagaagcagtctgcagggcttgtgctttggggtgctatcatctttgtgggctggaatgccctgctgctcctcttcttctggacacgcccagcacctggcaggctgccctcagacagtgcccttggtgatgaccctgccagcctcacccgtgaggtcatccacctggccgaggacgccgaggcggagttggagcggcagcggggactactgcagcagatcaaggagcattattctctgtggaggcagaggtggagagttcccaccgtggcccctccagcctggccccgtgtgcctgggaccccctcaccagctgtgatccccattctggtcattgcctgtgaccgcagcactgtccggcgctgcctggataagttgttgcactatcggccctctgctgagcatttccccattattgtcagtcaagactgtgggcatgaagagacagcacaggtcattgcttcttatggcaccgctgtcacacacatccggcagccagacctgagtaacattgccgtgcagccagaccaccgtaagttccagggttactacaagattgccaggcactaccgctgggcgctaggccagatcttcaacaagttcaagttcccggctgctgtggtagtggaggatgatctggaagtggcgccggacttcttcgagtacttccaggccacctacccgctgctgaaagcagacccctccctttggtgtgtgtcggcttggaatgataatggtaaggagcagatggtggactccagcaaacctgagctgctctatcgaacagacttttttcctggccttggatggctgctgttggctgatctctgggcagaactagagcccaagtggcccaaggccttctgggacgactggatgcgcagacctgagcagcggaaggggcgggcttgtattcgtccagaaatttcaagaactatgacatttggtcgcaagggtgtgagccatgggcagttctttgaccagcatcttaaattcatcaagctgaaccagcagttcgtgcccttcacccagttggacctgtcgtacctgcagcgggaggcctatgaccgggacttccttgcccaggtctatggtgccccccagctgcaggtggagaaagtgaggaccaatgatcggaaggaactgggggaggtgcgggtacagtacactagcagagacagctttaaggcctttgctaaggccctgggtgtcatggacgacctcaagtctggtgtccccagagctggctaccgtggcattgtcactttccagttccggggtcggcgtgtccacctggcacccccagagacatggaatggctatgatcctagctggaattagtggcacctgcctttccctcctgggtctccttgccgtatgatgagccgaggcagcctgcaggccctgggctataccattctgccagtgtttcctcttggatctatagatcttccctttttgtcctggccttcccccaagtggcattctagtgcacaaatcataagatgagggttatactcctcttgtcaagggagtactgtgtggtatgttcggggcatattgaacaagaaaccactgtgtggtgtggggagggttggacctgttggaccaggcttgtagtgtcctgagttctctccaagggcatctgcggagagcttggccactccagctctcctgaccaggcctctccaccctgatctggctcctgttagtacatgagcccactttatgtaccttccccactttctccaccttccccagggtggggccggattatggaagaaggaatagatttgtggccaactgagactaaccaaagggattcactgtcagagttagattgcatggccgggttgccggggtcactgcctcctggcttctcttcctgccgactttgccagtgctcttcttgtcctgcagtggagcagtgtgttgtgagatggaaagtaggagctaaagcaagacctctcccgtggtggagcagttgtcaggaacaatgacaggcggaaagcctacacttgggcacccctcttcttgcccatggccccccacttctgaaagttagttccctttgcattctttagggggattcagtggcagcctagtgggggacagtgggctccacgcctctttcccctggggttggtacagcctcctcccacagggcttgttcctggtggccatctcagcaaagtcaccagcagctgagaccaggacacctgtggcccttcctaagcattcccacatcttcccaggccgaggggcaggtggcaggctagagagaaagaaatttgtgtgttttgtttgttgcctgatcttagtttcatggaagaaaatggaatctacagaattattttcaaaaataaagtaaaggctgaattgtctg

SEQ ID NO: 1778 - protein, 447 aa, Rattus norvegicus
  ref <308>: DATABASE ACCESSION NUMBER: SWISS-Prot / Q09325
  ref <309>: DATABASE ENTRY DATE: 2002-06-15
MLKKQSAGLVLWGAIIFVGWNALLLLFFWTRPAPGRLPSDSALGDDPASLTREVIHLAEDAEAELERQRGLLQQIKEHYSLWRQRWRVPTVAPPAWPRVPGTPSPAVIPILVIACDRSTVRRCLDKLLHYRPSAEHFPIIVSQDCGHEETAQVIASYGTAVTHIRQPDLSNIAVQPDHRKFQGYYKIARHYRWALGQIFNKFKFPAAVVVEDDLEVAPDFFEYFQATYPLLKADPSLWCVSAWNDNGKEQMVDSSKPELLYRTDFFPGLGWLLLADLWAELEPKWPKAFWDDWMRRPEQRKGRACIRPEISRTMTFGRKGVSHGQFFDQHLKFIKLNQQFVPFTQLDLSYLQREAYDRDFLAQVYGAPQLQVEKVRTNDRKELGEVRVQYTSRDSFKAFAKALGVMDDLKSGVPRAGYRGIVTFQFRGRRVHLAPPETWNGYDPSWN

SEQ ID NO: 1779 - DNA, 2937 bp, Homo sapiens
  ref <308>: DATABASE ACCESSION NUMBER: Refseq / NM_002406
  ref <309>: DATABASE ENTRY DATE: 2002-11-05
gggttgcgccagggagccggaaagccgactcccgaagttggggtcctgggaaaacttgggtcctgggttgactgagaagcggcggggaaaggaggcgggccaggaggagggggcctggcggacgccggccggggggcggggcgcggcggggctgtcggtcacgcccctcagtccgccccgccccgccccgcctgccggggaagggccacgttgcccggcccggccgtccggccccggcgcgccgcagaaagggctggcgagtcgaaaggcgaggcggccgcggcagcgcttgggacgcgcctgggcaccgggctcgctccctgcgccccggagcaggccaagttcggggccaggacgtcgggaggacctggtgcatggctgcctcctaatcccatagtccagaggaggcatccctaggactgcgggcaagggagccgggcaagcccagggcagccttgaaccgtcccctggcctgccctccccggtgggggccaggatgctgaagaagcagtctgcagggcttgtgctgtggggcgctatcctctttgtggcctggaatgccctgctgctcctcttcttctggacgcgcccagcacctggcaggccaccctcagtcagcgctctcgatggcgaccccgccagcctcacccgggaagtgattcgcctggcccaagacgccgaggtggagctggagcggcagcgtgggctgctgcagcagatcggggatgccctgtcgagccagcgggggagggtgcccaccgcggcccctcccgcccagccgcgtgtgcctgtgacccccgcgccggcggtgattcccatcctggtcatcgcctgtgaccgcagcactgttcggcgctgcctggacaagctgctgcattatcggccctcggctgagctcttccccatcatcgttagccaggactgcgggcacgaggagacggcccaggccatcgcctcctacggcagcgcggtcacgcacatccggcagcccgacctgagcagcattgcggtgccgccggaccaccgcaagttccagggctactacaagatcgcgcgccactaccgctgggcgctgggccaggtcttccggcagtttcgcttccccgcggccgtggtggtggaggatgacctggaggtggccccggacttcttcgagtactttcgggccacctatccgctgctgaaggccgacccctccctgtggtgcgtctcggcctggaatgacaacggcaaggagcagatggtggacgccagcaggcctgagctgctctaccgcaccgactttttccctggcctgggctggctgctgttggccgagctctgggctgagctggagcccaagtggccaaaggccttctgggacgactggatgcggcggccggagcagcggcaggggcgggcctgcatacgccctgagatctcaagaacgatgacctttggccgcaagggtgtgagccacgggcagttctttgaccagcacctcaagtttatcaagctgaaccagcagtttgtgcacttcacccagctggacctgtcttacctgcagcgggaggcctatgaccgagatttcctcgcccgcgtctacggtgctccccagctgcaggtggagaaagtgaggaccaatgaccggaaggagctgggggaggtgcgggtgcagtatacgggcagggacagcttcaaggctttcgccaaggctctgggtgtcatggatgaccttaagtcgggggttccgagagctggctaccggggtattgtcaccttccagttccggggccgccgtgtccacctggcgcccccaccgacgtgggagggctatgatcctagctggaattagcacctgcctgtccttcctgggcccctccttgccacatcatgagctgaggtgggaccacagtccccaggctgcatcggcctgcctgtgtttccctcttaggtgcatttatctttttgatttttccgagtggcatttaagtgcacaaatgataacaagaggattattctcccgttctcaagggagtcagatcaggggaactattctagggtatgttgcggggtattaagcaggaaaccactgtgtggtggggggcactgggcttgttggggccagaaatgtccacgtcctgagctttctcctggagcatgtgcagagagtttggcaacgttcgctctcttgaccagaccccttctccctgacctggctcttccagccagggcacgagccctccttctatacctgctccccttcccccagtggggactgagttatgggagaaggggacatatttgtggccaaaatgatactaaccaaaggggcttccttgtcagggcctggtggagttggtgggtcatcggggctcactgcctcctgcccttctctcctgtctgacccccacttagcccttctctccttgcagcctagcagtttatagttctgagatggaaagttgaagggggcaagcaagacctctcctcagcccatgcccagctgtcaggagagaggtgcagggaggaaggccttgtgctgggacaacctctctcttgccttacctcagagagggactatgccctgacccctcctttctgaaaatcagtgccctccctgttgctctaggaggctcctgctggcttggtagaagacagaattcgatctgcctgtccctttttcccctggggtttgacacacaggctcctctcagcatgaggtggagcagtgaccaggtggagcagtgaccaggacgcctctggcccagtgctgcccagcctccccgcccgctcccaggcgccccatgtcctcacaggccaggacgccatggcaggatggagaggacttggtggatttttgtttcttgcctgacctcagtttcatgaaagaaagtggaagctacagaattattttctaaaataaaggctgaattgtctgaaaaaaaaaaaaaaaaa

SEQ ID NO: 1780 - protein, 445 aa, Homo sapiens
  ref <308>: DATABASE ACCESSION NUMBER: SWISS-Prot / P26572
  ref <309>: DATABASE ENTRY DATE: 2002-06-15
MLKKQSAGLVLWGAILFVAWNALLLLFFWTRPAPGRPPSVSALDGDPASLTREVIRLAQDAEVELERQRGLLQQIGDALSSQRGRVPTAAPPAQPRVPVTPAPAVIPILVIACDRSTVRRCLDKLLHYRPSAELFPIIVSQDCGHEETAQAIASYGSAVTHIRQPDLSSIAVPPDHRKFQGYYKIARHYRWALGQVFRQFRFPAAVVVEDDLEVAPDFFEYFRATYPLLKADPSLWCVSAWNDNGKEQMVDASRPELLYRTDFFPGLGWLLLAELWAELEPKWPKAFWDDWMRRPEQRQGRACIRPEISRTMTFGRKGVSHGQFFDQHLKFIKLNQQFVHFTQLDLSYLQREAYDRDFLARVYGAPQLQVEKVRTNDRKELGEVRVQYTGRDSFKAFAKALGVMDDLKSGVPRAGYRGIVTFQFRGRRVHLAPPPTWEGYDPSWN

SEQ ID NO: 1781 - DNA, 1120 bp, Rattus norvegicus
  ref <308>: DATABASE ACCESSION NUMBER: EMBL / D16308
  ref <309>: DATABASE ENTRY DATE: 1999-01-21
cagcccttgaggctcttgctcgcccaccttccactcttctctccctctctcttttgccatttctttcctctcccaaatctcgcattcagccaaaggaaggaggtaagggaagcacctcccacctccaaaaaaaaataataataaattttacagtcgggaccgagtggtgaccggctagctatggagctgctgtgctgtgaggtggacccggtccgcagggccgtgccggaccgcaacctgctggaagaccgcgtcctgcagaacctgttgactatcgaggagcgctacctcccgcagtgttcctatttcaagtgcgtgcagaaggacatccagccgtacatgcgcaggatggtggctacctggatgctagaggtctgtgagggacagaagtgtgaagaagaggtctttcctctggccatgaattacctggaccgtttcttggctggagtcccgactcctaagacccatctccagctcctgggcgctgtggtcatgttcctagcttccaagctgaaagagaccatcccgctgactgccgaaaagctgtgtatttacaccgacaattctgtgaaaccccaggagctgctggagtgggaactggtggtgctgggtaagctgaagtggaacctggctgcagtaacccctcacgacttcattgagcacatcctacgcaagctgccccagcagaaggagaagctgtccctgatccgcaagcatgcgcagaccttcatcgctctgtgtgctaccgacttcaagtttgccatgtacccgccatcgatgatcgcaactggaagcgtgggagcagccatctgcgggcttcagcaggacgaggaagtgaatgcactcacgtgcgatgccctgacggagctgctggccaagatcacccacaccgatgtggattgtctcaaagcctgccaggagcaaatcgaggctgtgctgcttaacagccttcagcagttccgtcaagagcagcacaacggctccaagtctgtggaagatccggaccaagccaccacccctacagacgtgcgggatgttgacctgtgaggaagccattcgggcggcaagagagaggcgtgttcgtcatctgctagccccttctctctctctctctagttat

SEQ ID NO: 1782 - protein, 288 aa, Rattus norvegicus
  ref <308>: DATABASE ACCESSION NUMBER: SWISS-Prot / BAA03815
  ref <309>: DATABASE ENTRY DATE: 2001-10-16
MELLCCEVDPVRRAVPDRNLLEDRVLQNLLTIEERYLPQCSYFKCVQKDIQPYMRRMVATWMLEVCEEQKCEEEVFPLAMNYLDRFLAGVPTPKTHLQLLGAVCMFLASKLKETIPLTAEKLCIYTDNSVKPQELLEWELVVLGKLKWNLAAVTPHDFIEHILRKLPQQKEKLSLIRKHAQTFIALCATDFKFAMYPPSMIATGSVGAAICGLQQDEEVNALTCDALTELLTKITHTDVDCLKACQEQIEAVLLNSLQQFRQEQHNGSKSVEDPDQATTPTDVRDVDL

SEQ ID NO: 1783 - DNA, 6480 bp, Homo sapiens
  ref <308>: DATABASE ACCESSION NUMBER: Refseq / NM_001759
  ref <309>: DATABASE ENTRY DATE: 2001-11-16
agagcgagcaggggagagcgagaccagttttaaggggaggaccggtgcgagtgaggcagccccgaggctctgctcgcccaccacccaatcctcgcctcccttctgctccaccttctctctctgccctcacctctcccccgaaaaccccctatttagccaaaggaaggaggtcaggggaacgctctcccctccccttccaaaaaacaaaaacagaaaaacccttttccaggccggggaaagcaggagggagaggggccgccgggctggccatggagctgctgtgccacgaggtggacccggtccgcagggccgtgcgggaccgcaacctgctccgagacgaccgcgtcctgcagaacctgctcaccatcgaggagcgctaccttccgcagtgctcctacttcaagtgcgtgcagaaggacatccaaccctacatgcgcagaatggtggccacctggatgctggaggtctgtgaggaacagaagtgcgaagaagaggtcttccctctggccatgaattacctggaccgtttcttggctggggtcccgactccgaagtcccatctgcaactcctgggtgctgtctgcatgttcctggcctccaaactcaaagagaccagcccgctgaccgcggagaagctgtgcatttacaccgacaactccatcaagcctcaggagctgctggagtgggaactggtggtgctggggaagttgaagtggaacctggcagctgtcactcctcatgacttcattgagcacatcttgcgcaagctgccccagcagcgggagaagctgtctctgatccgcaagcatgctcagaccttcattgctctgtgtgccaccgactttaagtttgccatgtacccaccgtcgatgatcgcaactggaagtgtgggagcagccatctgtgggctccagcaggatgaggaagtgagctcgctcacttgtgatgccctgactgagctgctggctaagatcaccaacacagacgtggattgtctcaaagcttgccaggagcagattgaggcggtgctcctcaatagcctgcagcagtaccgtcaggaccaacgtgacggatccaagtcggaggatgaactggaccaagccagcacccctacagacgtgcgggatatcgacctgtgaggatgccagttgggccgaaagagagagacgcgtccataatctggtctcttcttctttctggttgtttttgttctttgtgttttagggtgaaacttaaaaaaaaaattctgcccccacctagatcatatttaaagatcttttagaagtgagagaaaaaggtcctacgaaaacggaataataaaaagcatttggtgcctatttgaagtacagcataagggaatcccttgtatatgcgaacagttattgtttgattatgtaaaagtaatagtaaaatgcttacaggaaaacctgcagagtagttagagaatatgtatgcctgcaatatgggaacaaattagaggagacttttttttttcatgttatgagctagcacatacacccccttgtagtataatttcaaggaactgtgtacgccatttatggcatgattagattgcaaagcaatgaactcaagaaggaattgaaataaggagggacatgatggggaaggagtacaaaacaatctctcaacatgattgaaccatttgggatggagaagcacctttgctctcagccacctgttactaagtcaggagtgtagttggatctctacattaatgtcctcttgctgtctacagtagctgctacctaaaaaaagatgttttattttgccagttggacacaggtgattggctcctgggtttcatgttctgtgacatcctgcttcttcttccaaatgcagttcattgcagacaccaccatattgctatctaatggggaaatgtagctatgggccataaccaaaactcacatgaaacggaggcagatggagaccaagggtgggatccagaatggagtcttttctgttattgtatttaaaagggtaatgtggccttggcatttcttcttagaaaaaaactaatttttggtgctgattggcatgtctggttcacagtttagcattgttataaaccattccattcgaaaagcactttgaaaaattgttcccgagcgatagatgggatggtttatgcaagtcatgctgaatactcctcccctcttctcttttgccccctcccttcctgcccccagtctgggttactcttcgcttctggtatctggcgttctttggtacacagttctggtgttcctaccaggactcaagagacaccccttcctgctgacattcccatcacaacattcctcagacaagcctgtaaactaaaatctgttaccattctgatggcacagaaggatcttaattcccatctctatacttctcctttggacatggaaagaaaagttattgctggtgcaaagatagatggctgaacatcagggtgtggcattttgttcccttttccgttttttttttttttattgttgttgttaattttattgcaaagttgtattcagcgtacttgaatttttcttcctctccacttcttagaggcattcagttagcaaagaggttggagcaacaacttttttttttttttttgcacaattgtaattgacaggtaatgaagctatttgttaaaatatttgcctttttaagtaaaaaagaaaaatcagaacagggctatttgaagaattattttatacacagattctgccttgtttcatagtatgagggttgaagacggaaaacaatctaagggtctctcatttttttaattttgttttgttcagtttggtttttttttttttttgcgctgctaagaagctaaagtcatccatccttattcacgttgacagtacctagctgtaatgtttcacagagtgtgctgctattttataaacatttttataatatattattttactgcttaaattccaagtcctgaagtagatggttgagatatgagttcttcgtactggaaaagcccttccgtagtttgttttcttctggtagcatattcatggttgtttttttttttcttttttggttttttggttttttttttttcctctgatcacattcttcaaagacggagtattctttacctcaggtttactggacaaaatcaataactacaaaaggcaatgattcacgcttttgttttcataatacctcacaaccgtacagtttctgcttgggagcccattcgcatgaggaatacagaagcagtgtgagcagggctgactccctctcaggtggaaggcagggcggtctcactcccagggacctttttggtcatggaggccatcgggctcccagttagaccctggtatcctcatcatgatggaaaaaatacattgaaccaagggatcctccctccccttcaaggcagacgttcagtacaaacatttatgcggtaggctcagatgtcgtaatttgcacttaggtaccaggtgtcaggaaacagactaaaaagaattccaccaggctgtttggagatcctcatcttggagctttttcaaaagcggggcttcatctgcaaagggccctttcatcttgaagtttttcccctccgtctttcccctcccctggcatggacaccttgtgtttaggatcatctctgcaggtttcctaggtctgaatctgcgagtagatgaacctgcagcaagcagcgtttatggtgcttccttctccctcctctgtctcaaactgcgcaggcaagcactatgcaagcccaggccctctgctgagcggtactaaacggtcgggttttcaatcacactgaattggcaggataagaaaaataggtcagataagtatgggatgatagttgaagggaggtgaagaggctgcttctctacagaggtgaaattccagatgagtcagtctcttgggaagtgtgtttagaagggttcaggactttgtgagttagcatgaccctaaaattctaggggatttctggtgggacaatgggtggtgaattttgaagttttggagagggaagtggagcagccagcaagtaagctagccagagttttctcaagagccagctttgctcagcacactctcctgggccccaaggagtcccacggaatggggaaagtgggaaccctggagttcttgggaatcttggagcctaaagagaaaccgaggtgcaaattcatttcatggtgactgacccttgagcttaaacagaagcagcaaatgaaagaaccggacaaataaggaagggcacaagcctacccgactctatttacagtctgtaactttccactcttcctgtagtcccgaggcccctgggtccttctagcttttctctttcccatccttggggccttgtgtgatgatgggtgtggggctgccgatgggaaagtcgggggttgttaggcttttctgcctgctcctgcttaaacacaagaaggaatcctggattttgccctctccttagctcttagtctctttggtaggagttttgttccagaggagctctcccccttggatttgaacttgctctttttgttgttgttgttctttctcttctttttcttacctcccactaaaggggttccaaattatcctggtctttttctaccttgttgtgtttctatctcgtctttacttccatctgtttgtttttttctccatcagtgggggccgagttgttcccccagcctgccaaattttgatccttcccctcttttggccaaatcctagggggaagaaatcctagtatgccaaaaatatatgctaagcataattaaactccatgcgggtccataacagccaagaagcctgcaggagaaagccaagggcagttccctccgcagaacaccccatgcgtgctgagaggcgagctccttgaagaaggggctgttcttccaggaggccttattttgaactgcctcaggaccccactggagagcacagcatgccttactactgggtcatccttggtctatgtgctctgtactggaggctctgttctgcctcttatcagccaggtcaggggcacacatggcttaagtgacaaagccagaggagaagacaaccctgacagcatcacgctgcatcccattgctagcaggattggcaactcttcagacggagctgcgcttccctgcagtctagcacctctagggcctctccagactgtgccctgggagctctgggactgaaaggttaagaacataaggcaggatcagatgactctctccaagagggcaggggaattttctctccatgggccacaggggacagggctgggagaagaaatagacttgcaccttatgtcatgtaaataattgattttctagttcaagaagataatattggtagtgtgggaattggaggtaggaaggggaggaagtctgagtaagccagttggcttctaagccaaaaggattcctctttgtttatctctgagacagtccaaccttgagaatagctttaaaagggaaattaatgctgagatgataaagtccccttaagccaacaaaccctctgtagctatagaatgagtgcaggtttctattggtgtggactcagagcaatttacaagagctgttcatgcagccatccatttgtgcaaaatagggtaagaagattcaagaggatatttattacttcctcataccacatggcttttgatgattctggattctaaacaacccagaatggtcatttcaggcacaacgatactacattcgtgtgtgtctgcttttaaacttggctgggctatcagaccctattctcggctcaggttttgagaagccatcagcaaatgtgtacgtgcatgctgtagctgcagcctgcatcccttcgcctgcagcctactttggggaaataaagtgccttactgactgtagccattacagtatccaatgtcttttgacaggtgcctgtccttgaaaaacaaagtttctatttttatttttaattggtttagttcttaactgctggccaactcttacatccccagcaaatcatcgggccattggattttttccattatgttcatcacccttatatcatgtacctcagatctctctctctctcctctctctcagttatatagtttcttgtcttggactttttttttcttttctttttctttttttttttgctttaaaacaagtgtgatgccatatcaagtccatgttattctctcacagtgtactctataagaggtgtgggtgtctgtttggtcaggatgttagaaagtgctgataagtagcatgatcagtgtatgcgaaaaggtttttaggaagtatggcaaaaatgttgtattggctatgatggtgacatgatatagtcagctgccttttaagaggtcttatctgttcagtgttaagtgatttaaaaaaataataacctgttttctgactagtttaaagatggatttgaaaatggttttgaatgcaattaggttatgctatttggacaataaactcaccttgacct

SEQ ID NO: 1784 - protein, 289 aa, Homo sapiens
  ref <308>: DATABASE ACCESSION NUMBER: SWISS-Prot / P30279
  ref <309>: DATABASE ENTRY DATE: 2002-06-15
MELLCHEVDPVRRAVRDRNLLRDDRVLQNLLTIEERYLPQCSYFKCVQKDIQPYMRRMVATWMLEVCEEQKCEEEVFPLAMNYLDRFLAGVPTPKSHLQLLGAVCMFLASKLKETSPLTAEKLCIYTDNSIKPQELLEWELVVLGKLKWNLAAVTPHDFIEHILRKLPQQREKLSLIRKHAQTFIALCATDFKFAMYPPSMIATGSVGAAICGLQQDEEVSSLTCDALTELLAKITNTDVDCLKACQEQIEAVLLNSLQQYRQDQRDGSKSEDELDQASTPTDVRDIDL

SEQ ID NO: 1785 - DNA, 1843 bp, Rattus norvegicus
  ref <308>: DATABASE ACCESSION NUMBER: EMBL / D16309
  ref <309>: DATABASE ENTRY DATE: 1999-01-21
tctcactcacacgcgacgcgtcgcttctcctaggactcgctagcccgcactcctgctctcacccgtgagccatagcaggatggagctgctgtgttgcgagggcacccggctcgcgccccgggccgggcccgacccgcggctactgggggaccagcgtgtcctgcagagtttgctccgcttggaggagcgctacgtgccgcgaggctcctacttccagtgcgtgcaaaaggagatcaagccgcacatgcggaagatgctggcgtactggatgctggaggtgtgtgaggagcagcgctgcgaggaggatgtcttccctctggctatgaactacctggatcgctacctgtcctgcgtccccacccgaaaggcgcaactgcagcttctaggtaccgtctgcctgttgctggcctccaagctgcgcgaaaccacacccctgactattgagaagctctgcatctatacggaccaagctatggctccctggcagttgcgggaatgggaggtgctggtcctggggaagctcaagtgggacctggctgctgtgattgcgcacgacttcctggccttgattctgcaccgcctctctctgcccagtgaccggcaggcactggtcaaaaagcatgctcagacctttttggccctctgtgccacagattacacctttgcgatgtaccctccatccatgatcgccacgggcagcatcggggctgcagtgctaggcctgggtgcctgctctatgtctgcagatgagctcacagagctgctggcgggaatcacaggcactgaagtggactgcctgcgtgcctgccaggagcagcagatcgaagctgccctcagggagagcctcagggaagctgctcagacagcccccagccccgtgcccaaagcccccggggggtctagcagccaggggcccagtcagaccagcactcccacagatgtcacagccatccacctgtagtttgggacaggccccctcaggtggccaccaagcagaggaggggcccctgccaccccctccctccctctaggaacaattcatgccatatctgaagcccgagggggctctttttcccctcacaaagcccaaggggccaggtcctgcctatccccacagtgtgcactaaggggctgcttggtcatgagggtgtctacatggccagtcagttcctcttccttcccactcaaccagcttggctgtcctgggccatgatggtcagagagatacaaacaggtagaacccacacaccagcatttcttttgagtccctcctctgtctggggcgccgatcctttcagttgccaaaacgccccagtaccttccaaaggtgttgttgcccctcgcagggtcactgcatttggatctgggtccttcagaaatcccgatagacgcctatgaggagccaacctagatggctgctgtgtaatccctactccagctgctcttagcgggaaccagcctaggccttggctagaagagcaagcgcccgtaaactgttgctttgcttcctgctatgcttctgtggttgagggtcttgagggtgctgatggtcattttaatttattgctttgaatacaccgtaagagggtacagtgaggcctgtaccccacaagtggtggtaaccctggcggttgctctttccctcccctctgctaccgctttgtggcccaggagctgctacagcctgggagggggtcctgccttcctctccgtagccctccagctcatcttcagcggggagggtttaatagggatggatgccgtggaggtgactggactatccggagagagggcgagccccatggacacaggtgtttcctcaggccacaaggtttggggcgcc

SEQ ID NO: 1786 - protein, 293 aa, Rattus norvegicus
  ref <308>: DATABASE ACCESSION NUMBER: SWISS-Prot / BAA03816
  ref <309>: DATABASE ENTRY DATE: 2001-10-16
MELLCCEGTRLAPRAGPDPRLLGDQRVLQSLLRLEERYVPRGSYFQCVQKEIKPHMRKMLAYWMLEVCEEQRCEEDVFPLAMNYLDRYLSCVPTRKAQLQLLGTVCLLLASKLRETTPLTIEKLCIYTDQAMAPWQLREWEVLVLGKLKWDLAAVIAHDFLALILHRLSLPSDRQALVKKHAQTFLALCATDYTFAMYPPSMIATGSIGAAVLGLGACSMSADELTELLAGITGTEVDCLRACQEQQIEAALRESLREAAQTAPSPVPKAPGGSSSQGPSQTSTPTDVTAIHL

SEQ ID NO: 1787 - DNA, 2095 bp, Homo sapiens
  ref <308>: DATABASE ACCESSION NUMBER: Refseq / NM_001760
  ref <309>: DATABASE ENTRY DATE: 2001-11-16
gcgcctgtcagggaagcggcgcgcgcgcgcgggcggcgggcgggctggggatccgccgcgcagtgccagcgccagcgccagacccgcgccccgcgctctccggcccgtcgcctgccttgggactcgcgagcccgcactcccgccctgcctgttcgctgcccgagtatggagctgctgtgttgcgaaggcacccggcacgcgccccgggccgggccggacccgcggctgctgggggaccagcgtgtcctgcagagcctgctccgcctggaggagcgctacgtaccccgcgcctcctacttccagtgcgtgcagcgggagatcaagccgcacatgcggaagatgctggcttactggatgctggaggtatgtgaggagcagcgctgtgaggaggaagtcttccccctggccatgaactacctggatcgctacctgtcttgcgtccccacccgaaaggcgcagttgcagctcctgggtgcggtctgcatgctgctggcctccaagctgcgcgagaccacgcccctgaccatcgaaaaactgtgcatctacaccgaccacgctgtctctccccgccagttgcgggactgggaggtgctggtcctagggaagctcaagtgggacctggctgctgtgattgcacatgatttcctggccttcattctgcaccggctctctctgccccgtgaccgacaggccttggtcaaaaagcatgcccagacctttttggccctctgtgctacagattatacctttgccatgtacccgccatccatgatcgccacgggcagcattggggctgcagtgcaaggcctgggtgcctgctccatgtccggggatgagctcacagagctgctggcagggatcactggcactgaagtggactgcctgcgggcctgtcaggagcagatcgaagctgcactcagggagagcctcagggaagcctctcagaccagctccagcccagcgcccaaagccccccggggctccagcagccaagggcccagccagaccagcactcctacagatgtcacagccatacacctgtagccctggagaggccctctggagtggccactaagcagaggaggggccgctgccacccacctccctgcctccaggaaccacaccacatctaagcctgaaggggcgtctgttcccccttcacaaagcccaagggatctggtcctacccatccccgcagtgtgcactaaggggcccggccagccatgtctgcatttcggtggctagtcaagctcctcctccctgcatctgaccagcagcgcctttcccaactctagctgggggtgggccaggctgatgggacagaattggatacatacaccagcattccttttgaacgcccccccccacccctgggggctctcatgttttcaactgccaaaatgctctagtgccttctaaaggtgttgtcccttctagggttattgcatttggattggggtccctctaaaatttaatgcatgatagacacatatgagggggaatagtctagatggctcctctcagtactttggaggcccctatgtagtccgtgctgacagctgctcctagagggaggggcctaggcctcagccagagaagctataaattcctctttgctttgctttctgctcagcttctcctgtgtgattgacagctttgctgctgaaggctcattttaatttattaattgctttgagcacaactttaagaggacataatgggggcctggccatcccacaagtggtggtaaccctggtggttgctgttttcctcccttctgctactggcaaaaggatctttgtggccaaggagctgctatagcctggggtggggtcatgccctcctctcccattgtccctctgccccatcctccagcagggaaaatgcagcagggatgccctggaggtggctgagcccctgtctagagagggaggcaagccctgttgacacaggtctttcctaaggctgcaaggtttaggctggtggcccaggaccatcatcctactgtaataaagatgattgtgaaataaaactggctttggcttcttggaaaaaaaaaaaaaaaaaaaaaaaaaaaaaaaaaaaaaaaaaaaaa

SEQ ID NO: 1788 - protein, 292 aa, Homo sapiens
  ref <308>: DATABASE ACCESSION NUMBER: SWISS-Prot / P30281
  ref <309>: DATABASE ENTRY DATE: 2002-06-15
MELLCCEGTRHAPRAGPDPRLLGDQRVLQSLLRLEERYVPRASYFQCVQREIKPHMRKMLAYWMLEVCEEQRCEEEVFPLAMNYLDRYLSCVPTRKAQLQLLGAVCMLLASKLRETTPLTIEKLCIYTDHAVSPRQLRDWEVLVLGKLKWDLAAVIAHDFLAFILHRLSLPRDRQALVKKHAQTFLALCATDYTFAMYPPSMIATGSIGAAVQGLGACSMSGDELTELLAGITGTEVDCLRACQEQIEAALRESLREASQTSSSPAPKAPRGSSSQGPSQTSTPTDVTAIHL

SEQ ID NO: 1789 - DNA, 1843 bp, Rattus norvegicus; identical to SEQ ID NO: 1785
  ref <308>: DATABASE ACCESSION NUMBER: EMBL / D16309
  ref <309>: DATABASE ENTRY DATE: 1999-01-21

SEQ ID NO: 1790 - protein, 293 aa, Rattus norvegicus; identical to SEQ ID NO: 1786
  ref <308>: DATABASE ACCESSION NUMBER: SWISS-Prot / BAA03816
  ref <309>: DATABASE ENTRY DATE: 2001-10-16

SEQ ID NO: 1791 - DNA, 2095 bp, Homo sapiens; identical to SEQ ID NO: 1787
  ref <308>: DATABASE ACCESSION NUMBER: Refseq / NM_001760
  ref <309>: DATABASE ENTRY DATE: 2001-11-16

SEQ ID NO: 1792 - protein, 292 aa, Homo sapiens; identical to SEQ ID NO: 1788
  ref <308>: DATABASE ACCESSION NUMBER: SWISS-Prot / P30281
  ref <309>: DATABASE ENTRY DATE: 2002-06-15

SEQ ID NO: 1793 - DNA, 1843 bp, Rattus norvegicus; identical to SEQ ID NO: 1785
  ref <308>: DATABASE ACCESSION NUMBER: EMBL / D16309
  ref <309>: DATABASE ENTRY DATE: 1999-01-21

SEQ ID NO: 1794 - protein, 293 aa, Rattus norvegicus; identical to SEQ ID NO: 1786
  ref <308>: DATABASE ACCESSION NUMBER: SWISS-Prot / BAA03816
  ref <309>: DATABASE ENTRY DATE: 2001-10-16

SEQ ID NO: 1795 - DNA, 2095 bp, Homo sapiens; identical to SEQ ID NO: 1787
  ref <308>: DATABASE ACCESSION NUMBER: Refseq / NM_001760
  ref <309>: DATABASE ENTRY DATE: 2001-11-16

SEQ ID NO: 1796 - protein, 292 aa, Homo sapiens; identical to SEQ ID NO: 1788
  ref <308>: DATABASE ACCESSION NUMBER: SWISS-Prot / P30281
  ref <309>: DATABASE ENTRY DATE: 2002-06-15

SEQ ID NO: 1797 - DNA, 1843 bp, Rattus norvegicus; identical to SEQ ID NO: 1785
  ref <308>: DATABASE ACCESSION NUMBER: EMBL / D16309
  ref <309>: DATABASE ENTRY DATE: 1999-01-21

SEQ ID NO: 1798 - protein, 293 aa, Rattus norvegicus; identical to SEQ ID NO: 1786
  ref <308>: DATABASE ACCESSION NUMBER: SWISS-Prot / BAA03816
  ref <309>: DATABASE ENTRY DATE: 2001-10-16

SEQ ID NO: 1799 - DNA, 2095 bp, Homo sapiens; identical to SEQ ID NO: 1787
  ref <308>: DATABASE ACCESSION NUMBER: Refseq / NM_001760
  ref <309>: DATABASE ENTRY DATE: 2001-11-16

SEQ ID NO: 1800 - protein, 292 aa, Homo sapiens; identical to SEQ ID NO: 1788
  ref <308>: DATABASE ACCESSION NUMBER: SWISS-Prot / P30281
  ref <309>: DATABASE ENTRY DATE: 2002-06-15

SEQ ID NO: 1801 - DNA, 3417 bp, Rattus norvegicus
  ref <308>: DATABASE ACCESSION NUMBER: EMBL / D16817
  ref <309>: DATABASE ENTRY DATE: 2000-02-01
ggggagagatggatagcaagcaagggagggagagagggagtgggaggaggaggaggaggagagggagcccaacgaccatttaaagcgatagcaatccctgccctctccccagtgcttggctgttggagagcgcaagaggcaagccagggaacggggagcgcaagctggtgcgccggccagcggagccacagtgccaggtgccaaagactggctgacgccctgggacacccccaccctctcctgctgcacctcctcggtctcctccaccctctgtgcctacagaagtccctgggcttcccccaaaggagctcacctccagaagcccggacctgggagagcccaccagcataccctccagcgccgccgccgccgctaccgcagcagcatccggagcggcatggtccagctggggaagctgctccgcgtcctgactttgatgaagttcccctgctgcgtgctggaggtgctcctgtgcgtgctggcggcggcggcgcgcggccaggagatgtacgccccgcactcgatccggatcgagggggacgtcacccttggggggttgttcccagtgcacgccaagggtcccagcggagtgccctgcggcgacatcaagagggagaatgggatccacaggctggaagctatgctttatgccctggaccagatcaacagcgatcccaacctgctgcccaatgtaacgttaggcgcgcggatcctggacacttgttccagggacacttatgcgctcgaacagtcgctcactttcgtccaggcgcttatccagaaggacacctccgacgtgcgttgcaccaacggagagcccccggttttcgtcaagccagagaaagtagttggagtgattggggcttcggggagctccgtctccatcatggtagccaacatcttgaggctttttcagatccctcagattagttatgcatccacggctcctgaactcagtgatgaccggcgctatgacttcttctctcgagtggtcccgcctgattccttccaagcccaggcgatggttgacattgtaaaggctttgggctggaattacgtgtctactcttgcatctgaaggaagctatggagagaaaggtgtggagtccttcacacagatttccaaagaggcaggtgggctctgcattgcccagtccgtgagaatcccccaagagcgcaaagacaggaccattgactttgatagaattatcaaacagctcttggacactcccaactccagggccgtcgtgatttttgccaacgatgaggatataaagcagatccttgccgccgccaaaagagctgaccaagtaggccattttctctgggtcgggtcagacagctggggttccaaaatcaacccactgcatcagcacgaagatattgcggaaggagccataacaatccagcctaaaagggcaaccgtggaaggatttgatgcttacttcacatcccggacacttgaaaacaacaggagaaatgtatggtttgccgaatactgggaagaaaacttcaactgcaagttgacaattagtgggtccaaaaaagaagacacagatcgcaaatgcacaggacaggagcgaattggaaaagactccaattatgagcaggaaggtaaagtacagtttgtgattgatgctgtctatgccatggcccatgctcttcatcacatgaacaaggatctgtgtgctgactaccgcggagtgtgcccagagatggagcaagcaggcggcaagaagttgttgaagtatatccgccatgttaacttcaatggtagtgctggaaccccagtaatgtttaacaaaaatggcgatgctccagggcgttatgacatcttccaataccagacaacaaacacaaccaaccctggttatcgtctcattgggcagtggacagatgaacttcagctcaatatagaggacatgcagtggggcaaaggagtccgagagatcccatcctctgtgtgtacattgccatgcaagcctgggcaaaggaagaagacacagaagggaacgccttgctgctggacctgtgagccctgtgatggataccagtatcagtttgatgagatgacctgtcagcattgtccctacgaccagaggcccaatgagaaccgaactggctgtcagaacatcccaatcatcaaactggagtggcactccccctgggctgtcattcctgtcttcctggcaatgttggggatcattgccaccatctttgtcatggcaactttcatccgctacaatgacacacccattgtcagggcatctgggcgggaactcagctatgttttattgacaggcatctttctctgctatatcatcaccttcctaatgattgccaaaccagatgtggcagtgtgttctttccgacgtgtcttcttgggcttgggcatgtgtattagttatgctgcccttttaacaaagaccaatcggatttatcgcatattcgagcagggcaagaaatcggtgacagctcccagactcataagcccaacgtcacaactggcgatcacttccagtttaatatcggtgcagcttctaggtgtcttcatttggtttggggttgacccccccaacattatcatagactacgatgagcataagaccatgaacccagaacaagcaaggggtgttctcaaatgtgacatcacagaccttcaaatcatttgttccctgggatatagcattcttctcatggtcacatgtactgtgtatgccatcaagactcggggcgtaccagagaattttaatgaagccaagcccattgggttcactatgtacacgacgtgtatcgtatggcttgccttcatcccaatattttttggcacagcgcagtcagcagaaaagctctacatacaaactaccacgcttacaatctccatgaacctaagtgcgtcagtggcgctgggaatgctatacatgccgaaagtgtacatcatcattttccaccctgaactcaatgtccagaaacggaagcgaagcttcaaggccgtagtcacagcagccaccatgtcatcaaggctgtcacacaaacccagtgacaggcccaacggtgaggcaaagacagaactctgtgaaaatgtagacccaaacagccctgctgcaaaaaagaagtatgtcagttataataacctggttatctaacctgttccatgccatggagccacagaggaggaagaccttcagttattctgtcacccagcctggcattggactcttggtcctgcccgcttcctatctctggaggagcttctccacccgggagagcaatgttagaggatccacacatcctgaacagctgctttatgagacacctttactttatcttggcttaagaagtcattggcatcagcactgccatcttggctgtaattctggactccctaagcaaagggagagttgagactcaagtccca

SEQ ID NO: 1802 - protein, 915 aa, Rattus norvegicus
  ref <308>: DATABASE ACCESSION NUMBER: SWISS-Prot / P35400
  ref <309>: DATABASE ENTRY DATE: 2002-06-15
MVQLGKLLRVLTLMKFPCCVLEVLLCVLAAAARGQEMYAPHSIRIEGDVTLGGLFPVHAKGPSGVPCGDIKRENGIHRLEAMLYALDQINSDPNLLPNVTLGARILDTCSRDTYALEQSLTFVQALIQKDTSDVRCTNGEPPVFVKPEKVVGVIGASGSSVSIMVANILRLFQIPQISYASTAPELSDDRRYDFFSRVVPPDSFQAQAMVDIVKALGWNYVSTLASEGSYGEKGVESFTQISKEAGGLCIAQSVRIPQERKDRTIDFDRIIKQLLDTPNSRAVVIFANDEDIKQILAAAKRADQVGHFLWVGSDSWGSKINPLHQHEDIAEGAITIQPKRATVEGFDAYFTSRTLENNRRNVWFAEYWEENFNCKLTISGSKKEDTDRKCTGQERIGKDSNYEQEGKVQFVIDAVYAMAHALHHMNKDLCADYRGVCPEMEQAGGKKLLKYIRHVNFNGSAGTPVMFNKNGDAPGRYDIFQYQTTNTTNPGYRLIGQWTDELQLNIEDMQWGKGVREIPSSVCTLPCKPGQRKKTQKGTPCCWTCEPCDGYQYQFDEMTCQHCPYDQRPNENRTGCQNIPIIKLEWHSPWAVIPVFLAMLGIIATIFVMATFIRYNDTPIVRASGRELSYVLLTGIFLCYIITFLMIAKPDVAVCSFRRVFLGLGMCISYAALLTKTNRIYRIFEQGKKSVTAPRLISPTSQLAITSSLISVQLLGVFIWFGVDPPNIIIDYDEHKTMNPEQARGVLKCDITDLQIICSLGYSILLMVTCTVYAIKTRGVPENFNEAKPIGFTMYTTCIVWLAFIPIFFGTAQSAEKLYIQTTTLTISMNLSASVALGMLYMPKVYIIIFHPELNVQKRKRSFKAVVTAATMSSRLSHKPSDRPNGEAKTELCENVDPNSPAAKKKYVSYNNLVI

SEQ ID NO: 1803 - DNA, 3021 bp, Homo sapiens
  ref <308>: DATABASE ACCESSION NUMBER: EMBL / X94552
  ref <309>: DATABASE ENTRY DATE: 1997-02-17
gtgagcgcgagcgcggcgcgccggccggctaacccgagagcgcgaggcgccccaggctggcaggcgccgcgggacccctcaccctctctggtcgcccctccccggattcccccaccctccgtgcctgcaggagcccctgggctttcccggaggagctcgccctgaagggcccggacctcggcgagcccaccaccgttccctccagcgccgccgccgccaccgcagcagccggagcagcatggtccagctgaggaagctgctccgcgtcctgactttgatgaagttcccctgctgcgtgctggaggtgctcctgtgcgcgctggcggcggcggcgcgcggccaggagatgtacgccccgcactcaatccggatcgagggggacgtcaccctcggggggctgttccccgtgcacgccaagggtcccagcggagtgccctgcggcgacatcaagagggaaaacgggatccacaggctggaagcgatgctctacgccctggaccagatcaacagtgatcccaacctactgcccaacgtgacgctgggcgcgcggatcctggacacttgttccagggacacttacgcgctcgaacagtcgcttactttcgtccaggcgctcatccagaaggacacctccgacgtgcgctgcaccaacggcgaaccgccggttttcgtcaagccggagaaagtagttggagtgattggggcttcggggagttcggtctccatcatggtagccaacatcctgaggctcttccagatcccccagattagttatgcatcaacggcacccgagctaagtgatgaccggcgctatgacttcttctctcgcgtggtgccacccgattccttccaagcccaggccatggtagacattgtaaaggccctaggctggaattatgtgtctaccctcgcatcggaaggaagttatggagagaaaggtgtggagtccttcacgcagatttccaaagaggcaggtggactctgcattgcccagtccgtgagaatcccccaggaacgcaaagacaggaccattgactttgatagaattatcaaacagctcctggacacccccaactccagggccgtcgtgatttttgccaacgatgaggatataaagcagatccttgcagcagccaaaagagctgaccaagttggccattttctttgggtgggatcagacagctggggatccaaaataaacccactgcaccagcatgaagatatcgcagaaggggccatcaccattcagcccaagcgagccacggtggaagggtttgatgcctactttacgtcccgtacacttgaaaacaacagaagaaatgtatggtttgccgaatactgggaggaaaacttcaactgcaagttgacgattagtgggtcaaaaaaagaagacacagatcgcaaatgcacaggacaggagagaattggaaaagattccaactatgagcaggagggtaaagtccagttcgtgattgacgcagtctatgctatggctcacgcccttcaccacatgaacaaggatctctgtgctgactaccggggtgtctgcccagagatggagcaagctggaggcaagaagttgctgaagtatatacgcaatgttaatttcaatggtagtgctggcactccagtgatgtttaacaagaacggggatgcacctgggcgttatgacatctttcagtaccagaccacaaacaccagcaacccgggttaccgtctgatcgggcagtggacagacgaacttcagctcaatatagaagacatgcagtggggtaaaggagtccgagagatacccgcctcagtgtgcacactaccatgtaagccaggacagagaaagaagacacagaaaggaactccttgctgttggacctgtgagccttgcgatggttaccagtaccagtttgatgagatgacatgccagcattgcccctatgaccagaggcccaatgaaaatcgaaccggatgccaggatattcccatcatcaaactggagtggcactccccctgggctgtgattcctgtcttcctggcaatgttggggatcattgccaccatctttgtcatggccactttcatccgctacaatgacacgcccattgtccgggcatctgggcgggaactcagctatgttcttttgacgggcatctttctttgctacatcatcactttcctgatgattgccaaaccagatgtggcagtgtgttctttccggcgagttttcttgggcttgggtatgtgcatcagttatgcagccctcttgacgaaaacaaatcggatttatcgcatatttgagcagggcaagaaatcagtaacagctcccagactcataagcccaacatcacaactggcaatcacttccagtttaatatcagttcagcttctaggggtgttcatttggtttggtgttgatccacccaacatcatcatagactacgatgaacacaagacaatgaaccctgagcaagccagaggggttctcaagtgtgacattacagatctccaaatcatttgctccttgggatatagcattcttctcatggtcacatgtactgtgtatgccatcaagactcggggtgtacccgagaattttaacgaagccaagcccattggattcactatgtacacgacatgtatagtatggcttgccttcattccaattttttttggcaccgctcaatcagcggaaaagctctacatacaaactaccacgcttacaatctccatgaacctaagtgcatcagtggcgctggggatgctatacatgccgaaagtgtacatcatcattttccaccctgaactcaatgtccagaaacggaagcgaagcttcaaggcggtagtcacagcagccaccatgtcatcgaggctgtcacacaaacccagtgacagacccaacggtgaggcaaagaccgagctctgtgaaaacgtagacccaaacagccctgctgcaaaaaagaagtatgtcagttataataacctggttatctaacctgttccattccatggaaccatggaggaggaaga

SEQ ID NO: 1804 - protein, 915 aa, Homo sapiens
  ref <308>: DATABASE ACCESSION NUMBER: SWISS-Prot / Q14831
  ref <309>: DATABASE ENTRY DATE: 2002-06-15
MVQLRKLLRVLTLMKFPCCVLEVLLCALAAAARGQEMYAPHSIRIEGDVTLGGLFPVHAKGPSGVPCGDIKRENGIHRLEAMLYALDQINSDPNLLPNVTLGARILDTCSRDTYALEQSLTFVQALIQKDTSDVRCTNGEPPVFVKPEKVVGVIGASGSSVSIMVANILRLFQIPQISYASTAPELSDDRRYDFFSRVVPPDSFQAQAMVDIVKALGWNYVSTLASEGSYGEKGVESFTQISKEAGGLCIAQSVRIPQERKDRTIDFDRIIKQLLDTPNSRAVVIFANDEDIKQILAAAKRADQVGHFLWVGSDSWGSKINPLHQHEDIAEGAITIQPKRATVEGFDAYFTSRTLENNRRNVWFAEYWEENFNCKLTISGSKKEDTDRKCTGQERIGKDSNYEQEGKVQFVIDAVYAMAHALHHMNKDLCADYRGVCPEMEQAGGKKLLKYIRNVNFNGSAGTPVMFNKNGDAPGRYDIFQYQTTNTSNPGYRLIGQWTDELQLNIEDMQWGKGVREIPASVCTLPCKPGQRKKTQKGTPCCWTCEPCDGYQYQFDEMTCQHCPYDQRPNENRTGCQDIPIIKLEWHSPWAVIPVFLAMLGIIATIFVMATFIRYNDTPIVRASGRELSYVLLTGIFLCYIITFLMIAKPDVAVCSFRRVFLGLGMCISYAALLTKTNRIYRIFEQGKKSVTAPRLISPTSQLAITSSLISVQLLGVFIWFGVDPPNIIIDYDEHKTMNPEQARGVLKCDITDLQIICSLGYSILLMVTCTVYAIKTRGVPENFNEAKPIGFTMYTTCIVWLAFIPIFFGTAQSAEKLYIQTTTLTISMNLSASVALGMLYMPKVYIIIFHPELNVQKRKRSFKAVVTAATMSSRLSHKPSDRPNGEAKTELCENVDPNSPAAKKKYVSYNNLVI

SEQ ID NO: 1805 - DNA, 2466 bp, Rattus norvegicus
  ref <308>: DATABASE ACCESSION NUMBER: EMBL / D17310
  ref <309>: DATABASE ENTRY DATE: 2002-04-04
tttaaatagtaagaaaaaattcacagacagaaaaatttttgttaccaggtggccataaagaggtttcttgcccacagtgaactgatagctgtgacccacgtgtggttcctatggcgtcttggaagtacctccaaccctgtgaaagtgcattcctcacacagggctgtctcagaacagtcagaagaccctcgccagacccaagacctgcttggttgcatgagtaacaagcgatggattccatatctctgcgtgtagcactaaatgatggtaacttcattcctgtactggggtttggaaccactgtgcctgagaaggttgctaaggatgaagttatcaaggctactaaaatagctatagataatggattccgccattttgactctgcttatttgtacgaagtagaagaggaagtgggccaagccattagaagcaagattgaagacggcactgtgaagagagaagatatattctatacttcaaagctttggagcactttccatagaccagagctggtccgaacttgcttggaaaagacactgaaaagcactcaactggactatgtggatctttatattattcatttcccaatggctttgcagcctggagatatatttttcccacgagatgagcatggaaaactattgtttgaaacagtggatatctgtgacacatgggaggccatggagaagtgtaaggatgcaggattggccaagtctattggggtgtccaactttaactgcaggcagctggagaggattctgaataagccagggctcaaatacaagcctgtgtgcaaccaggtggaatgtcacctttatctcaaccagagcaaaatgctggactattgtaagtcaaaagacatcattctggtttcctactgcacgctgggaagttcacgagacaaaacatgggtggatcagaaaagtccagttctcctagatgatccagttctttgtgccatagcaaagaagtacaagcaaaccccagccctagttgcccttcgctaccagctgcagcgtggggttgtgcccctgatcaggagtttcaacgcgaagcggatcaaagagctaacacaggtttttgaattccagttggcttcagaggacatgaaagccctggatggcttgaacagaaatttcagatacaacaatgcaaaatattttgatgaccatcccaatcatccatttactgatgaatagtaacatggtggactttgtcagcatttctatcggaagatctgtttatgcattgtgatttgaaagatatcttggatactggtgactgaatgcatcagaccactgtttctgttaattcacagtcagctggagcaatgtccacagtgctatgagggaagccatgtttttgtcacactctgaaatggaacatcacgttgcttttccttgtgtttttaaatattcatttattttgctttccatatatgaatattttccctacatgtatgtgtatctcatgaatgtctatgtccatgcagggttgaagagtgttgcaggtcacttggaaccggagttacattgattatggagttaccatgtgggtgctgggagccaaacctaggtcttctgtgagactagcaagtgcctttgaatgctgagccatctcattaggtccaaccctaaagatccttgcctgccactatttctgtgatctcaatgttttgttttctcctgacttctgacaccaagctgatttgctagaagtcttgggcatgaagtgggtgttgaggacagttattgcaaagggatttctgggtgggagttgaaagaacgttcaacattcagggaattaattgttcgaggttattgattagtcaatattccccatattctttgaggaagaagaaagtactccatagattttccctttttcttagttttgaggtagggcacctgtggcaggagtgaccaagagacccagggttctctccaacagcccaagaaccagagctccaagaacctggagagcaagttcttgtgggaaggttggaatgttggtaagaagagaaccaatctaaaagcatcatcatgattcagatgtggggagtttgagaggaaatttgaatgtgtctctctttttgggaaatatatcatcttttttctttttgtaattacatgttgggagcaatgcccttgaaaccctccattattgatgtaatggttagaattaagtatgactgggttcatggaaaatccccagccagctgcagaagactaatacaaatctggtggtcaggatgaataatgatatgataaagttctgaccttgctgagaaatacatctgacatcaagatacccaatgtgatgacctgtaagctttctgaaaaaccaacatcctgttgacatcagctgactacatgtatactgtgcccttggcctgtgtaaatgtttcacacttcccccctccctctgttacccatgttatggtataaattcagccttggtaaaaaa

SEQ ID NO: 1806 - protein, 322 aa, Rattus norvegicus
  ref <308>: DATABASE ACCESSION NUMBER: SWISS-Prot / P23457
  ref <309>: DATABASE ENTRY DATE: 2002-06-15
MDSISLRVALNDGNFIPVLGFGTTVPEKVAKDEVIKATKIAIDNGFRHFDSAYLYEVEEEVGQAIRSKIEDGTVKREDIFYTSKLWSTFHRPELVRTCLEKTLKSTQLDYVDLYIIHFPMALQPGDIFFPRDEHGKLLFETVDICDTWEAMEKCKDAGLAKSIGVSNFNCRQLERILNKPGLKYKPVCNQVECHLYLNQSKMLDYCKSKDIILVSYCTLGSSRDKTWVDQKSPVLLDDPVLCAIAKKYKQTPALVALRYQLQRGVVPLIRSFNAKRIKELTQVFEFQLASEDMKALDGLNRNFRYNNAKYFDDHPNHPFTDE

SEQ ID NO: 1807 - DNA, 1104 bp, Homo sapiens
  ref <308>: DATABASE ACCESSION NUMBER: Refseq / NM_014342
  ref <309>: DATABASE ENTRY DATE: 2002-05-14
ggtcgcttggtggctccgtctgttgtccgtccgcccgcgggtgccatcatggcggacgcggccagtcaggtgctcctgggctccggtctcaccatcctgtcccagccgctcatgtacgtgaaagtgctcatccaggtgggatatgagcctcttcctccaacaataggacgaaatatttttgggcggcaagtgtgtcagcttcctggtctctttagttatgctcagcacattgccagtatcgatgggaggcgcgggttgttcacaggcttaactccaagactgtgttcgggagtccttggaactgtggtccatggtaaagttttacagcattaccaggagagtgacaagggtgaggagttaggacctggaaatgtacagaaagaagtctcatcttcctttgaccacgttatcaaggagacaactcgagagatgatcgctcgttctgctgctaccctcatcacacatcccttccatgtgatcactctgagatctatggtacagttcattggcagagaatccaagtactgtggactttgtgattccataataaccatctatcgggaagagggcattctaggatttttcgcgggtcttgttcctcgccttctaggtgacatcctttctttgtggctgtgtaactcactggcctacctcgtcaatacctatgcactggacagtggggtttctaccatgaatgaaatgaagagttattctcaagctgtcacaggattttttgcgagtatgttgacctatccctttgtgcttgtctccaatcttatggctgtcaacaactgtggtcttgctggtggatgccctccttactccccaatatatacgtcttggatagactgttggtgcatgctacaaaaagaggggaatatgagccgaggaaatagcttatttttccggaaggtcccctttgggaagacttattgttgtgacctgaaaatgttaatttgaagatgtggggcagggacagtgacatttctgtagtcccagatgcacagaattatgggagagaatgttgatttctatacagtgtggcgcgcttttttaataatcatttaatcttgggaaaattaaaaaaaaaaaaaaaaaaaaaaa

SEQ ID NO: 1808 - protein, 323 aa, Homo sapiens
  ref <308>: DATABASE ACCESSION NUMBER: SWISS-Prot / BAA99542
  ref <309>: DATABASE ENTRY DATE: 2002-06-15
MDPKYQRVELNDGHFMPVLGFGTYAPPEVPRNRAVEVTKLAIEAGFRHIDSAYLYNNEEQVGLAIRSKIADGSVKREDIFYTSKLWCTFFQPQMVQPALESSLKKLQLDYVDLYLLHFPMALKPGETPLPKDENGKVIFDTVDLSATWEVMEKCKDAGLAKSIGVSNFNCRQLEMILNKPGLKYKPVCNQVECHPYLNQSKLLDFCKSKDIVLVAHSALGTQRHKLWVDPNSPVLLEDPVLCALAKKHKRTPALIALRYQLQRGVVVLAKSYNEQRIRENIQVFEFQLTSEDMKVLDGLNRNYRYVVMDFLMDHPDYPFSDEY

SEQ ID NO: 1809 - DNA, 1743 bp, Rattus norvegicus
  ref <308>: DATABASE ACCESSION NUMBER: EMBL / D17370
  ref <309>: DATABASE ENTRY DATE: 1999-09-29
ccgtcccagcatgcagaaggacgcctcctccagcggcttcctgcccagcttccagcactttgccactcaggccatccacgtgggaccagagccggagcaatggagttcgcgtgctgtggtgctgcccatttcgctggccaccacgttcaaacaggactctccaggccagtcctcgggttttgtatacagccgctctggaaatccgacgaggaattgcttggaaaaagcagtggctgcactggatggggcaaagcactgtttgaccttcgctcggggccttgccgccaccacaacgattacccatcttttaaaagcaggagatgaagtcatttgcatggatgaagtgtatggaggcaccaacaggtacttcaggagggtggcatccgagtttggactgaagatttcttttgtggattgttccaaaaccaaattgctggaggcagcgatcacaccacagaccaagcttgtttggattgaaacacccacaaacccaaccttgaagttggccgacatcaaagcctgcgcacaaattgtccacaaacacaaagacatcattctggttgtagataacactttcatgtctgcatatttccagagacctttggctctgggtgctgatatttgtatgtgttctgccacaaaatacatgaacggccacagtgatgttgtcatgggcttagtgtctgttacttccgatgacctcaacgaacggcttcgtttcctgcagaattctctcggggcagttccttctcctttcgattgttacctctgctgccgaggcctgaagacactgcagatccggatggagaaacacttcaggaatgggatggcagtggcccgtttcctggagtctaatccccgggtagaaaaggttatttatcctgggctaccgtctcaccctcagcatgagctcgccaaacgtcagtgcacgggctgccccgggatggtcagtttctatatcaagggtactctgcagcatgctcaggtcttcctcaaaaatataaagctgtttgctctggctgagagcctgggaggatatgagagtctggctgagcttccagcaatcatgacccatgcctccgtgcctgagaaggacagagctaccctcgggatcagtgacacactgatccgactttctgtgggcctagaggatgaaaaggaccttctcgaagacctgggtcaagctttaaaggcagcgcacccttaaagttcgagtcaaagccggcattccagtgctgccatcagcagcagcagccaaggggccagaccttctgaataactggacagaccattaaggagcatctgcagaacttcgcagtgaacattttaagaccctagtgattttacagctgtaaccttacagggatcttcccttaaggactgtcttctgctaacaggttgttctgttagtatcattctgatagttttgctgtatttgtgttcaaggaagagagttgtattattttggggatcatgttgcttcttttttcctttttctttcttcggtagcctaagatatgttttaatcatgtttacaaaatttagtattgatgttttatgaagttaaattattcaatgaacggtcttaaatcaactgtaggggttttttttttgaaaaattattgaaagtggggggtctttatttaattaccataagccaaaaaaatcaaatatttggaatatctactgtgaaattctagtgattaaaggttgtacttgatacttgttgtttttcttaaatgg

SEQ ID NO: 1810 - protein, 398 aa, Rattus norvegicus
  ref <308>: DATABASE ACCESSION NUMBER: SWISS-Prot / P18757
  ref <309>: DATABASE ENTRY DATE: 1996-10-01
MQKDASSSGFLPSFQHFATQAIHVGPEPEQWSSRAVVLPISLATTFKQDSPGQSSGFVYSRSGNPTRNCLEKAVAALDGAKHCLTFARGLAATTTITHLLKAGDEVICMDEVYGGTNRYFRRVASEFGLKISFVDCSKTKLLEAAITPQTKLVWIETPTNPTLKLADIKACAQIVHKHKDIILVVDNTFMSAYFQRPLALGADICMCSATKYMNGHSDVVMGLVSVTSDDLNERLRFLQNSLGAVPSPFDCYLCCRGLKTLQIRMEKHFRNGMAVARFLESNPRVEKVIYPGLPSHPQHELAKRQCTGCPGMVSFYIKGTLQHAQVFLKNIKLFALAESLGGYESLAELPAIMTHASVPEKDRATLGISDTLIRLSVGLEDEKDLLEDLGQALKAAHP

SEQ ID NO: 1811 - DNA, 1194 bp, Homo sapiens
  ref <308>: DATABASE ACCESSION NUMBER: EMBL / S52028
  ref <309>: DATABASE ENTRY DATE: 2000-03-04
ttcttttcctctcttcttctttcgcggttcagcatgcaggaaaaagacgcctcctcacaaggtttcctgccacacttccaacatttcgccacgcaggcgatccatgtgggccaggatccggagcaatggacctccagggctgtagtgccccccatctcactgtccaccacgttcaagcaaggggcgcctggccagcactcgggttttgaatatagccgttctggaaatcccactaggaattgccttgaaaaagcagtggcagcactggatggggctaagtactgtttggcctttgcttcaggtttagcagccactgtaactattacccatcttttaaaagcaggagaccaaattatttgtatggatgatgtgtatggaggtacaaacaggtacttcaggcaagtggcatctgaatttggattaaagatttcttttgttgattgttccaaaatcaaattactagaggcagcaattacaccagaaaccaagcgccctttggctctgggagctgatatttctatgtattctgcaacaaaatacatgaatggccacagtgatgttgtaatgggcctggtgtctgttaattgtgaaagccttcataatagacttcgtttcttgcaaaactctcttggagcagttccatctcctattgattgttacctctgcaatcgaggtctgaagactctacatgtccgaatggaaaagcatttcaaaaacggaatggcagttgcccagttcctggaatctaatccttgggtagaaaaggttatttatcctgggctgccctctcatccacagcatgagttggtgaagcgtcagtgtacaggttgtacagggatggtcaccttttatattaagggcactcttcagcatgctgagattttcctcaagaacctaaagctatttactctggccgagagcttgggaggattcgaaagccttgctgagcttccggcaatcatgactcatgcatcagttcttaagaatgacagagatgtccttggaattagtgacacactgattcgactttctgtgggcttagaggatgaggaagacctactggaagatctagatcaagctttgaaggcagcacaccctccaagtggaattcacagctagtattccagagctgctattagaagctgcttcctgtgaagatcaatcttcctgagtaattaatggaccaacaatgag

SEQ ID NO: 1812 - protein, 405 aa, Homo sapiens
  ref <308>: DATABASE ACCESSION NUMBER: SWISS-Prot / P32929
  ref <309>: DATABASE ENTRY DATE: 2001-10-16
MQEKDASSQGFLPHFQHFATQAIHVGQDPEQWTSRAVVPPISLSTTFKQGAPGQHSGFEYSRSGNPTRNCLEKAVAALDGAKYCLAFASGLAATVTITHLLKAGDQIICMDDVYGGTNRYFRQVASEFGLKISFVDCSKIKLLEAAITPETKLVWIETPTNPTQKVIDIEGCAHIVHKHGDIILVVDNTFMSPYFQRPLALGADISMYSATKYMNGHSDVVMGLVSVNCESLHNRLRFLQNSLGAVPSPIDCYLCNRGLKTLHVRMEKHFKNGMAVAQFLESNPWVEKVIYPGLPSHPQHELVKRQCTGCTGMVTFYIKGTLQHAEIFLKNLKLFTLAESLGGFESLAELPAIMTHASVLKNDRDVLGISDTLIRLSVGLEDEEDLLEDLDQALKAAHPPSGIHS

SEQ ID NO: 1813 - DNA, 2880 bp, Rattus norvegicus
  ref <308>: DATABASE ACCESSION NUMBER: EMBL / D17521
  ref <309>: DATABASE ENTRY DATE: 1999-01-21
gcgactcctgcagcttctcttccagttcagcgggtcagggccggtccggtcgggatcgctctgctgccagctcagtgccggtgcgctcggggcgggcccgccgtccggaggatgaggctggagtgggcggaggcgtgagaaccgggttactttcctcccgaggtggagcgcggctgccctgtagtcctttgaaagcgctgtgaacccggagactcaagtcggggcagaggcaggttgactagagggcccgctagagccggagattgaacttcaccccgaaaccagcctccgccagtcccacctggccgcatttacgtaacctcttcccaaagccgggtagcagtgaagtccgccggggtggccacccggcagccgtgtcccggtgaagctcccggggcggctggcgcgggatctcaagcagatgcggggtccacaggcagcgcatccaccagccgccgagcttgctatgcctctgagctgcaaggaactcattatacaatgacaaatggaggcagcattaacagctccacacacttgctggatcttttggatgagcccatcccaggtgtcggtacatacgatgatttccatactattgactgggtgcgagaaaagtgtaaggacagagaaaggcacagacggatcaacagtaaaaaaaaagaatcagcatgggaaatgacaaaaagtctatatgatgcttggtcaggatggcttgtagttacactgacgggattggcgtcaggggcgctggctggattgatagacattgctgctgactggatgactgacctgaaagagggcatctgcctcagtgcattgtggtacaaccatgaacagtgttgttggggctctaatgagacgacgtttgaagagagggataaatgtccacagtggaaaacatgggcagagttaatcataggtcaagcagagggtcctggatcttatatcatgaactacatcatgtacatcttttgggctttgagttttgcctttcttgcagtttccttggtgaaagtatttgctccgtatgcctgtggctccggaattccagagattaaaactattttgagtggattcatcatcagaggttacttgggaaagtggactttaatgattaaaaccatcacattagtgctggctgtggcatcaggtttgagtttaggaaaagaaggtcccttggtacatgttgcctgctgctgtggaaatatcttttcctacctctttccaaagtatagcacaaatgaagctaaaaagagggaggtgctgtcagccgcctcagctgctggtgtctctgtggcttttggtgcgccaattggaggagtgctttttagtttggaggaggttagctattattttcctctcaaaactttatggagatcgttttttgctgctttggtggcggcctttgttttgagatccatcaatccatttggtaacagccgtctggtccttttttatgtggagtatcatacaccatggtacctttttgaactgtttccttttattctcctaggggtatttggagggctttggggagctttttttattagggcaaatattgcctggtgtcgccgacgcaagtccaccaaatttggaaagtatcctgttcttgaagtcattattgttgcagccattactgctgtgatagccttccccaacccatacacaaggctcaacaccagtgaactgattaaagagctgtttacagactgtggccccttggaatcctcctctctttgtgactacagaaatgacatgaatgccagtaaaattgttgatgatattcctgaccgaccagcaggcgttggagtatattcagctatctggcagttgtgcctagcactcatatttaaaataataatgacagtattcacttttggtatcaaggtcccgtcgggcctgtttatccccagcatggcgatcggagccattgcagggaggattgtggggattgctgtggagcagctcgcctactaccaccacgactggttcatcttcaaggagtggtgtgaggtcggggctgactgcatcactcctgggctgtatgccatggttggtgctgccgcatgcttaggtggtgtgacaagaatgactgtctctctggtggttattgtttttgaacttactggaggcttggaatatattgttcctcttatggctgcagtaatgaccagtaaatgggttggtgatgcctttggtagggaaggtatttatgaagcacacatccgactaaatgggtaccctttcttggatgcaaaagaagaattcactcatacaaccctggctgctgatgtcatgagacctcgaagaagtgaccctcccttagctgttttgacacaggacaatatgacagtagatgacatagaaaacatgattaatgagaccagctataatggctttcctgttataatgtcaaaagaatctcagagattagtgggatttgccctcagaagagacctgacaattgcaatagaaagtgccagaaaaaaacaagaaggtgttgttggcagttctcgggtgtgctttgcccaacacactccatctcttccagcagaaagtcctcggccattaaaactgagaagcatccttgacatgagtccttttacagtgacagaccacaccccaatggagattgtggtagacgtcttccgaaagcttggtctgaggcagtgccttgtcactcacaatgggcgcctccttggcattataacaaaaaaagatatcctccgtcatatggcccagacggcaaaccaagaccccgcttcaataatgttcaactgagtcctgtagatgaggagagagaggagacagaagaggaagttcgtttgttgaatagcacaattctttaatctgcgggactcgtccacttttttcttcttt

SEQ ID NO: 1814 - protein, 760 aa, Rattus norvegicus
  ref <308>: DATABASE ACCESSION NUMBER: SWISS-Prot / BAA04471
  ref <309>: DATABASE ENTRY DATE: 2002-06-15
MTNGGSINSSTHLLDLLDEPIPGVGTYDDFHTIDWVREKCKDRERHRRINSKKKESAWEMTKSLYDAWSGWLVVTLTGLASGALAGLIDIAADWMTDLKEGICLSALWYNHEQCCWGSNETTFEERDKCPQWKTWAELIIGQAEGPGSYIMNYIMYIFWALSFAFLAVSLVKVFAPYACGSGIPEIKTILSGFIIRGYLGKWTLMIKTITLVLAVASGLSLGKEGPLVHVACCCGNIFSYLFPKYSTNEAKKREVLSAASAAGVSVAFGAPIGGVLFSLEEVSYYFPLKTLWRSFFAALVAAFVLRSINPFGNSRLVLFYVEYHTPWYLFELFPFILLGVFGGLWGAFFIRANIAWCRRRKSTKFGKYPVLEVIIVAAITAVIAFPNPYTRLNTSELIKELFTDCGPLESSSLCDYRNDMNASKIVDDIPDRPAGVGVYSAIWQLCLALIFKIIMTVFTFGIKVPSGLFIPSMAIGAIAGRIVGIAVEQLAYYHHDWFIFKEWCEVGADCITPGLYAMVGAAACLGGVTRMTVSLVVIVFELTGGLEYIVPLMAAVMTSKWVGDAFGREGIYEAHIRLNGYPFLDAKEEFTHTTLAADVMRPRRSDPPLAVLTQDNMTVDDIENMINETSYNGFPVIMSKESQRLVGFALRRDLTIAIESARKKQEGVVGSSRVCFAQHTPSLPAESPRPLKLRSILDMSPFTVTDHTPMEIVVDVFRKLGLRQCLVTHNGRLLGIITKKDILRHMAQTANQDPASIMFN

SEQ ID NO: 1815 - DNA, 3953 bp, Homo sapiens
  ref <308>: DATABASE ACCESSION NUMBER: Refseq / NM_001829
  ref <309>: DATABASE ENTRY DATE: 2002-11-05
ggggtcacgggcgaactagaacactgggaaaggggctgcaggttccggaccggaccggccctgacccggaataatgagcaaggagggtgtggtgggttgaaagccatcctactttactcccgagttagagcatggattcagttttagtcttaagggggaagtgagattggagatttttatttttaattttgggcagaagcaggttgactctagggatctccagagcgagaggatttaacttcatgttgctcccgtgtttgaaggaggacaataaaagtcccaccgggcaaaattttcgtaacctctgcggtagaaaacgtcaggtatcttttaaatcgcgatagttttcgctgtgtcaggctttcttcggtggagctccgagggtagctaggttctaggtttgaaacagatgcagaatccaaaggcagcgcaaaaaacagccaccgattttgctatgtctctgagctgcgagataatcagacagctaaatggagtctgagcagctgttccatagaggctactatagaaacagctacaacagtataacaagtgcaagtagtgatgaggaacttttagatggagcaggtgttattatggactttcaaacatctgaagatgacaatttattagatggtgacactgcagttggaactcattatacaatgacaaatggaggcagcattaacagttctacacatttactggatcttttggatgaaccaattccaggtgttggtacatatgatgatttccatactattgattgggtgcgagaaaaatgtaaagacagagaaaggcatagacggatcaacagcaaaaagaaagaatcagcatgggaaatgacaaaaagtttgtatgatgcgtggtcaggatggctagtagtaacactaacaggattggcatcaggggcactggccggattaatagacattgctgccgattggatgactgacctaaaggagggcatttgccttagtgcgttgtggtacaaccacgaacagtgctgttggggatctaatgaaacaacatttgaagagagggataaatgtccacagtggaaaacatgggcagaattaatcataggtcaagcagagggtcctggttcttatatcatgaactacataatgtacatcttctgggccttgagttttgcctttcttgcagtttccctggtaaaggtatttgctccatatgcctgtggctctggaattccagagattaaaactattttaagtggattcatcatcagaggttacttgggaaaatggactttaatgattaaaaccatcacattagtcctggctgtggcatcaggtttgagtttaggaaaagaaggtcccctggtacatgttgcctgttgctgcggaaatatcttttcctacctctttccaaagtatagcacaaacgaagctaaaaaaagggaggtgctatcagctgcctcagctgcaggggtttctgtagcttttggtgcaccaattggaggagttctttttagcctggaagaggttagctattattttcctctcaaaactttatggagatcattttttgctgctttagtggctgcatttgttttgaggtccatcaatccatttggtaacagccgtctggtccttttttatgtggagtatcatacaccatggtacctttttgaactgtttccttttattcttctaggggtatttggagggctttggggagcctttttcattagggcaaatattgcctggtgtcgtcgacgcaagtccacgaaatttggaaagtatcccgttctggaagtcattattgttgcagccattactgctgtgatagccttccctaatccatacactaggctaaacaccagtgaactgatcaaagagctttttacagactgtggtcccctggaatcctcttctctttgtgactacagaaatgacatgaatgccagtaaaattgtcgatgacattcctgatcgtccagcaggcattggagtatattcagctatatggcagttatgcctggcactcatatttaaaatcataatgacagtattcacttttggcatcaaggttccatcaggcttgttcatccccagcatggccattggagcgatcgcaggaaggattgtggggattgcggtggagcagcttgcctactatcaccacgactggtttatctttaaggagtggtgtgaggtcggggctgattgcattacacctggcctttatgccatggttggtgctgctgcatgcttaggtggtgtgacaagaatgactgtctccctggtggttattgtttttgagcttactggaggcttggaatatattgttccccttatggctgcagtcatgaccagtaaatgggttggagatgcctttggcagggaaggcatttatgaagcacacatccgattaaatggataccctttcttggatgcaaaagaagaattcgaattcactcataccaccctggctgctgacgttatgagacctcgaaggaatgatcctcccttagctgtcctgacacaggacaatatgacagtggatgatatagaaaacatgattaatgaaaccagctacaatggatttcctgtcataatgtcaaaagaatctcagagattagtgggatttgccctcagaagagacctgacaattgcaatagaaagtgccaggaaaaaacaagaaggtatcgttggcagttctcgggtgtgttttgcacagcacaccccatctcttccagcagaaagtcctcggccattgaagcttcgaagcattcttgacatgagcccttttacagtgacagaccacaccccaatggagattgtggtggatattttccgaaagctgggactgaggcagtgccttgtaactcacaatgggcgcctccttggcattataacaaaaaaagatatcctccggcatatggcccagacggcaaaccaagaccccgcttcaataatgttcaactgaatctcacagatgaggagagagaagaaacggaagaggaagtttatttgttgaatagcacaactctttaacctgagggagtcatctacttttttttcctcctttacaaaaaaagaaaggaaatataaaagccgggtttttgcaacatggtttgcaaataatgctggtggaatggaggagttgtttggggagggaaaggagagagaaggaaaggagtgaggtatttcccgtctaacagaaagcagcgtatcaactcctattgttctgcactggatgcattcagctgaggatgtgcctgatagtgcaggcttgcgcctcaacagagatgacagcagagtcctcgagcacctggcctgtttgctcacatgcaagacacatacagccctattctagaggatacttgaatggacctctataaacgcaaggttcttgcctttttttaatcaaaactgttctgtttaattcatgaattgtatagttaagcattacctttctacattccagaagagcctttatttctctctctctctctctctctctctctctctctactgagctgtaacaaagcctctttaaatcggtgtatccttttgaagcagtcctttctcatattgagatgtactgtgattttactgaggtttcatcacaagaagggagtgtttcttgtgccattaaccatgtagtttgtaccatcactaaatgcttggaacagtacacatgcaccacaacaaaggctcatcaaacaggtaaagtctcgaaggaagcgagaacgaaatctctcattgtgtgccgtgtggctcaaaaccgaaaacaatgaagcttggttttaaaggataaagttttcttttttgttttcctctcagactttatggataatgtgaccgggtcttatgcaaattttctatttctaaaactactactatgatatacaagtgctgttgagcataattaaataaaatgctgctgctttgacagtaaagagaaggaagtattctgaaaaaaaac

SEQ ID NO: 1816 - protein, 820 aa, Homo sapiens
  ref <308>: DATABASE ACCESSION NUMBER: Refseq / NP_001820
  ref <309>: DATABASE ENTRY DATE: 2002-11-05
MESEQLFHRGYYRNSYNSITSASSDEELLDGAGVIMDFQTSEDDNLLDGDTAVGTHYTMTNGGSINSSTHLLDLLDEPIPGVGTYDDFHTIDWVREKCKDRERHRRINSKKKESAWEMTKSLYDAWSGWLVVTLTGLASGALAGLIDIAADWMTDLKEGICLSALWYNHEQCCWGSNETTFEERDKCPQWKTWAELIIGQAEGPGSYIMNYIMYIFWALSFAFLAVSLVKVFAPYACGSGIPEIKTILSGFIIRGYLGKWTLMIKTITLVLAVASGLSLGKEGPLVHVACCCGNIFSYLFPKYSTNEAKKREVLSAASAAGVSVAFGAPIGGVLFSLEEVSYYFPLKTLWRSFFAALVAAFVLRSINPFGNSRLVLFYVEYHTPWYLFELFPFILLGVFGGLWGAFFIRANIAWCRRRKSTKFGKYPVLEVIIVAAITAVIAFPNPYTRLNTSELIKELFTDCGPLESSSLCDYRNDMNASKIVDDIPDRPAGIGVYSAIWQLCLALIFKIIMTVFTFGIKVPSGLFIPSMAIGAIAGRIVGIAVEQLAYYHHDWFIFKEWCEVGADCITPGLYAMVGAAACLGGVTRMTVSLVVIVFELTGGLEYIVPLMAAVMTSKWVGDAFGREGIYEAHIRLNGYPFLDAKEEFEFTHTTLAADVMRPRRNDPPLAVLTQDNMTVDDIENMINETSYNGFPVIMSKESQRLVGFALRRDLTIAIESARKKQEGIVGSSRVCFAQHTPSLPAESPRPLKLRSILDMSPFTVTDHTPMEIVVDIFRKLGLRQCLVTHNGRLLGIITKKDILRHMAQTANQDPASIMFN

SEQ ID NO: 1817 - DNA, 2099 bp, Rattus norvegicus
  ref <308>: DATABASE ACCESSION NUMBER: EMBL / D17614
  ref <309>: DATABASE ENTRY DATE: 1998-09-23
agatcaaagtggtgggactcgcgtcgcggccgcggagactagaaggaggactccggatccggctcggcgctcgccctcgctcgccatggagaagaccgagctgatccagaaggccaagctggccgagcaggccgagcgctacgacgacatggccacctgcatgaaagccgtgacggagcagggcgccgagctgtccaacgaggagcgcaacctgctatctgtggcctacaagaacgtggtcgggggccgcaggtccgcctggagggtcatctcgagcattgagcagaagaccgatacctcggacaagaagttgcagctgatcaaggactatcgggagaaagtggagtctgagctgaggtccatctgcaccacggtcctggaattgttggataagtatttaatagccaatgcaactaatccagagagtaaggtcttctatctgaaaatgaagggagattatttccggtatcttgctgaagtcgcttgtggtgatgatcgaaaacaaacgatagaaaattcccaaggagcctaccaagaggcatttgatataagcaagaaagagatgcaacctacacatccgatccgcctggggctggctcttaacttttctgtattttactatgagatccttaataatcccgagcttgcctgcacactggctaaaacggcttttgatgaagccatcgccgagcttgatacactgaatgaagactcctacaaagacagcaccctcatcatgcagttgcttagagacaacttaacattatggacatcagacagtgcaggagaagaatgtgatgcagctgagggggctgagaactaaaggcatccaggacaccaacctccttcccctcaagaaaacctttttacatctccattccttattccacttggatttcctctagcaaggaagcccattcatgtgtatggggtcaactgtttatagtcttttcacactgcagctttgggaaaactccatcccttggtttgtgttgtctccaccttcctggtgtgcagttactgctgtagaaaagtatcaatagcttcatttcatataaacacgagtaacttccagacacttgtgtagaggactgacagcacatttggtatttaagtaatctgaaccagttctgcaagtgactgtgttttgtattactgtgaagatatggaaatggtagtgcattacaatttaaagtgattgtaataataacgtcttgatttctacattccttttctgaactttcttgggggtttcctttcagaagcaacttttccatgctcttactacaaattcctttttagtaggaatccagaagtgttagattgaatgggaaagcgcttaatgcatccgggcttgggggtcacagattgaaatgtctcctgtgtcacattctggaggttacatctgtctgtgacaacagggcgtttccttatgcattcttcatttgctgctgtttaagttgacaacttccttcccaataaaaattcacttacacctcctgccttcgtagctctggtattcactttaccttgtgacagaagtagcatgttgctgccagaatacaagcattgctttgggcaaattaaaatgcatgtcctttcttaatacactaggaaggagaaataaagtacacaagtccaagtctaaactttagtacttttccatgcagatttgtgcacatgtgagggggtatccagtttgtccagtgattgttctttagagagttggaccactatattgtgtgtttgctaatcattgactgtagtcccaaaaaagccttgtgaaaatgttatgccctatgtaacagcagagtaacataaaataaaactacattttataaaaccatttattatggctttgtaacagttgcatacccatattttaagaacagacaaatttactactttttgaagtttgttgctatttctctttatgtaacatataatggtgatatccatatttctgcattgtggtacacttgtctagggtgcctggcactgtaaaattggactatatttctccagatagcctcatgggttgtcttcctcagatgtaatgataactggttaggtgtcatgtgtaataaagtgaacatttg

SEQ ID NO: 1818 - protein, 245 aa, Rattus norvegicus
  ref <308>: DATABASE ACCESSION NUMBER: SWISS-Prot / P35216
  ref <309>: DATABASE ENTRY DATE: 1999-07-15
MEKTELIQKAKLAEQAERYDDMATCMKAVTEQGAELSNEERNLLSVAYKNVVGGRRSAWRVISSIEQKTDTSDKKLQLIKDYREKVESELRSICTTVLELLDKYLIANATNPESKVFYLKMKGDYFRYLAEVACGDDRKQTIENSQGAYQEAFDISKKEMQPTHPIRLGLALNFSVFYYEILNNPELACTLAKTAFDEAIAELDTLNEDSYKDSTLIMQLLRDNLTLWTSDSAGEECDAAEGAEN

SEQ ID NO: 1819 - DNA, 2166 bp, Homo sapiens
  ref <308>: DATABASE ACCESSION NUMBER: Refseq / NM_006826
  ref <309>: DATABASE ENTRY DATE: 2002-11-05
gtggtgggactcgcgtcgcggccgcggagacgtgaagctctcgaggctcctcccgctgcgggtcggcgctcgccctcgctctcctcgccctccgccccggccccggccccgcgcccgccatggagaagactgagctgatccagaaggccaagctggccgagcaggccgagcgctacgacgacatggccacctgcatgaaggcagtgaccgagcagggcgccgagctgtccaacgaggagcgcaacctgctctccgtggcctacaagaacgtggtcgggggccgcaggtccgcctggagggtcatctctagcatcgagcagaagaccgacacctccgacaagaagttgcagctgattaaggactatcgggagaaagtggagtccgagctgagatccatctgcaccacggtgctggaattgttggataaatatttaatagccaatgcaactaatccagagagtaaggtcttctatctgaaaatgaagggtgattacttccggtaccttgctgaagttgcgtgtggtgatgatcgaaaacaaacgatagataattcccaaggagcttaccaagaggcatttgatataagcaagaaagagatgcaacccacacacccaatccgcctggggcttgctcttaacttttctgtattttactatgagattcttaataacccagagcttgcctgcacgctggctaaaacggcttttgatgaggccattgctgaacttgatacactgaatgaagactcatacaaagacagcaccctcatcatgcagttgcttagagacaacctaacactttggacatcagacagtgcaggagaagaatgtgatgcggcagaaggggctgaaaactaaatccatacagggtgtcatccttctttccttcaagaaacctttttacacatctccattccttattccacttggatttcctatagcaaagaaacccattcatgtgtatggaatcaactgtttatagtcttttcacactgcagctttgggaaaacttcattccttgatttgtgtttgtcttggccttcctggtgtgcagtactgctgtagaaaagtattaatagcttcatttcatataaacataagtaactcccaaacacttatgtagaggactaaaaatgtatctggtatttaagtaatctgaaccagttctgcaagtgactgtgttttgtattactgtgaaaataagaaaatgtagttaattacaatttaaagagtattccacataacttcttaatttctacattccctcccttactcttcgggggtttcctttcagtaagcaacttttccatgctcttaatgtattcctttttagtaggaatccggaagtattagattgaatggaaaagcacttgccatctctgtctaggggtcacaaattgaaatggctcctgtatcacatacggaggtcttgtgtatctgtggcaacagggagtttccttattcactctttatttgctgctgtttaagttgccaacctcccctcccaataaaaattcacttacacctcctgcctttgtagttctggtattcactttactatgtgatagaagtagcatgttgctgccagaatacaagcattgcttttggcaaattaaagtgcatgtcatttcttaatacactagaaaggggaaataaattaaagtacacaagtccaagtctaaaactttagtacttttccatgcagatttgtgcacatgtgagagggtgtccagtttgtctagtgattgttatttagagagttggaccactattgtgtgttgctaatcattgactgtagtcccaaaaaagccttgtgaaaatgttatgccctatgtaacagcagagtaacataaaataaaagtacattttataaaccatttactatggctttgtaacaattgcatacccatattttaagggacaggtgaatttactactttctaaagtttattgatacttcccttttatgtaaaatgtagtagtgatacctatatttccacattgtgcattgtgacacacttgtctagggatgcctggaagtgtataaaattggactgcatttcttagagtgttttactatagatcagtctcatgggccatctcttcctcagatgtaaatgatatctggttaagtgttatatggaataaagtggacattttaaaacta

SEQ ID NO: 1820 - protein, 245 aa, Homo sapiens
  ref <308>: DATABASE ACCESSION NUMBER: SWISS-Prot / P27348
  ref <309>: DATABASE ENTRY DATE: 2002-06-15
MEKTELIQKAKLAEQAERYDDMATCMKAVTEQGAELSNEERNLLSVAYKNVVGGRRSAWRVISSIEQKTDTSDKKLQLIKDYREKVESELRSICTTVLELLDKYLIANATNPESKVFYLKMKGDYFRYLAEVACGDDRKQTIDNSQGAYQEAFDISKKEMQPTHPIRLGLALNFSVFYYEILNNPELACTLAKTAFDEAIAELDTLNEDSYKDSTLIMQLLRDNLTLWTSDSAGEECDAAEGAEN

SEQ ID NO: 1821 - DNA, 2563 bp, Rattus norvegicus
  ref <308>: DATABASE ACCESSION NUMBER: EMBL / D17711
  ref <309>: DATABASE ENTRY DATE: 1999-09-29
attggtggatccatttagttcaagaaaatggagaccgaacagccagaagaaaccttccctaacaccgaaaccaatggtgaatttggtaaacgccctgcagaagatatggaagaggaacaagcctttaaaagatctagaaatactgatgagatggttgaattgcgcattttgcttcagagcaagaatgctggggcagtgattggaaaaggaggcaagaatattaaggctctccgtacagactacaatgccagtgtttcagtcccagacagcagtggccccgagcgcatactgagtatcagtgctgatattgagacgattggagaaattctgaagaaaatcatccctactttggaagagggcctgcagttgccatcacccactgcaaccagccagctcccgctcgaatctgatgctgtggaatgcttaaattaccagcattataaagggagtgacttcgactgcgagctgagactgttgattcatcaaagtctggccggaggaattattggtgttaaaggtgctaaaatcaaagaacttcgagaaaacactcagacaacaatcaagcttttccaggaatgctgccctcattctactgacagagttgttcttattggaggaaagcccgatagggttgtagaatgcatcaagatcatccttgaccttatatctgagtctcccatcaaaggacgtgcacaaccttatgatcccaacttctatgatgaaacctatgattatggtggttttacaatgatgtttgatgaccgccgaggacgacctgtgggattccccatgcggggaagaggtggttttgacagaatgcctcctggtcggggtgggcgtcccatgcctccttctagaagagattatgatgatatgagccctcgtcgaggaccaccaccaccaccacctggtcgaggtggacggggtggcagcagagctcggaatcttcctcttcctccaccaccaccacccagagggggagatctcatggcttacgacagaagaggacggcctggagaccgctatgatggcatggttgggttcagtgctgatgaaacttgggactctgcaattgacacatggagcccatcagaatggcaaatggcttatgaaccacagggtggttctggatatgattattcttatgcagggggccgtggctcgtatggtgatcttggcggacctattatcactacacaagtaactattcccaaagatttggctggatctattattggcaaaggtggtcagcggattaaacaaattcgtcatgagtctggagcatctatcaaaattgatgaacctttagaaggatctgaagatcggatcattaccattacgggaacacaggaccagatacagaacgcacagtatttgctgcagaacagtgtgaagcagtattctggaaagtttttctaagactagtgaagaactgaaggagtcctgcatctttttttttttatctgcttctgtttaaaaagccaacattcctctgcttcctaggtgttctgcatttgaggtgtagtgaaatctttgctgttcaccagatgtaatgttttagttccttacaaacagggttggggggagggcatgcaaaaaaactaacattgaaattttgaaacagcagcagagtgagtgacttttattttttgttcattgttggtggttttaaaaattccccccgtgtaattattgtgaacaccttgctttgtggtcactgtaacattggggggtgggacagggaggaaagtaatagtccacatgtccctggcatttgttcagagcagtgtgcagaatgtaatgctcttttgtaagaaacgttttatgatttttaaaataaatttagtgaatctatttttggtggtctttttttttttttttaaagacaatttcaaatggtggttgaattttccagcccacccctaaactaaacactaagtttgattttcagcagctcctctgttggatataagtgcacctcttggatatagacaaacacattggcaaatttcagtttgggtgatttcttaatggttggaaagacttggcttgataaatttccatcacatattcatgcttataataagcttgggattttgtttgtttttgcaaatgtttgccactacttttcaacagttttctgttagtcgtggggaactgcggtggggagcaatactacaagagtaagcatctgagtatgtgccagaagcctggtgggcaatgagctttattaaccagagtaacacttggttatggaagtggctgatgctgaataaatcctggttatttttgttagataatttctcacctatagacttaagctgtcaactgctagcgtcttgttagttgaactttgtaaaaatatatatatacttgtttttccattgtatgcacaatgaaagaaaaaagatgtaccatttctctgttgtgtgttgaattatgtaggaaatgtttgtgaacgattcaaaaaaaatggaaaagttcctgtggatgttttgtgtagtaacttggcatctgtattgatagttccaaatccacatctaaataaaacttcatgatgtta

SEQ ID NO: 1822 - protein, 463 aa, Rattus norvegicus
  ref <308>: DATABASE ACCESSION NUMBER: SWISS-Prot / Q07244
  ref <309>: DATABASE ENTRY DATE: 2002-06-15
METEQPEETFPNTETNGEFGKRPAEDMEEEQAFKRSRNTDEMVELRILLQSKNAGAVIGKGGKNIKALRTDYNASVSVPDSSGPERILSISADIETIGEILKKIIPTLEEGLQLPSPTATSQLPLESDAVECLNYQHYKGSDFDCELRLLIHQSLAGGIIGVKGAKIKELRENTQTTIKLFQECCPHSTDRVVLIGGKPDRVVECIKIILDLISESPIKGRAQPYDPNFYDETYDYGGFTMMFDDRRGRPVGFPMRGRGGFDRMPPGRGGRPMPPSRRDYDDMSPRRGPPPPPPGRGGRGGSRARNLPLPPPPPPRGGDLMAYDRRGRPGDRYDGMVGFSADETWDSAIDTWSPSEWQMAYEPQGGSGYDYSYAGGRGSYGDLGGPIITTQVTIPKDLAGSIIGKGGQRIKQIRHESGASIKIDEPLEGSEDRIITITGTQDQIQNAQYLLQNSVKQYSGKFF

SEQ ID NO: 1823 - DNA, 420 bp, Homo sapiens
  ref <308>: DATABASE ACCESSION NUMBER: EMBL / BF930538
  ref <309>: DATABASE ENTRY DATE: 2001-08-31
tgtttatcgaatgccacgcgtctgggactgaaacacggcattgtagtctgtacggagagccttaatattcttgcctccttttccaatcactgccccagcattcttgctctgaagcagaatgcgtaattcaaccatctcatcagtgtttctagatcttttaaatgcttgttccaaatgagcagctggcatccgagtggtgtcctgtgtgggctgatagttgatcacacattgtgcttttgatttttgcatttggtgatgaatattttatacccgtctaagggagaaagctaatgttttccacaagactgaacaacgtgtatttacacgagggtagacggcagatgcctgacagagagtgggttggcagacaacacactagaattttcacgggtgtgggcacatggggtggcatcgataaac

SEQ ID NO: 1824 - protein, 1465 aa, Homo sapiens
  ref <308>: DATABASE ACCESSION NUMBER: SWISS-Prot / P54296
  ref <309>: DATABASE ENTRY DATE: 2002-06-15
MSLVTVPFYQKRHRHFDQSYRNIQTRYLLDEYASKKRASTQASSQKSLSQRSSSQRASSQTSLGGTICRVCAKRVSTQEDEEQENRSRYQSLVAAYGEAKRHGFLSELAHLEEDVHLARSQARDKLDKYAIQQMMEDKLAWERHTFEERISRAPEILVRLRSHTVWERMSVKLCFTVQGFPTPVVQWYKDGSLICQAAEPGKYRIESNYGVHTLEINRADFDDTATYSAVATNAHGQVSTNAAVVVRRFRGDEEPFRSVGLPIGLPLSSMIPYTHFDVQFLEKFGVTFRREGETVTLKCTMLVTPDLKRVQPRAEWYRDDLLLKESKWTKMFFGEGQASLSFSHLHKDDEGLYTLRIVSRGGVTDHSAFLFVRDADPLVTGAPGAPMDLQCHDANRDYVIVTWKPPNTTTESPVMGYFVDRCEVGTNNWVQCNDAPVKICKYPVTGLFEGRSYIFRVRAVNSAGISRPSRVSDAVAALDPLDLRRLQAVHLEGEKEIAIYQDDLEGDAQVPGPPTGVHASEISRNYVVLSWEPPTPRGKDPLMYFIEKSVVGSGTWQRVNAQTAVRSPRYAVFDLMEGKSYVFRVLSANRHGLSEPSEITSPIQAQDVTVVPSAPGRVLASRNTKTSVVVQWDRPKHEEDLLGYYVDCCVAGTNLWEPCNHKPIGYNRFVVHGLTTGEQYIFRVKAVNAVGMSENSQESDVIKVQAALTVPSHPYGITLLNCDGHSMTLGWKVPKFSGGSPILGYYLDKREVHHKNWHEVNSSPSKPTILTVDGLTEGSLYEFKIAAVNLAGIGEPSDPSEHFKCEAWTMPEPGPAYDLTFCEVRDTSLVMLWKAPVYSGSSPVSGYFVDFREEDAGEWITVDQTTTASRYLKVSDLQQGKTYVFRVRAVNANGVGKPSDTSEPVLVEARPGTKEISAGVDEQGNIYLGFDCQEMTDASQFTWCKSYEEISDDERFKIETVGDHSKLYLKNPDKEDLGTYSVSVSDTDGVSSSFVLDPEELERLMALSNEIKNPTIPLKSELAYEIFDKGRVRFWLQAEHLSPDASYRFIINDREVSDSEIHRIKCDKATGIIEMVMDRFSIENEGTYTVQIHDGKAKSQSSLVLIGDAFKTVLEEAEFQRKEFLRKQGPHFAEYLHWDVTEECEVRLVCKVANTKKETVFKWLKDDALYETETLPNLERGICELLIPKLSKKDHGEYKATLKDDRGQDVSILEIAGKVYDDMILAMSRVCGKSASPLKVLCTPEGIRLQCFMKYFTDEMKVNWCHKDAKISSSEHMRIGGSEEMAWLQICEPTEKDKGKYTFEIFDGKDNHQRSLDLSGQAFDEAFAEFQQFKAAAFAEKNRGRLIGGLPDVVTIMEGKTLNLTCTVFGNPDPEVIWFKNDQDIQLSEHFSVKVEQAKYVSMTIKGVTSEDSGKYSINIKNKYGGEKIDVTVSVYKHGEKIPDMAPPQQAKPKLIPASASAAGQ

SEQ ID NO: 1825 - DNA, 2563 bp, Rattus norvegicus; identical to SEQ ID NO: 1821
  ref <308>: DATABASE ACCESSION NUMBER: EMBL / D17711
  ref <309>: DATABASE ENTRY DATE: 1999-09-29

SEQ ID NO: 1826 - protein, 463 aa, Rattus norvegicus; identical to SEQ ID NO: 1822
  ref <308>: DATABASE ACCESSION NUMBER: SWISS-Prot / Q07244
  ref <309>: DATABASE ENTRY DATE: 2002-06-15

SEQ ID NO: 1827 - DNA, 420 bp, Homo sapiens; identical to SEQ ID NO: 1823
  ref <308>: DATABASE ACCESSION NUMBER: EMBL / BF930538
  ref <309>: DATABASE ENTRY DATE: 2001-08-31

SEQ ID NO: 1828 - protein, 1465 aa, Homo sapiens; identical to SEQ ID NO: 1824
  ref <308>: DATABASE ACCESSION NUMBER: SWISS-Prot / P54296
  ref <309>: DATABASE ENTRY DATE: 2002-06-15

SEQ ID NO: 1829 - DNA, 2563 bp, Rattus norvegicus; identical to SEQ ID NO: 1821
  ref <308>: DATABASE ACCESSION NUMBER: EMBL / D17711
  ref <309>: DATABASE ENTRY DATE: 1999-09-29

SEQ ID NO: 1830 - protein, 463 aa, Rattus norvegicus; identical to SEQ ID NO: 1822
  ref <308>: DATABASE ACCESSION NUMBER: SWISS-Prot / Q07244
  ref <309>: DATABASE ENTRY DATE: 2002-06-15

SEQ ID NO: 1831 - DNA, 420 bp, Homo sapiens; identical to SEQ ID NO: 1823
  ref <308>: DATABASE ACCESSION NUMBER: EMBL / BF930538
  ref <309>: DATABASE ENTRY DATE: 2001-08-31

SEQ ID NO: 1832 - protein, 1465 aa, Homo sapiens; identical to SEQ ID NO: 1824
  ref <308>: DATABASE ACCESSION NUMBER: SWISS-Prot / P54296
  ref <309>: DATABASE ENTRY DATE: 2002-06-15

SEQ ID NO: 1833 - DNA, 2166 bp, Rattus norvegicus
  ref <308>: DATABASE ACCESSION NUMBER: EMBL / D17809
  ref <309>: DATABASE ENTRY DATE: 1999-01-21
tggatcacagtctccatcgactgactcaggatgcggctggaccgccgggccctctatgcgctagttctgctgcttgcctgcgcctcgctgggtctcctgtacgccagcacccgagacgcgccaggtctcccgaaccctctggcattgtggtcacccccacaaggtcccccgaggctcgatctgctagaccttgccactgagcctcgctacgcacacatcccagtcaggatcaaggagcaagtggtggggctgctggctcagaacaattgcagttgtgagtccagcggaggacgctttgccttgccgttcctgaggcaggtccgggcgattgacttcactaaagcctttgacgccgaggagctgagggctgtttctatctccagagagcaggaataccaggccttccttgcaaggagccggtccctggctgaccagctgctgatagcccctgccaactcccccttacagtatcccctgcagggtgtggaggttcagcccctcaggagcatcctggtgccagggctaagtctgcaggaagcttctgttcaggaaatatatcaggtgaacctgattgcttcccttggcacctgggatgtggcaggggaagtaacaggggtgactctcactggagaggggcagtcggacctcacccttgccagcccaattctggataaactcaaccgacagctgcaactggtgacttacagcagccggagctaccaagccaacacagcagacacagtccggttctccaccaagggacatgaagtggccttcaccatcctcataagacatcctcccaacccccggctgtacccaccatcatccctaccccaaggagcccagtacaacatcagtgctctggttaccgttgccaccaagacctttcttcgttatgatcggctacgggcactcattgccagcatcagacgcttttaccctacggtcaccatagtaatcgctgacgacagcgacaaaccggagcgaattagcgacccccatgtggagcactatttcatgcccttcggcaagggttggtttgcaggtcggaacctggcggtgtcccaagtaaccaccaaatacgtgctgtgggtggacgacgactttgtcttcacggcgcgcacgcggctggagaagcttgtggatgtcctggagaggacgcccctggacttggttgggggcgcggtgcgggagatctcgggctacgctaccacctaccgacagctgctaagtgtggagccgggcgccccaggctttgggaactgcctccggcaaaagcagggcttccaccacgagctcgctggctttccaaactgcgtggtcaccgacggcgtagtcaacttcttcctggcgcgcacagataaagtgcgccaggtgggctttgacccacgcctcaaccgggtggctcatctggaattcttcctggatggtcttggttcccttcgagttggctcctgctctgatgttgttgtggatcatgcgtcaaaggtgaagctgccttggacatcaaaggatccaggggctgaactttatgcccgttaccgttacccgggatcactggaccaaagtcaggtggccaaacatcgactgctcttcttcaaacaccggctacagtgcatgaccgccgagtaacgtctgatttgggccttcacactgtcaggctgggcctgcctcctccctgccaggaatttccagcaaccacccccccccaatccctgagcaccccactgatgaacaccctggcttcccgaccctctccaccaatctgattcctaacaggggcttgtcctggtgacacccttcctttctgtgagtgaccagaggccagatggagccatatcctcccccacagccagtgccaagtcctccccaaccccactcctatggggcaggaaatggggaggttcactttccaagtgccaaagagcccagacggactctaagaccctcaagtggaaacactctcacctcctgaggtgggcagggaaactcccaatttgcaaccccagggacatgcaccccaccccagctctggatccagcaccatgtgtcccggctccaacatacccctacagaaagcactgtgactgtagttctgtggggctggtgaacacacggtggaagccaaaaaaaaaaaaaaaaaaaaaaaaggggggggggggatcc

SEQ ID NO: 1834 - protein, 533 aa, Rattus norvegicus
  ref <308>: DATABASE ACCESSION NUMBER: SWISS-Prot / Q10468
  ref <309>: DATABASE ENTRY DATE: 2002-06-15
MRLDRRALYALVLLLACASLGLLYASTRDAPGLPNPLALWSPPQGPPRLDLLDLATEPRYAHIPVRIKEQVVGLLAQNNCSCESSGGRFALPFLRQVRAIDFTKAFDAEELRAVSISREQEYQAFLARSRSLADQLLIAPANSPLQYPLQGVEVQPLRSILVPGLSLQEASVQEIYQVNLIASLGTWDVAGEVTGVTLTGEGQSDLTLASPILDKLNRQLQLVTYSSRSYQANTADTVRFSTKGHEVAFTILIRHPPNPRLYPPSSLPQGAQYNISALVTVATKTFLRYDRLRALIASIRRFYPTVTIVIADDSDKPERISDPHVEHYFMPFGKGWFAGRNLAVSQVTTKYVLWVDDDFVFTARTRLEKLVDVLERTPLDLVGGAVREISGYATTYRQLLSVEPGAPGFGNCLRQKQGFHHELAGFPNCVVTDGVVNFFLARTDKVRQVGFDPRLNRVAHLEFFLDGLGSLRVGSCSDVVVDHASKVKLPWTSKDPGAELYARYRYPGSLDQSQVAKHRLLFFKHRLQCMTAE

SEQ ID NO: 1835 - DNA, 2512 bp, Homo sapiens
  ref <308>: DATABASE ACCESSION NUMBER: EMBL / M83651
  ref <309>: DATABASE ENTRY DATE: 1999-06-30
ggcgagagcccggcacagcccggaccgaaattttgccgctgccttagagcgttagacaggatgtggctgggccgccgggccctgtgcgctctggtccttctgctcgcctgcgcctcgctggggctcctgtacgcgagcacccgggacgcgcccggcctccggctacctcttgcgccgtgggcgcccccgcaaagcccccgcaggcccgagctgccagatcttgctcctgagccccgctacgcacacatcccggtcaggatcaaggagcaagtagtggggctgctggcttggaacaactgcagttgtgagtccagtggggggggcctccccctccccttccagaaacaagtccgagctattgacctcaccaaggcctttgaccctgcagagctgagggctgcctctgccacaagagagcaggagttccaggcctttctgtcgaggagccagtccccagctgaccagctgctcatagcccctgccaactccccgctccagtaccccctacagggtgtggaagttcagcccctcaggagcatcttggtgccagggctgagccttcaggcagcttctggtcaggaggtataccaggtgaacctgactgcctccctaggcacctgggacgtggcaggggaagtgactggagttactctcactggagagggtcaggcagatctcacccttgtcagcccagggctggaccaactcaacaggcaactacaactggtcacttacagcagccgaagctaccagaccaacacagcagacacagtccggttctccaccgagggacatgaggctgctttcactatccgcataagacacccgcccaaccctcggctgtacccacctgggtctctaccccagggagcccagtacaacatcagcgctctagtcacgattgccaccaagaccttcctccgttatgatcggctacgggctctcatcaccagtatccgccgcttctacccaacggttaccgtggtcatcgctgacgacagcgacaagccagagcgcgttagtggcccctacgtggaacactatctcatgcccttcggcaagggctggttcgcaggccggaacctggccgtgtctcaagtaaccaccaagtacgtgctgtgggtggacgacgacttcgtcttcacggcgcggacgcggctggagaggcttgtggacgtgctggagcggacgccgctggacctggtggggggcgcggtgcgcgagatctccggctttgccaccacttatcggcagctgctgagcgtggagcccggcgccccaggcctcgggaactgcctccggcaaaggcgcggcttccaccacgagctcgtcggcttcccaggctgcgtggtcaccgacggcgtggttaacttcttcctggcgcggactgacaaggtgcgcgaggtcggtttcgacccccgcctcagccgcgtggctcatctggaattcttcttggatgggcttggttcccttcgggttggctcctgctccgacgtcgtggtggatcatgcatccaaactgaagctgccttggacatcaagggatgccggagcagagacttacgcccggtaccgttacccaggatcactggacgagagccagatggccaaacaccggctgctcttcttcaaacaccggctgcagtgcatgacctcccagtgatggcccgctggggatttctgactgtcaggctgggcctgcctccttgtccctgccaggaatttccaacaaaccccaccaccctgtgagcactctactggctgtccctgagcctctagttcctcactcttccttttcagaacctgatgcccagtaggggttgtcctggtgacacccctcctttttccagtgcccagaggcctggtggagccataacctctcccacagccagtgccaagtcctccccctgcccattctcatggggcaggaaatggggggatcactttccaagtgccaaagagcccagagggactctaagaacctaaggtggaaacactgtcctctcatcttgggaccgagggggtggggaagttccccaacacataatcccaagactgtgcccctcatctgcatcttcagatccagtactctgtgtacctgctccagccccacccccacagagagaacttgtggctctggggctggggtgagggctggtggttggtgaaagccattcttagttgtgtctctgcaatgctgtgggcacaaaagaaggggcaccagagtccctgtgcaaacacctagactcacttcatggattccaaagctctcagcttcattttattagttacgttaggtaagggggttcaagggtcatggtcctcatcacacacatgtcatcagggccctcctgcactccacatgatgaggtcagacccacacggtgcaaatctttgggtcagtgagctcctggagaagagaggagacatgtcaggaatagattaggcacccctcttccttaatgaaatgtggcagtcctctcaggggtaccccacctacttagggatctgag

SEQ ID NO: 1836 - protein, 533 aa, Homo sapiens
  ref <308>: DATABASE ACCESSION NUMBER: SWISS-Prot / Q00973
  ref <309>: DATABASE ENTRY DATE: 2002-06-15
MWLGRRALCALVLLLACASLGLLYASTRDAPGLRLPLAPWAPPQSPRRPELPDLAPEPRYAHIPVRIKEQVVGLLAWNNCSCESSGGGLPLPFQKQVRAIDLTKAFDPAELRAASATREQEFQAFLSRSQSPADQLLIAPANSPLQYPLQGVEVQPLRSILVPGLSLQAASGQEVYQVNLTASLGTWDVAGEVTGVTLTGEGQADLTLVSPGLDQLNRQLQLVTYSSRSYQTNTADTVRFSTEGHEAAFTIRIRHPPNPRLYPPGSLPQGAQYNISALVTIATKTFLRYDRLRALITSIRRFYPTVTVVIADDSDKPERVSGPYVEHYLMPFGKGWFAGRNLAVSQVTTKYVLWVDDDFVFTARTRLERLVDVLERTPLDLVGGAVREISGFATTYRQLLSVEPGAPGLGNCLRQRRGFHHELVGFPGCVVTDGVVNFFLARTDKVREVGFDPRLSRVAHLEFFLDGLGSLRVGSCSDVVVDHASKLKLPWTSRDAGAETYARYRYPGSLDESQMAKHRLLFFKHRLQCMTSQ

SEQ ID NO: 1837 - DNA, 2680 bp, Rattus norvegicus
  ref <308>: DATABASE ACCESSION NUMBER: EMBL / D21132
  ref <309>: DATABASE ENTRY DATE: 1999-01-21
gcagctgtgagggcttcccggaagatggtgctgattaaggaattccgtgtagttttgccgtgttctgttcaagagtatcaggttggacagctttactctgttgcagaagcgagtaagaatgaaactggtggtggagaaggaatcgaagtcttgaagaatgaaccttatgaaaatgatggcgagaagggacagtacacacacaaaatctaccacctgaagagcaaagtccctgcgttcgtgaggatgattgctcccgagggctccttggtgttccatgagaaagcctggaatgcttacccctactgcagaacaattgtaacgaatgagtacatgaaagatgacttcttcatcaaaatcgaaacatggcacaaacctgacttgggaacattagaaaatgttcacggtttagatccaaacacgtggaaaaccgttgaaattgtccacatagacattgcagatcgaagtcaggttgaaccagcagactacaaagctgatgaggaccctgcgttattccagtcagtcaagaccaagagaggccccctgggacctaactggaagaaggagctggcaaacacccctgactgtcctaagatgtgtgcctataagctggtgaccatcaagttcaagtggtgggggctgcagagcaaagtagagaacttcatccagaagcaagaaaaacggatatttacaaacttacatcgccagctcttttgttggattgacaagtggattgacctgacaatggaagacattaggagaatggaggacgagactcagaaagaactagaaacaatgcgtaagaagggttccgtccgaggcacgtcggctgctgatgcctagatgagcccctgtaggtcagagacattatcaaactgtctacggagtcaaggccaagtgagggggaccagtgcggcctgcgacgactaaagccaccagcgtctcagtgttgacggatgtttccagtgtgtgcctctgacggctcgggcacacttgtgcacactcgagggcacacacacacccatgcacacacactcacactgtatgtatgtctgtagctgtatgtaaagcacatatggctacaggcctagatacacacgagtgtatatatatatgtacatgtgaagatggatcagtaccttttctccaaagtactgcacctgtcttcagcagaaatactaaagaaaatattttcaatatatatacctggaacagatattaatacccatcaacatgatgccctggatggacaaacggactgccatgtggtgccctgtggtgctggctggcgtgcttcgtgaatgccaggtgtggaccagtgtgtacagcctttggttaggtttctgtttttttcaagtcaccacacacacacacacgtttagtctcaacccatcagcaacaactcctacagaaagattttttcaaatttttagatactccagtgactctggaatgtaaactctggatgtatttataactatttatttctgggtggccactatcttccagccaaatccaacaatatctgtcaagtaaggagtgaaagctctttattggtttgcccgagggttggggatatccttttttttaaaaaattgccactttttattggatttttgtattttgaatttcaagtatttttctatatcaaatctagcaaaaaacggtgatgacggtttgtgatttataataaacactgacaatattcagattctggctaagcaaacagggtgatcaggcaattaacctgagtggcactggaggctgtgcagagccattctgtggagttttgtttctgaaatggcttttctggaattacggcctggagactggatggtctgtattgctctcagttcacagggtaggagagtggtcccgcccggctgtttccagttacagtccaagctaggaggaaatgctgatgggagcaggcacagcttgagcatgacacaggcctgtccccgtcctgaggcccagctagacctgggccttgccgacagctctgcttcctcctcctgtatctcctcctcctcccccttcctcttctgtctctactttctcctttttttttaagagaaaggagcagtagctgggaaggattttcttttttttacctttccgtctgatgctattctcctctcgtcagtcctggaaccctgaccagcatcacactgttgaatccttcaggttacacactgccttttaacctccaccctgcagtcagagcacggtggtgacacccctttgttgacaggcttgaccttcatgtcccttctgccctgccctgtgtcccatgggggaaatggcagagagtcccactgcatcacactgccctgttagcctcagcaacaagccctgggttccatgtcctctaagctctagataaaggtggttattccctgggcactgctggaagctgggaaggtcaccaccagaagggtcattgccagccttgtctcctccagtgaaaccagatcacagacatccatagtttctctgagagctggggcacacaaggaaaccagagcccagtatggattcttgtgttgctctagcagctgtggagattgagggatgtggtgaatgcaaagaacccagtttacttggcagtctcctgtgtaaatcacagtaaaacaaagtgaaatcgaaacaagaataaatttgatctcaaaatgaaaaaaaa

SEQ ID NO: 1838 - protein, 270 aa, Rattus norvegicus
  ref <308>: DATABASE ACCESSION NUMBER: SWISS-Prot / P53812
  ref <309>: DATABASE ENTRY DATE: 1998-12-15
VLIKEFRVVLPCSVQEYQVGQLYSVAEASKNETGGGEGIEVLKNEPYENDGEKGQYTHKIYHLKSKVPAFVRMIAPEGSLVFHEKAWNAYPYCRTIVTNEYMKDDFFIKIETWHKPDLGTLENVHGLDPNTWKTVEIVHIDIADRSQVEPADYKADEDPALFQSVKTKRGPLGPNWKKELANTPDCPKMCAYKLVTIKFKWWGLQSKVENFIQKQEKRIFTNLHRQLFCWIDKWIDLTMEDIRRMEDETQKELETMRKKGSVRGTSAADA

SEQ ID NO: 1839 - DNA, 2906 bp, Homo sapiens
  ref <308>: DATABASE ACCESSION NUMBER: Refseq / NM_012399
  ref <309>: DATABASE ENTRY DATE: 2002-11-05
cggtggtatcggcggcagctgtgagggggttccgggaagatggtgctgatcaaggaattccgtgtggttttgccatgttctgttcaggagtatcaggttgggcagctttactctgttgcagaagctagtaagaatgagactggtggtggagaaggaattgaagtcttaaagaatgaaccttatgagaaggatggagaaaagggacagtatacgcacaaaatttatcacctaaagagcaaagtgcctgcattcgtgaggatgattgctcccgagggctccttggtgtttcatgagaaagcctggaatgcgtacccctactgtagaacaattgtaacgaatgaatatatgaaagatgatttcttcattaaaatcgaaacatggcacaaaccagacttgggaacattagaaaatgtacatggtttagatccaaacacatggaaaactgttgaaattgtccatatagatattgcagatagaagtcaagttgaaccagcagactacaaagctgatgaagacccagcattattccagtcagtcaagaccaagagaggccctttgggacccaactggaagaaggagctggcaaacagccctgactgtccccagatgtgtgcctataagctggtgaccatcaaattcaagtggtggggactgcaaagcaaagtagaaaacttcattcaaaagcaagaaaaacggatatttacaaacttccatcgccagcttttttgttggattgacaagtggatcgatctcacgatggaagacattaggagaatggaagacgagactcagaaagaactagaaacaatgcgtaagaggggttccgttcgaggcacgtcggctgctgatgtctagatgagtcccctgtagggtcagagacaatgtcaaactgtttacgtaatcaaggtcaagtgaggggaacaagcgcagccagtgatgagtgaagaagaatctgaccagtatcttgcagtgttgacgtttcccagatgtgtgcttgtgatgatacacacacatgcacaggttctcaaccacgtgtgtatatatgtatgtgtgcatatgtctgtagctgtatataaagcgcatgtagagctacagatccagatacacacacttgtgtatatatgtacatacagacatactgaagggattagtacaatttctccaaagtactgtacctatcttcagcaagaatgcaaaagaaaatattttcaatatatatacctggaacagattttaataattatcagagtaataccattaatggacaaattgactgcaatgtaatactagctggtatgtttcataaatgtcaagctgtggaccaacatatatagccttttattatttttctcttcttttaagtcagtctgttataaatttttttttagtcccataagcagtagactcccacagaaaatttcttcaaaattttttggtgttccaatgaatctgggatgtaaactctgaatgtatttataactatttatttctggatggtcattatcttgtagccaaatttgacaatataaagtaaggagcaaagttacaggccagtttttacttgtttgccctgagggaaaaatccttttaaaaaaaatttctggtttttattggatttttgtattttaaatttcaaatatttttctacatcaaacctagcaaaaatggagatgacggtttctgatttataataaatactagacagttttcaggctcctgttagacaaacacattgatgaagaaattagtcttaataggattgtaggctgtgtagaaaagttggaaatatagcacttcatggagtcttgttttgaagatgacagttttctgtaactacagcttggaaactatgcaaatggtctagattcctcagagctcacatgataggatatagttagtgatgacattttgctcttcttgtgggaacacacacttcaaggaggagatagtgactttgagataggaacagtttaagatgcagtgtgagtctggcctgcgtgcggtgaggaggccccgccaagagactggtggacatctgactgtgggatgtgctctcaagtaggacgtcatcaggacagattctgaataggcatcatgagagtgctggtcagaaacggctgccactttttttaatttaattttattttttatttaaaggaaggaacaatagctaggtaagatttttatcagctttctctgtctgaatccagtttttcctctgtcagtcctggaagcttgaatagaattatattgttgaagccttcaggtcacaaactgtcttttgtaacctcctgtccctcctaaaacacgccaacccctgcagtcaaatcacattagtaatctgatttgctgacagtcctgccctgcctgctcctcgttttcccacatgtcctgcatccctcccccactggagtgatttcagtgaatcagacaaggaaggatgtgtaggatcactactgcattgcaataccctgttatcctcagcaacaaaacccacatttcatacatcctttgtgtactcaggataaagactgatgtttactctctgggcactgttgtaagataggttttgtcagagcataatcattgtctgcaaagtgtttggtgcgaggaagattattgctaattttgtgaaataaagagtctagccctctccttttaatgaacttaactctcgctggcatctgtagtatcattgggagcttaggcgcacatggaaatgagagcccggcgcatggattttaatgtttttctaacaactgtggagatttgagggaatgtgtggtgaatgtaaaatacctagtttacttgccagtctcttgtgtaaattacagtaaaacaaagtaaatgaaatttaaacaaaaaataaatttgatcacaaaatgaaaaaaaaaaaaaaaaaaaaa

SEQ ID NO: 1840 - protein, 270 aa, Homo sapiens
  ref <308>: DATABASE ACCESSION NUMBER: SWISS-Prot / P48739
  ref <309>: DATABASE ENTRY DATE: 2002-06-15
VLIKEFRVVLPCSVQEYQVGQLYSVAEASKNETGGGEGIEVLKNEPYEKDGEKGQYTHKIYHLKSKVPAFVRMIAPEGSLVFHEKAWNAYPYCRTIVTNEYMKDDFFIKIETWHKPDLGTLENVHGLDPNTWKTVEIVHIDIADRSQVEPADYKADEDPALFQSVKTKRGPLGPNWKKELANSPDCPQMCAYKLVTIKFKWWGLQSKVENFIQKQEKRIFTNFHRQLFCWIDKWIDLTMEDIRRMEDETQKELETMRKRGSVRGTSAADV

SEQ ID NO: 1841 - DNA, 617 bp, Rattus norvegicus
  ref <308>: DATABASE ACCESSION NUMBER: EMBL / D21869
  ref <309>: DATABASE ENTRY DATE: 2000-04-18
gaagccaaaaccctggggatcggcaaggccatcgccgtgttgacctctggtggagatgcccaaggtatgaatgctgcggtcagggctgtggtacgagttggcatcttcacgggcgcccgcgtcttctttgtccatgagggttaccaaggcctggtggatggtggagagcacatcagggaggccacctgggagagcgtgtccatgatgctccagctgggaggcacggtgattggaagtgcccgatgcaaggacttccgggagcgagaaggacgactccgagctgcccacaacctggtgaagcgggggatcaccaatctgtgtgtcatcggaggcgatggcagcctcactggggctgacacttttcgttcagagtggagtgacttattgaatgacctccagaaagatgggaagatcacagccgaggaggctacaaagtccagctacctgaacatcgtgggcctggttggctcaatcgacaatgacttctgtggcactgatatgaccattggtactgactttgccctgcaccgcattgtagagatcgtggacgccatcaccaccaccgctcagagccaccagaggacatttgtgttagaagtgatgggccgccactgtgg

SEQ ID NO: 1842 - protein, 780 aa, Rattus norvegicus
  ref <308>: DATABASE ACCESSION NUMBER: Refseq / NP_113903
  ref <309>: DATABASE ENTRY DATE: 2002-11-05
MTHEEHHEAKTLGIGKAIAVLTSGGDAQGMNATVRAVVRVGIFTGLRVFFVHEGYQGLVDGGEHIREATWESVSMMLQLGGTVIGSARCKDFREREGRLRAAHNLVKRGITNLCVIGGDGSLTGADTFRSEWSDLLNDLQKDGKITAEERTKSSYLNIVFLVGSIDNDFCGTDMTIGTDSALHRIVEIVDAITTTAQSHQRTFVLEVMGRHCGYLALVTSLSCGADWVFIPECPPDDDWEEHLCRRLSETRTRGSRLNIIIVAEGAIDKNGKPITSEDIKNLVVKRLGYDTRVTVLGHVQRGGTPSAFDRILGSRMGVEAVMALLEGTPDTPACVVSLSGNTAVRLPLMECVQVTKDVTKAMDEKRFDEAIKLRGRSFMNNWEVYKLLAHVRPPVSKGGLHTVAVMNVGAPAAGMNAAVRSTVRIGLIQGNRVLVVHDGFEGLAKGQIEEAGWSYVGGWTGQGGSKLGTKRTLPKKNLEQISANITKYNIQGLVIIGGFEAYTGGLELMEGRKQFDELCIPFVVIPATVSNNVPGSDFSIGADTALNTICTTCDRIKQSAAGTKRRVFIIETMGGYCGYLATMAGLAAGADAAYIFEEPFTIRDLQVNVEHLVQKMKTTVKRGLVLRNEKCNENYTTDFIFNLYSEEGKGIFDSRKNVLGHMQQGGNPTPFDRNFATKMGAKATNWMSGKIKESYRNGRIFANTPDSGCVLGMRKRALVFQPVTELKDQTDFEHRIPKEQWWLKLRPILKILAKYEIDLDTSDHAHLEHISRKRSGEAAV

SEQ ID NO: 1843 - DNA, 2670 bp, Homo sapiens
  ref <308>: DATABASE ACCESSION NUMBER: EMBL / BC007798
  ref <309>: DATABASE ENTRY DATE: 2001-06-08
ggcacgaggccatgaagagcaccatgcagccaaaaccctggggattggcaaagccattgctgtcttaacctctggtggagatgcccaaggtatgaatgctgctgtcagggctgtggttcgagttggtatcttcaccggtgcccgtgtcttctttgtccatgagggttatcaaggcctggtggatggtggagatcacatcaaggaagccacctgggagagcgtttcgatgatgcttcagctgggaggcacggtgattggaagtgcccggtgcaaggactttcgggaacgagaaggacgactccgagctgcctacaacctggtgaagcgtgggatcaccaatctctgtgtcattgggggtgatggcagcctcactggggctgacaccttccgttctgagtggagtgacttgttgagtgacctccagaaagcaggtaagatcacagatgaggaggctacgaagtccagctacctgaacattgtgggcctggttgggtcaattgacaatgacttctgtggcaccgatatgaccattggcactgactctgccctgcatcggatcatggaaattgtagatgccatcactaccactgcccagagccaccagaggacatttgtgttagaagtaatgggccgccactgtggatacctggcccttgtcacctctctgtcctgtggggccgactgggtttttattcctgaatgtccaccagatgacgactgggaggaacacctttgtcgccgactcagcgagacaaggacccgtggttctcgtctcaacatcatcattgtggctgagggtgcaattgacaagaatggaaaaccaatcacctcagaagacatcaagaatggcagcaggatgggtgtggaagcagtgatggcacttttggaggggaccccagataccccagcctgtgtagtgagcctctctggtaaccaggctgtgcgcctgcccctcatggaatgtgtccaggtgaccaaagatgtgaccaaggccatggatgagaagaaatttgacgaagccctgaagctgagaggccggagcttcatgaacaactgggaggtgtacaagcttctagctcatgtcagacccccggtatctaagagtggttcgcacacagtggctgtgatgaacgtgggggctccggctgcaggcatgaatgctgctgttcgctccactgtgaggattggccttatccagggcaaccgagtgctcgttgtccatgatggtttcgagggcctggccaaggggcagatagaggaagctggctggagctatgttgggggctggactggccaaggtggctctaaacttgggactaaaaggactctacccaagaagagctttgaacagatcagtgccaatataactaagtttaacattcagggccttgtcatcattgggggctttgaggcttacacagggggcctggaactgatggagggcaggaagcagtttgatgagctctgcatcccatttgtggtcattcctgctacagtctccaacaatgtccctggctcagacttcagcgttggggctgacacagcactcaatactatctgcacaacctgtgaccgcatcaagcagtcagcagctggcaccaagcgtcgggtgtttatcattgagactatgggtggctactgtggctacctggctaccatggctggactggcagctggggccgatgctgcctacatttttgaggagcccttcaccattcgagacctgcaggcaaatgttgaacatctggtgcaaaagatgaaaacaactgtgaaaaggggcttggtgttaaggaatgaaaagtgcaatgagaactataccactgacttcattttcaacctgtactctgaggaggggaagggcatcttcgacagcaggaagaatgtgcttggtcacatgcagcagggtgggagcccaaccccatttgataggaattttgccactaagatgggcgccaaggctatgaactggatgtctgggaaaatcaaagagagttaccgtaatgggcggatctttgccaatactccagattcgggctgtgttctggggatgcgtaagagggctctggtcttccaaccagtggctgagctgaaggaccagacagattttgagcatcgaatccccaaggaacagtggtggctgaaactgaggcccatcctcaaaatcctagccaagtacgagattgacttggacacttcagaccatgcccacctggagcacatcacccggaagcggtccggggaagcggccgtctaaacctctctggagtgaggggaatagattacctgatcatggtcagctcacaccctaataagtccacatcttctcagtgttttagctgtttttttcattaggtttccttttattctgtaccttgcagccatgaccagttctggccaggagctggaggagcaggcagtgggtgggagctccttttaggtagaatttaacatgacttctgccccagctttatctgtcacacaaggctgggcacctctagtgctactgctagatatcacttactcagttagaattttcctaaaaataagctttatttatttctttgtgataacaaagagtcttggttcctctactacttttactacagtgacaaattgtaactacactaataaatgccaactggtcactgtgaaaaaaaaaaaaaaaaaaaa

SEQ ID NO: 1844 - protein, 779 aa, Homo sapiens
  ref <308>: DATABASE ACCESSION NUMBER: SWISS-Prot / P08237
  ref <309>: DATABASE ENTRY DATE: 2001-10-16
THEEHHAAKTLGIGKAIAVLTSGGDAQGMNAAVRAVVRVGIFTGARVFFVHEGYQGLVDGGDHIKEATWESVSMMLQLGGTVIGSARCKDFREREGRLRAAYNLVKRGITNLCVIGGDGSLTGADTFRSEWSDLLSDLQKAGKITDEEATKSSYLNIVGLVGSIDNDFCGTDMTIGTDSALHRIMEIVDAITTTAQSHQRTFVLEVMGRHCGYLALVTSLSCGADWVFIPECPPDDDWEEHLCRRLSETRTRGSRLNIIIVAEGAIDKNGKPITSEDIKNLVVKRLGYDTRVTVLGHVQRGGTPSAFDRILGSRMGVEAVMALLEGTPDTPACVVSLSGNQAVRLPLMECVQVTKDVTKAMDEKKFDEALKLRGRSFMNNWEVYKLLAHVRPPVSKSGSHTVAVMNVGAPAAGMNAAVRSTVRIGLIQGNRVLVVHDGFEGLAKGQIEEAGWSYVGGWTGQGGSKLGTKRTLPKKSFEQISANITKFNIQGLVIIGGFEAYTGGLELMEGRKQFDELCIPFVVIPATVSNNVPGSDFSVGADTALNTICTTCDRIKQSAAGTKRRVFIIETMGGYCGYLATMAGLAAGADAAYIFEEPFTIRDLQANVEHLVQKMKTTVKRGLVLRNEKCNENYTTDFIFNLYSEEGKGIFDSRKNVLGHMQQGGSPTPFDRNFATKMGAKAMNWMSGKIKESYRNGRIFANTPDSGCVLGMRKRALVFQPVAELKDQTDFEHRIPKEQWWLKLRPILKILAKYEIDLDTSDHAHLEHITRKRSGEAAV

SEQ ID NO: 1845 - DNA, 4432 bp, Rattus norvegicus
  ref <308>: DATABASE ACCESSION NUMBER: EMBL / D25233
  ref <309>: DATABASE ENTRY DATE: 2002-06-03
ccggaggacgaccccgcgcaggacagtgaccccgaagagctgcccctgatcaggcttgagtttgaaaaaattgaagaacctgaatttattgcattatgtcagaagttaaaggtgcccgatcatgtcagagagagagcttggctaacgtgggagaaagtttcatctgtggatggaatcctggaaggatatattcagaagaagaaggaactctggggcatctgcatcttcattgcagcagttgacctggatgagatgccattcacttttactgagcttcagaaaagcatagaaaccagtgtctataaattctttgacttattaaaagaaattgataccagtaccaaagttgataatgctgtgtcaaggctattgaagaagtacaatgtgttatgtgcactctacagcaaattagaacggacatgtggacttatatatttgacacagcccagcagtgggttatctactgaaataaattctatgttggtgctaaaagtttcttggatcacctttttactagctaaaggagaagtagtacagatggaagatgatctggtgatctcatttcagttaatgttgtgtgtacttgactattttatcaagctctcgcctcctgcgctgctcagagagccgtacaaaacagctgcaacacccattaatggttcacctcggacacccagaagaggtcagaacaggagtgctcggatagcaaaacaactagaaagtgatacaagaactattgaagttctctgtaaggagcacgagtgtaatgtagatgaggtgaaaaatgtttatttcaaaaattttatcccttttataagttcacttggaattgtatcatctaatggacttccagagcttgaaagtctttctaaacgctacgaagaagtttatcttaaaagcaaagatttagatgcaagactatttttggatcatgacaaaacacttcagactgatactatagacagttttgaaacagagagaactccacgaaaaagcaaccctgatgaagaggcaaacatggttactccacacactccagttaggactgttatgaatactattcaacagttaatggtgattttaaattctgcaagtgatcagccatcagaaaatctgatttcctacttcagtaattgcacagtgaatccaaaagaaaatatcctaaaaagagtaaaggatgttggacacatctttaaagagaagtttgctagcgctgtggggcagggatgtattgacattggagcacagcgatataaacttggggttcgattgtattatcgtgtgatggaatcgatgcttaaatcagaagaagaacgtttgtccattcagaattttagcaaactcctaaatgacaacatctttcatatgtctttattggcctgtgctcttgaagttgtaatggctacatatagcaggagtatgttacagaatcttgattctggaacagatttgtccttcccgtggattctgaatgtacttaatttaaaagcctttgatttttacaaagtgattgaaagttttatcaaagtggaagccaacttgacaagagaaatgataaaacatttagaaagatgtgagcatcgaatcatggaatcccttgcatggctttctgattcacctttgtttgatctcataaagcagtccaaggatggggaaggacctgatcaccttgagtctgcttgttctctcagcctccctctccagagtaaccacactgcagcagatatgtatctttctcctataagatctccaaagaaaagaacttctactacacgtgtaaattctgcggcaaatacagagacgcaagcagcctcagccttccatactcagaagccattgaaatctacctccctttccctgttttacaaaaaagtgtaccgtctagcatatctccgactaaatacactgtgtgcgcgccttctgtctgaccacccagagccagaacacatcatctggactctgtttcagcatacattggaaaatgagtatgagctcatgaaagaccgacatttggaccagattatgatgtgttctatgtatggcatctgcaaggtgaaaaacattgaccttaaattcaaaatcatcgtaactgcgtataaggatcttcctcacgctgcccaggagacctttaaacgtgttttgatcagagaagaggagtttgattccattatagtgttctacaactcagttttcatgcagagactaaaaacaaatattttacagtatgcctccaccaggcctcctaccttgtcaccaatacctcacattcctcgaagcccttacaagttctcgagttcacccttgcggattcctggaggtaacatctatatgtcacccctaaagagtccttataaaatttcagaaggtctgccaacacccacaaaaatgactccaagatcaagaatcttggtctcaatcggtgaatcatttgggacatccgagaagttccagaaaataaaccagatggtgtgtaacagtgacagagtgctcaaaagaagtgctgaaggcggcaatccccccaaacccctgaagaagctgcgctttgacatcgaaggatccgatgaagcagacgggagtaaacatctcccagcggagtccaaattccaacagaaactggcagaaatgacttctactcgaacacgaatgcaaaagcagaaactgaatgatagcatggaaatctcaaacaaggaggaaaagtgatgatctcaggaccctaacactgtagaccctcgggacacctgactcgtgtctcatggatgtgactatagttcccaggttctgctcatgttatagatataaaatgtgcaggtacagctgaatatttatgtgggtgatttgtaagccacttcaatgttgtaatcaatggtatagaattgacagtacacaggattgagaatcttgtgcagatcatgccatttaaaatatgaaagcagattgttggcatttccaacaggagcctgctgccctcagaagtgaggctgcctctggagggagtcctagcaactcccttacatctggctgactactttgcctttccttgtggcacatgtgtgatgtttgctcttggttttattaatttatatgtattttttaatttaacgtgaatatccttagaaaatgtgtcttgtcttccaaatgcaagttgattgattgtccacattcaaccaaattatcttgaatcctctactgaaacagattgttacaaactggggaaaagtactaatttgtacacattggacttgttttaatactagaatctaatgtgccatatgtttgtttcacacattttacctttgaaatagaagtaaaaaaagtataaacatatgatactgtcttactactgacacagatttcatacctcagaccctctaagaaccaattcttttattcatccaactcatactttaaactgaagactattgataatactccaggtttgttttttcttttaatctttcagatcactgaatctttaagtacccatgtagtacttgaaaatcaagtctggccacaactgtacttcagaggaccctagtacagtacaacccaagtgcactttctaatgtctctgggtcctgaggaatcaagatacaaattaactatgttctgtaagcagaccgttaactataggagccttcggtttaactatgttctgtaagcagaccgttaactataggagccttcggttttccctcatacaagtgtctaaccacatctcaacagttcactctgctcttctgcatccagggctgatgtgttccctctggaatggtacatgtcttccagggtcttttgaactggcaggtatctatttttttaagccaatctggtctaataacactggcttcttcaaagccacagcatttctaatccagctgtgccgaagcttcagactaaaacagctgcattgaaagaagaggcactcccttcaccccccccccccacctaaaggtgtttacattatcttgtgggattaacttatttagagatgctataatttaaaataggcggtatttaaggtagcgtcagctagcatttaagaaaatcattttttctaaactccatactttttgaaaagaaatctggtcttgttagaaaacaaatttctactttgtcctcaatttagtttcagttttactaggttgatagttatctcgatgacaaaggccgtagacagctccccccatttcttcattgagttttgcatggccatcacacaggttagttgggtttaggtcaagggctgaccatacttctaggtcttttgctagtaagttcaagttagaattagtgacagaatcataggaattttcagagatcctctattaagatttcttaaaactgcagaccctgcttttgtttttgtactggttaaaactatacattcagattgctatgttcctattttctataatagtttgtctattttaca

SEQ ID NO: 1846 - protein, 899 aa, Rattus norvegicus
  ref <308>: DATABASE ACCESSION NUMBER: SWISS-Prot / P33568
  ref <309>: DATABASE ENTRY DATE: 2002-06-15
PEDDPAQDSDPEELPLIRLEFEKIEEPEFIALCQKLKVPDHVRERAWLTWEKVSSVDGILEGYIQKKKELWGICIFIAAVDLDEMPFTFTELQKSIETSVYKFFDLLKEIDTSTKVDNAVSRLLKKYNVLCALYSKLERTCGLIYLTQPSSGLSTEINSMLVLKVSWITFLLAKGEVVQMEDDLVISFQLMLCVLDYFIKLSPPALLREPYKTAATPINGSPRTPRRGQNRSARIAKQLESDTRTIEVLCKEHECNVDEVKNVYFKNFIPFISSLGIVSSNGLPELESLSKRYEEVYLKSKDLDARLFLDHDKTLQTDTIDSFETERTPRKSNPDEEANMVTPHTPVRTVMNTIQQLMVILNSASDQPSENLISYFSNCTVNPKENILKRVKDVGHIFKEKFASAVGQGCIDIGAQRYKLGVRLYYRVMESMLKSEEERLSIQNFSKLLNDNIFHMSLLACALEVVMATYSRSMLQNLDSGTDLSFPWILNVLNLKAFDFYKVIESFIKVEANLTREMIKHLERCEHRIMESLAWLSDSPLFDLIKQSKDGEGPDHLESACSLSLPLQSNHTAADMYLSPIRSPKKRTSTTRVNSAANTETQAASAFHTQKPLKSTSLSLFYKKVYRLAYLRLNTLCARLLSDHPEPEHIIWTLFQHTLENEYELMKDRHLDQIMMCSMYGICKVKNIDLKFKIIVTAYKDLPHAAQETFKRVLIREEEFDSIIVFYNSVFMQRLKTNILQYASTRPPTLSPIPHIPRSPYKFSSSPLRIPGGNIYMSPLKSPYKISEGLPTPTKMTPRSRILVSIGESFGTSEKFQKINQMVCNSDRVLKRSAEGGNPPKPLKKLRFDIEGSDEADGSKHLPAESKFQQKLAEMTSTRTRMQKQKLNDSMEISNKEEK

SEQ ID NO: 1847 - DNA, 4839 bp, Homo sapiens
  ref <308>: DATABASE ACCESSION NUMBER: EMBL / L41870
  ref <309>: DATABASE ENTRY DATE: 1999-07-02
tccggtttttctcaggggacgttgaaattatttttgtaacgggagtcgggagaggacggggcgtgccccgcgtgcgcgcgcgtcgtcctccccggcgctcctccacagctcgctggctcccgccgcggaaaggcgtcatgccgcccaaaaccccccgaaaaacggccgccaccgccgccgctgccgccgcggaacccccggcaccgccgccgccgccccctcctgaggaggacccagagcaggacagcggcccggaggacctgcctctcgtcaggcttgagtttgaagaaacagaagaacctgattttactgcattatgtcagaaattaaagataccagatcatgtcagagagagagcttggttaacttgggagaaagtttcatctgtggatggagtattgggaggttatattcaaaagaaaaaggaactgtggggaatctgtatctttattgcagcagttgacctagatgagatgtcgttcacttttactgagctacagaaaaacatagaaatcagtgtccataaattctttaacttactaaaagaaattgataccagtaccaaagttgataatgctatgtcaagactgttgaagaagtatgatgtattgtttgcactcttcagcaaattggaaaggacatgtgaacttatatatttgacacaacccagcagttcgatatctactgaaataaattctgcattggtgctaaaagtttcttggatcacatttttattagctaaaggggaagtattacaaatggaagatgatctggtgatttcatttcagttaatgctatgtgtccttgactattttattaaactctcacctcccatgttgctcaaagaaccatataaaacagctgttatacccattaatggttcacctcgaacacccaggcgaggtcagaacaggagtgcacggatagcaaaacaactagaaaatgatacaagaattattgaagttctctgtaaagaacatgaatgtaatatagatgaggtgaaaaatgtttatttcaaaaattttataccttttatgaattctcttggacttgtaacatctaatggacttccagaggttgaaaatctttctaaacgatacgaagaaatttatcttaaaaataaagatctagatgcaagattatttttggatcatgataaaactcttcagactgattctatagacagttttgaaacacagagaacaccacgaaaaagtaaccttgatgaagaggtgaatgtaattcctccacacactccagttaggactgttatgaacactatccaacaattaatgatgattttaaattcagcaagtgatcaaccttcagaaaatctgatttcctattttaacaactgcacagtgaatccaaaagaaagtatactgaaaagagtgaaggatataggatacatctttaaagagaaatttgctaaagctgtgggacagggttgtgtcgaaattggatcacagcgatacaaacttggagttcgcttgtattaccgagtaatggaatccatgcttaaatcagaagaagaacgattatccattcaaaattttagcaaacttctgaatgacaacatttttcatatgtctttattggcgtgcgctcttgaggttgtaatggccacatatagcagaagtacatctcagaatcttgattctggaacagatttgtctttcccatggattctgaatgtgcttaatttaaaagcctttgatttttacaaagtgatcgaaagttttatcaaagcagaaggcaacttgacaagagaaatgataaaacatttagaacgatgtgaacatcgaatcatggaatcccttgcatggctctcagattcacctttatttgatcttattaaacaatcaaaggaccgagaaggaccaactgatcaccttgaatctgcttgtcctcttaatcttcctctccagaataatcacactgcagcagatatgtatctttctcctgtaagatctccaaagaaaaaaggttcaactacgcgtgtaaattctactgcaaatgcagagacacaagcaacctcagccttccagacccagaagccattgaaatctacctctctttcactgttttataaaaaagtgtatcggctagcctatctccggctaaatacactttgtgaacgccttctgtctgagcacccagaattagaacatatcatctggacccttttccagcacaccctgcagaatgagtatgaactcatgagagacaggcatttggaccaaattatgatgtgttccatgtatggcatatgcaaagtgaagaatatagaccttaaattcaaaatcattgtaacagcatacaaggatcttcctcatgctgttcaggagacattcaaacgtgttttgatcaaagaagaggagtatgattctattatagtattctataactcggtcttcatgcagagactgaaaacaaatattttgcagtatgcttccaccaggccccctaccttgtcaccaatacctcacattcctcgaagcccttacaagtttcctagttcacccttacggattcctggagggaacatctatatttcacccctgaagagtccatataaaatttcagaaggtctgccaacaccaacaaaaatgactccaagatcaagaatcttagtatcaattggtgaatcattcgggacttctgagaagttccagaaaataaatcagatggtatgtaacagcgaccgtgtgctcaaaagaagtgctgaaggaagcaaccctcctaaaccactgaaaaaactacgctttgatattgaaggatcagatgaagcagatggaagtaaacatctcccaggagagtccaaatttcagcagaaactggcagaaatgacttctactcgaacacgaatgcaaaagcagaaaatgaatgatagcatggatacctcaaacaaggaagagaaatgaggatctcaggaccttggtggacactgtgtacacctctggattcattgtctctcacagatgtgactgtataactttcccaggttctgtttatggccacatttaatatcttcagctctttttgtggatataaaatgtgcagatgcaattgtttgggtgattcctaagccacttgaaatgttagtcattgttatttatacaagattgaaaatcttgtgtaaatcctgccatttaaaaagttgtagcagattgtttcctcttccaaagtaaaattgctgtgctttatggatagtaagaatggccctagagtgggagtcctgataacccaggcctgtctgactactttgccttcttttgtagcatataggtgatgtttgctcttgtttttattaatttatatgtatatttttttaatttaacatgaacacccttagaaaatgtgtcctatctatcttccaaatgcaatttgattgactgcccattcaccaaaattatcctgaactcttctgcaaaaatggatattattagaaattagaaaaaaattactaattttacacattagattttattttactattggaatctgatatactgtgtgcttgttttataaaattttgcttttaattaaataaaagctggaagcaaagtataaccatatgatactatcatactactgaaacagatttcatacctcagaatgtaaaagaacttactgattattttcttcatccaacttatgtttttaaatgaggattattgatagtactcttggtttttataccattcagatcactgaatttataaagtacccatctagtacttgaaaaagtaaagtgttctgccagatcttaggtatagaggaccctaacacagtatatcccaagtgcactttctaatgtttctgggtcctgaagaattaagatacaaattaattttactccataaacagactgttaattataggagccttaatttttttttcatagagatttgtctaattgcatctcaaaattattctgccctccttaatttgggaaggtttgtgttttctctggaatggtacatgtcttccatgtatcttttgaactggcaattgtctatttatcttttatttttttaagtcagtatggtctaacactggcatgttcaaagccacattatttctagtccaaaattacaagtaatcaagggtcattatgggttaggcattaatgtttctatctgattttgtgcaaaagcttcaaattaaaacagctgcattagaaaaagaggcgcttctcccctcccctacacctaaaggtgtatttaaactatcttgtgtgattaacttatttagagatgctgtaacttaaaataggggatatttaaggtagcttcagctagcttttaggaaaatcactttgtctaactcagaattatttttaaaaagaaatctggtcttgttagaaaacaaaattttattttgtgctcatttaagtttcaaacttactattttgacagttattttgataacaatgacactagaaaacttgactccatttcatcattgtttctgcatgaatatcatacaaatcagttagtttttaggtcaagggcttactatttctgggtcttttgctactaagttcacattagaattagtgccagaattttaggaacttcagagatcgtgtattgagatttcttaaataatgcttcagatattattgctttattgcttttttgtattggttaaaactgtacatttaaaattgctatgttactattttctacaattaatagtttgtctattttaaaataaattagttgttaagagtcttaatggtctgatgttgtgttctttgtattaagtacactaatgttctcttttctgtctaggagaagatagatagaagataactctcctagtatctcatcc

SEQ ID NO: 1848 - protein, 928 aa, Homo sapiens
  ref <308>: DATABASE ACCESSION NUMBER: SWISS-Prot / P06400
  ref <309>: DATABASE ENTRY DATE: 2002-06-15
MPPKTPRKTAATAAAAAAEPPAPPPPPPPEEDPEQDSGPEDLPLVRLEFEETEEPDFTALCQKLKIPDHVRERAWLTWEKVSSVDGVLGGYIQKKKELWGICIFIAAVDLDEMSFTFTELQKNIEISVHKFFNLLKEIDTSTKVDNAMSRLLKKYDVLFALFSKLERTCELIYLTQPSSSISTEINSALVLKVSWITFLLAKGEVLQMEDDLVISFQLMLCVLDYFIKLSPPMLLKEPYKTAVIPINGSPRTPRRGQNRSARIAKQLENDTRIIEVLCKEHECNIDEVKNVYFKNFIPFMNSLGLVTSNGLPEVENLSKRYEEIYLKNKDLDARLFLDHDKTLQTDSIDSFETQRTPRKSNLDEEVNVIPPHTPVRTVMNTIQQLMMILNSASDQPSENLISYFNNCTVNPKESILKRVKDIGYIFKEKFAKAVGQGCVEIGSQRYKLGVRLYYRVMESMLKSEEERLSIQNFSKLLNDNIFHMSLLACALEVVMATYSRSTSQNLDSGTDLSFPWILNVLNLKAFDFYKVIESFIKAEGNLTREMIKHLERCEHRIMESLAWLSDSPLFDLIKQSKDREGPTDHLESACPLNLPLQNNHTAADMYLSPVRSPKKKGSTTRVNSTANAETQATSAFQTQKPLKSTSLSLFYKKVYRLAYLRLNTLCERLLSEHPELEHIIWTLFQHTLQNEYELMRDRHLDQIMMCSMYGICKVKNIDLKFKIIVTAYKDLPHAVQETFKRVLIKEEEYDSIIVFYNSVFMQRLKTNILQYASTRPPTLSPIPHIPRSPYKFPSSPLRIPGGNIYISPLKSPYKISEGLPTPTKMTPRSRILVSIGESFGTSEKFQKINQMVCNSDRVLKRSAEGSNPPKPLKKLRFDIEGSDEADGSKHLPGESKFQQKLAEMTSTRTRMQKQKMNDSMDTSNKEEK

SEQ ID NO: 1849 - DNA, 4432 bp, Rattus norvegicus; identical to SEQ ID NO: 1845
  ref <308>: DATABASE ACCESSION NUMBER: EMBL / D25233
  ref <309>: DATABASE ENTRY DATE: 2002-06-03

SEQ ID NO: 1850 - protein, 899 aa, Rattus norvegicus; identical to SEQ ID NO: 1846
  ref <308>: DATABASE ACCESSION NUMBER: SWISS-Prot / P33568
  ref <309>: DATABASE ENTRY DATE: 2002-06-15

SEQ ID NO: 1851 - DNA, 4839 bp, Homo sapiens; identical to SEQ ID NO: 1847
  ref <308>: DATABASE ACCESSION NUMBER: EMBL / L41870
  ref <309>: DATABASE ENTRY DATE: 1999-07-02

SEQ ID NO: 1852 - protein, 928 aa, Homo sapiens; identical to SEQ ID NO: 1848
  ref <308>: DATABASE ACCESSION NUMBER: SWISS-Prot / P06400
  ref <309>: DATABASE ENTRY DATE: 2002-06-15

SEQ ID NO: 1853 - DNA, 4432 bp, Rattus norvegicus; identical to SEQ ID NO: 1845
  ref <308>: DATABASE ACCESSION NUMBER: EMBL / D25233
  ref <309>: DATABASE ENTRY DATE: 2002-06-03

SEQ ID NO: 1854 - protein, 899 aa, Rattus norvegicus; identical to SEQ ID NO: 1846
  ref <308>: DATABASE ACCESSION NUMBER: SWISS-Prot / P33568
  ref <309>: DATABASE ENTRY DATE: 2002-06-15

SEQ ID NO: 1855 - DNA, 4839 bp, Homo sapiens; identical to SEQ ID NO: 1847
  ref <308>: DATABASE ACCESSION NUMBER: EMBL / L41870
  ref <309>: DATABASE ENTRY DATE: 1999-07-02

SEQ ID NO: 1856 - protein, 928 aa, Homo sapiens; identical to SEQ ID NO: 1848
  ref <308>: DATABASE ACCESSION NUMBER: SWISS-Prot / P06400
  ref <309>: DATABASE ENTRY DATE: 2002-06-15

SEQ ID NO: 1857 - DNA, 4432 bp, Rattus norvegicus; identical to SEQ ID NO: 1845
  ref <308>: DATABASE ACCESSION NUMBER: EMBL / D25233
  ref <309>: DATABASE ENTRY DATE: 2002-06-03

SEQ ID NO: 1858 - protein, 899 aa, Rattus norvegicus; identical to SEQ ID NO: 1846
  ref <308>: DATABASE ACCESSION NUMBER: SWISS-Prot / P33568
  ref <309>: DATABASE ENTRY DATE: 2002-06-15

SEQ ID NO: 1859 - DNA, 4839 bp, Homo sapiens; identical to SEQ ID NO: 1847
  ref <308>: DATABASE ACCESSION NUMBER: EMBL / L41870
  ref <309>: DATABASE ENTRY DATE: 1999-07-02

SEQ ID NO: 1860 - protein, 928 aa, Homo sapiens; identical to SEQ ID NO: 1848
  ref <308>: DATABASE ACCESSION NUMBER: SWISS-Prot / P06400
  ref <309>: DATABASE ENTRY DATE: 2002-06-15

SEQ ID NO: 1861 - DNA, 4432 bp, Rattus norvegicus; identical to SEQ ID NO: 1845
  ref <308>: DATABASE ACCESSION NUMBER: EMBL / D25233
  ref <309>: DATABASE ENTRY DATE: 2002-06-03

SEQ ID NO: 1862 - protein, 899 aa, Rattus norvegicus; identical to SEQ ID NO: 1846
  ref <308>: DATABASE ACCESSION NUMBER: SWISS-Prot / P33568
  ref <309>: DATABASE ENTRY DATE: 2002-06-15

SEQ ID NO: 1863 - DNA, 4839 bp, Homo sapiens; identical to SEQ ID NO: 1847
  ref <308>: DATABASE ACCESSION NUMBER: EMBL / L41870
  ref <309>: DATABASE ENTRY DATE: 1999-07-02

SEQ ID NO: 1864 - protein, 928 aa, Homo sapiens; identical to SEQ ID NO: 1848
  ref <308>: DATABASE ACCESSION NUMBER: SWISS-Prot / P06400
  ref <309>: DATABASE ENTRY DATE: 2002-06-15

SEQ ID NO: 1865 - DNA, 4432 bp, Rattus norvegicus; identical to SEQ ID NO: 1845
  ref <308>: DATABASE ACCESSION NUMBER: EMBL / D25233
  ref <309>: DATABASE ENTRY DATE: 2002-06-03

SEQ ID NO: 1866 - protein, 899 aa, Rattus norvegicus; identical to SEQ ID NO: 1846
  ref <308>: DATABASE ACCESSION NUMBER: SWISS-Prot / P33568
  ref <309>: DATABASE ENTRY DATE: 2002-06-15

SEQ ID NO: 1867 - DNA, 4839 bp, Homo sapiens; identical to SEQ ID NO: 1847
  ref <308>: DATABASE ACCESSION NUMBER: EMBL / L41870
  ref <309>: DATABASE ENTRY DATE: 1999-07-02

SEQ ID NO: 1868 - protein, 928 aa, Homo sapiens; identical to SEQ ID NO: 1848
  ref <308>: DATABASE ACCESSION NUMBER: SWISS-Prot / P06400
  ref <309>: DATABASE ENTRY DATE: 2002-06-15

SEQ ID NO: 1869 - DNA, 10170 bp, Rattus norvegicus
  ref <308>: DATABASE ACCESSION NUMBER: EMBL / D25543
  ref <309>: DATABASE ENTRY DATE: 2000-04-20
ggcgcgtcggtggtggcgctgcgcttgggttacccgagctgacgtggcttagattgggcggggggcgtccggagttgtctgggacggccacctacagtgcttgaagaggtcagaaaaggacatcagatcctctaggactagagttacggacagttgtgagcagccacgtggatactgagaggcgaaccctaggccctctggaagagcagctggtgctcttaacctctgaccaactctgcagaccccactgtgagtcatttttctccgtgcccatggagcgctccttcagagatgctgagccgattatcgggattagcaaataatgttttgcatgaattatcaggagattacactggctggactacaatgacttcctcggaagctgaattaccccagggttctgccatggaattgaataatagtacccaaaaggacgttctggatcgcctggctgatgcagagaagttagtgctggagctaaaggatatcatcagtaagcaggatgctcagctccagcaaaaggacgaagctctgcaggaagaaaaaaaaggagctgaaagcaaaattaaaaaaataaaacttcatgcaaaggccaagatcacgtccttgaacaaacaaatagaagaattgaagacacaaggaggagctgcctcgcctccagaagtgcaggcagaggagctctccaagcatgataagagttcaacagaagaggagatggaggtagaaaaaataaaacatgaactccaggagaaggagaaattaattagcaatttgcaagcccagctggaccaggcgcagtcagaacaagcctcccagttggataagagttctgcggagatggaggacttcatcctgatgaggcagaagctccaagagaaggaggaactcatcggcgctttgcaaacgcagctcagccagacacaggcagagcaagctgcccagaaattgagggtgatgcagaggaagcttgaggaacacgaagaagccttgctgggccgagctcaggttgtggacctgctacagaaggagctgacttctgcagaacagaggaaccaggatctttcacagcagttgcagctgttggaggctgaacacagtactttaaggaataccatggaagcagaaagacaggagtccaagatcctgatggaaaaggtagaactcgaaatggcagagaggaaggaagagctgtatcagcttcagggacagttggagcgagcaggccaagcccaggctgagctggagatgcagtacggtactctccagcaaagacatgagacagaaatggaggagaagacagcttgcatttcgcttcttcagaagaacgagcaggagctgcagtctgcctgtgacgctctgaaggaggaaaactccaagctgcttcaggagcagcaggaacaggctgccaagtcagcccaggccctgcagcagctggaagatgaactccagcaaaaatctaaagaaattagccaatttgtaaacaaaccaaacttggaaaaacatgagacatcatctcagacgtctttaccagatgtttataatgagggcgtacaggcagtcatggaggagagtgtcgcctctttacagaagagagtactagagctagagaatgagaagggagccttgctccttagttctctagagctggaggagctgagagctgagaacgaaaaactctgttctcggattactcttctggaggctcagaatagagcaggagaggctgatggtatggtctgtgaggtcagcacagctggtattgctttgctcaacaggagcgactcttctactgaagaaagtggacaggatgtcctagagaacacattttctcagaaacataaagagctgtcggttttattagtggaaatgaaggaagcccaggaggaaattgcatttcttaagtcgcagctgcagggcaaaaggcctgaaggggactatgaggtccttgatcggaaagaagtacagatgatggagagtgaaggactgccctcagttacagcacgagatgtcctctgtgcgccccgtgacaagaacagtgtcccagcagtggaaggggaacaggcaggcatgagagatcagcacggaacattggaggcgggacctctaaatgacaccggaatggaactgaactccccacagccggacggtgtggacaaatccctctctgcaccacatgtctgtctgtgtcaccagggtgaactggaaaggctgaaaactcaagttttggagcttgagacaagccttcatacagccaaggaaactcatgagaagaatttaagtgagaaagcgaaggaaattagcagcctaacccagcttaccaaggagttcaaagagagtgcggaggaagcccgcagcacgctcactgctgtgtgtgaagaaagagaccagctgctttaccgggtgaaggagcttgatgtccttggagaactccgggctcaggtccgagaactggaaaccagccttgcagaagcagagaagcaaagaggtctggactatgaaagtcagagggctcagcacaacctgctcaccgagcagatccacagcctaagcatagaagccaaatctaaagatgtgaaaatcgagactttacaaagagagctggatggtgtgcaactacaattttctgaacagggaacacagataaaaagcctacagagccaactgcagacgaaggaaagtgaagtgctagagggggcagagcgtatgaaggacatctcaaaagaaatggaagaactgtcgcaggcgctttcacagaaggagctggaaatagcccaaatggaccaactcttgttagagaaaaagaaagatgtggagacactccagcaaaccatccaggagaaggatcagcaagtgactgaactcagcttcagtatgacagagaaaatggttcagcttaatgaagagaagttttctcttggggtagaaattaagactctgaaggagcagctcagtttattgtccagagctgaaggagcaaagagagagcaggtagaagacagtggagctgagtccagccctaaacatggtccacatgagtcgagcgcagaggagccagtgtgtaaagaggcactacagcaagaacttgagtggctgaggaaagagagtgagcagaggaagcggaaactgcaggcagcgctgatcagcagaaaggagctactgcagaaagtcagcaagctggaggaggagttagccaaggtgagagaggagtccacaaaagactccctcagggagagtgagaagagagagctggaggaagacagcaagaacaaagatgacccagaaaagtatgggacttctgagtggagagaactagaggtttctttaagactgacaatatctgaaaaggaagtggaactggagggcataaggagggacttaaaagaaaaggcagcagcagaagaagagttacaggccttggtccaacggatgactcaggacctgcagaataagacaaagcagatagacttgcttcaagaagagatcactgaaaaccaagcaactattcagaaattcatcacaggcaccatggatgctggggatggagactcagcagtaaaggaaacctcggtgagcagcccaccccgtgcagggggtggggagcactggaagccggagctggagggaaagatagtagacctggaaaaagaaaagactcaacttcaaaagaagcttcaagaagccttaatttcccgtaaggcaattctaaaaaaggcacaagagaaagagaaacatctgaaggaagagctcaaggagcagaaggatgcttaccgtcacctacaggaacagtttgatgggcagagtaaggaaaatgagaacattcgggccccgctaaggcaactccaagcaaaggagtctacagaccagcagctcccaggcactggccagcaggagcccactcacggttcagaaggcctttcactcgaaggcacagagcctgcttcagagtctgacttacacgcagctcagccttcgcaccctggagagacagcaactctccaggctaccgtttctgttgcccagattcaggaccagctgaaagaaattgaggttgagaaagaagagctggaattgaaaattagttctacaacaagtgagctgaccaaaaaatctgaagaagtattactactacaagaacagatcaatgaacagggcttagaaatccagaatttgaaggcagcgtcccacgaagccaaggcccacacagaacagctgaagcaagaattggaaagcagccaattgaaaattgctgacctggaacatctgaaaacattacagcctgaactagaaacactgcaaaagcacgtgggccagaaggaagaagaggtcagctaccttgttggacagcttggtgagaaggagcagaccctcaccaccgtacagacagaaatggaggagcaggagcgtttaatcaaggccctgcacacacagctggaaatgcaagccaaggagcatgaggagaggctaaagcaggtccaggtggaaatttgtgagctaaagaagcagccaaaagagcttgaggaagaaagtaaggcaaaacagcaattacagaggaaactgcaggctgccctcatctcccggaaggaggccctcaaggaaaacaagagtctgcaggagcagttgtcctcggccagagatgctgttgaacatctgaccaaatctctggcagatgtagagagccaggtttctgttcagaatcaagagaaagatgcactcctaggaaagttagcccttcttcaggaagaaagggacaaactcattgtagaaatggacaagtctttactggaaaatcagagccttggtggctcttgtgaaagcctgaagctagctctcgggggcctcactgaagacaaggaaaagctgatgaaggagctggaatccgtgagatgttctaagattgcagagagcaccgaatggcaagagaagcacaaggagctacagaaagagtatgaagttcttctgcagtcctacgagaatgtgagcaatgaggcagagaggattcaacacgtggtggagagcgtgaggcaagagaagcaggaggtgtacgcaaagttaaggagcgcagagtcagacaagagagagagagagaagcagctgcaggatgcagaacaggaaatggaggagatgaaggagaagatgagaaagtttgccaaatctaagcagcagaagatccttgagctagaggaagaaaacgaccgacttagagcagaggcccagcctgtaggaggagccaatgaaagcatggaagctcttctttcttccaatgccagcttaaaggaggaactagaaaggatcacattggagtataaaaccctttctaaggaatttgaggctttaatggcagagaagaacactctgagtgaagagactcgtaatctgaagcttcaggtagaagctcaggaactgaaacaagctagcctcgagaccaccgagaagtctgatgagccaaaggatgtcatcgaagaggtaacagaagccgtggtaggcaagtctcaagaacaagattccctgagtgaaaatgccaagcttgaagatgcagaagctactctcttggctaacagtgccaagcctggtgtcagtgagactttcagctcacacgatgacatcaataactacctccagcagcttgatcagcttaaaggaagaattgctgagttagagatggagaaacagaaagacagggagcttagccagactttggaaaatgaaaaaaatgccctactgactcagatatctgcaaaggatagtgagctcaagctcctggaggaagaggttgccaaaataaacatgctgaatcagcaaatccaagaggagctctccagagtcaccaagctgaaagagacagcagaggaggagaaagatgacttagaagagaggctgatgaatcaactggcggaacttaatgggagcatcgggaattattaccaggatgttacagacgcccaaataaagaacgagcaactagagtcagaaatgcagaaccttaaaagatgtgtgagtgaattagaagaagaaaagcagcagctggtcaaggaaaaaaccaaggtggagtcagaaatacgaaaagagtacatggaaaagatacaaggtgcccagaagggacctggcagtaaaatccacgccaaagagctacaggagctgctcaaggaaaaacagcaagaagtgaagcaactgcagaaggactgcatccggtacctcggcaggatcagtgccctggagaagaccgtcaaggccctcgagtttgttcacactgaatcccaaaaggatttggatgcaaccaaaggaaatctggctcaggccgttgaacaccacaagaaggcacaggccgagttatccagcttcaagatactgctagatgacacccaaagcgaagcagcaagagtgctagcggacaacctcaagttgaaaaaggagcttcagtcaaacaaagagtccatcaaaagccagataaaacaaaaagacgaagacctcttgcgaagactggagcaagcagaagagaaacaccgaaaagagaagaagaacatgcaagagaagctggatgctttgcacagagaaaaagcccatgtggaagacacgcttgccgagattcaagtcagtctgaccaggaaagacaaggacatgaaggagctgcagcaaagcctggacagcaccttggcccagcttgcggccttcactaagagcatgtcgtccctccaggatgaccgggacagggtgatcgatgaagccaagaaatgggagcagaggttcggtgatgccattcagaccaaagaggaggaggtcagactcaaagaggagaactgcactgctctaaaggatcagctccgacaaatgaccatccacatggaggaactgaagatcaccgtgtccaggcttgaacatgacaaggaaatttgggagtccaaggcccagaccgagctccagcatcaacagaaggcttatgataagctgcaagaagaaaataaagaacttatgtcacagttagaagaagctggacagctgtaccatgattctaagaatgaattaactaagttggaatcagaacttaagagtctcaaagaccaatcaactgacttaaagaactctttagaaaaatgcagagaacacgaaaacaacttggaagggatcatcaagcagcaagaagctgacatccagaattgtaagttcaattgtgaacaactagagactgacctgacagcctccagagagctaaccactcggctgcatgatgaaatcaatgtgaaggaacagaagattataagcctgctttctggcaaggaagaggcgatccaagtagctatcgcagaactgcaccaacagcacagtaaagagatcaaagaattagaaaacctgttgtcccaggaggaagaggagaatttgaccttagaagaggaaaacaaaagggctgttgagaaaaccaaccagctcacagaagcactagaaaccatcaagaaggagagccttgagcagaaggctcagttggattcctttgttaagtccatgtcctctcttcaggacgaccgggaccgcatagtaagtgactaccgacagctggaagagcggcacctttctgtgatcttggaaaaggacgagctcatccaagatgctgctgctgagaataataaactgaaggaggagattcgagggctgcgaggtcacatggatgacctcaactctgagaatgccaagctggatgctgaactgatccagtataggcgggacctgaatgaagtgatcaccataaaggactcgcagcaaaggcagctccttgaggctcagctgcagcagaacaaagagctgagaaatgagtgtgtaaagctagaaggaaggctgaaggggtcagaggcagagaagcagagcctgcagatgtccttggacgccctccaggaggagaatcaaggtttgtctaaagagatcaaaagcttcaaggagcagttgacggccttgcacgaggaaggtgccctagctgtctaccatgcccaactgagagtaagagaggaagaagttcagaagttaactgcggctctctcctcctctcagaagagaactgtggatctgcaagaggagttggtttgtgtccagaaggaggcaagcaagaaggtgagtgagattgaagataagctgaagagggagctgaagcatctccatcacaacgcagggataatgcggaacgaaacagagacagcagaagagagggtggcagagctggccagagacctcgtcgagatggaacagaagttgcttacggtaaccaaagagaataaggatcttacggcacagattcaggccttcggaaagtcgatgagttccttgcaggacagcagagatcatgccactgaggagctgagtgacctgaagaagaagtatgatgccagtctgaaagagctggctcagctgaaagggcggcaggacttaggcagagagagtgacgttctttcccaggctgcctttcccctgaccacctctgaaaacatctcgtcccgccttgagaaactgaaccagcagctcatatccaaagacgagcaattgcttcacttatcttcagaactagaaagttctcacaaccaagtgcagtccttcaccaaggccatgaccagcctacagaatgagagagatcacctgtggaatgagctggagaaattccggaagtcggaggaagggaagcagaggtctgcagccccttcagctgcctccagcccagcagaagtacagagcttgaaaaaagccatgtcttcactccagaatgacagagatcgattgctgaaggaactgaagaatctacaacagcagtacttacagatgaaccaagagatcaccgagctccgtccgctgaaggctcagcttcaggaatctcaagatcagaccaaagccctgcagatgatgaaggaggagctcaggcaggaaaacctctcctggcagcacgagctcgatcagctcagagtggagaagaactcttgggagctgcatgagagaagaatgaaggaacagtaccttatggccatctcagataaagatcagcagcttggccacctgcagaatctcctgagggaactgaggtcttcctcccagactcagattctccccacacagtaccagcgacaggcgtcctcagggacatcagctgccctcgacgggtcacaaaacctagtttatgaaacagactgtctcaggacccagctcaatgacagcttaaaggaaatccatcagaaggagctaagaattcagcaactgaacagcaagttctctcagctgcttgaggagaagaacatcctctccacccagctcagggacgccaaccagagtctccgtgacagccagcatcactacagtaacctcttcaaccactgtgccatcctggagaggcaggtgcagcagctgcaggctacggggccactaaatgcagatgttgctccaggagcaccccaggaaaaggatgggattcacataaagactgaaactgagaccacaggggaggaacagccaagcttttctgaagtccagcagcagctgtgcaacactaaacacgatctgagcgagctaaagaagctgctggaagaagagcgagaccaaagactgaccgccgaaaatgcactctccctggccaaggagcagatcagacggttggagcatagcgagtgggagtcagcccggaccccaatcattggcgcctgtggctctcaggagcaggtgctgttgatggatctcccaggcagtagctgtcggaggacccggagcagtgctggatggaagcgggttctgcgttctctctgccgttcccggacccgcgtgccactgctcgcagccatctacttcctaatgattcatgttttactggttctgtgtttcacgggtcacctataaacttgttacttgacaactctcgcacttgtaattccttatctgtagtgtcaggattgttgatcccagggcggcctctcgctttgagcccaccctcttggaaagtgcctgtgaaaagaggtggctgtgaggacaggcggcggtaagctggcctgccacatccgctctccttaaacacgtcggcttctgagatgtgccgtgttcactgcttcttcagatgatgcagatccacatcccgtgtggccttgcaggatgctgagagaggctttctagccgtgccaacaagatggttccaataaacacagtaatctggaatcc

SEQ ID NO: 1870 - protein, 3187 aa, Rattus norvegicus
  ref <308>: DATABASE ACCESSION NUMBER: SWISS-Prot / BAA05026
  ref <309>: DATABASE ENTRY DATE: 2002-10-01
MLSRLSGLANNVLHELSGDYTGWTTMTSSEAELPQGSAMELNNSTQKDVLDRLADAEKLVLELKDIISKQDAQLQQKDEALQEEKKGAESKIKKIKLHAKAKITSLNKQIEELKTQGGAASPPEVQAEELSKHDKSSTEEEMEVEKIKHELQEKEKLISNLQAQLDQAQSEQASQLDKSSAEMEDFILMRQKLQEKEELIGALQTQLSQTQAEQAAQKLRVMQRKLEEHEEALLGRAQVVDLLQKELTSAEQRNQDLSQQLQLLEAEHSTLRNTMEAERQESKILMEKVELEMAERKEELYQLQGQLERAGQAQAELEMQYGTLQQRHETEMEEKTACISLLQKNEQELQSACDALKEENSKLLQEQQEQAAKSAQALQQLEDELQQKSKEISQFVNKPNLEKHETSSQTSLPDVYNEGVQAVMEESVASLQKRVLELENEKGALLLSSLELEELRAENEKLCSRITLLEAQNRAGEADGMVCEVSTAGIALLNRSDSSTEESGQDVLENTFSQKHKELSVLLVEMKEAQEEIAFLKSQLQGKRPEGDYEVLDRKEVQMMESEGLPSVTARDVLCAPRDKNSVPAVEGEQAGMRDQHGTLEAGPLNDTGMELNSPQPDGVDKSLSAPHVCLCHQGELERLKTQVLELETSLHTAKETHEKNLSEKAKEISSLTQLTKEFKESAEEARSTLTAVCEERDQLLYRVKELDVLGELRAQVRELETSLAEAEKQRGLDYESQRAQHNLLTEQIHSLSIEAKSKDVKIETLQRELDGVQLQFSEQGTQIKSLQSQLQTKESEVLEGAERMKDISKEMEELSQALSQKELEIAQMDQLLLEKKKDVETLQQTIQEKDQQVTELSFSMTEKMVQLNEEKFSLGVEIKTLKEQLSLLSRAEGAKREQVEDSGAESSPKHGPHESSAEEPVCKEALQQELEWLRKESEQRKRKLQAALISRKELLQKVSKLEEELAKVREESTKDSLRESEKRELEEDSKNKDDPEKYGTSEWRELEVSLRLTISEKEVELEGIRRDLKEKAAAEEELQALVQRMTQDLQNKTKQIDLLQEEITENQATIQKFITGTMDAGDGDSAVKETSVSSPPRAGGGEHWKPELEGKIVDLEKEKTQLQKKLQEALISRKAILKKAQEKEKHLKEELKEQKDAYRHLQEQFDGQSKENENIRAPLRQLQAKESTDQQLPGTGQQEPTHGSEGLSLEGTEPASESDLHAAQPSHPGETATLQATVSVAQIQDQLKEIEVEKEELELKISSTTSELTKKSEEVLLLQEQINEQGLEIQNLKAASHEAKAHTEQLKQELESSQLKIADLEHLKTLQPELETLQKHVGQKEEEVSYLVGQLGEKEQTLTTVQTEMEEQERLIKALHTQLEMQAKEHEERLKQVQVEICELKKQPKELEEESKAKQQLQRKLQAALISRKEALKENKSLQEQLSSARDAVEHLTKSLADVESQVSVQNQEKDALLGKLALLQEERDKLIVEMDKSLLENQSLGGSCESLKLALGGLTEDKEKLMKELESVRCSKIAESTEWQEKHKELQKEYEVLLQSYENVSNEAERIQHVVESVRQEKQEVYAKLRSAESDKREREKQLQDAEQEMEEMKEKMRKFAKSKQQKILELEEENDRLRAEAQPVGGANESMEALLSSNASLKEELERITLEYKTLSKEFEALMAEKNTLSEETRNLKLQVEAQELKQASLETTEKSDEPKDVIEEVTEAVVGKSQEQDSLSENAKLEDAEATLLANSAKPGVSETFSSHDDINNYLQQLDQLKGRIAELEMEKQKDRELSQTLENEKNALLTQISAKDSELKLLEEEVAKINMLNQQIQEELSRVTKLKETAEEEKDDLEERLMNQLAELNGSIGNYYQDVTDAQIKNEQLESEMQNLKRCVSELEEEKQQLVKEKTKVESEIRKEYMEKIQGAQKGPGSKIHAKELQELLKEKQQEVKQLQKDCIRYLGRISALEKTVKALEFVHTESQKDLDATKGNLAQAVEHHKKAQAELSSFKILLDDTQSEAARVLADNLKLKKELQSNKESIKSQIKQKDEDLLRRLEQAEEKHRKEKKNMQEKLDALHREKAHVEDTLAEIQVSLTRKDKDMKELQQSLDSTLAQLAAFTKSMSSLQDDRDRVIDEAKKWEQRFGDAIQTKEEEVRLKEENCTALKDQLRQMTIHMEELKITVSRLEHDKEIWESKAQTELQHQQKAYDKLQEENKELMSQLEEAGQLYHDSKNELTKLESELKSLKDQSTDLKNSLEKCREHENNLEGIIKQQEADIQNCKFNCEQLETDLTASRELTTRLHDEINVKEQKIISLLSGKEEAIQVAIAELHQQHSKEIKELENLLSQEEEENLTLEEENKRAVEKTNQLTEALETIKKESLEQKAQLDSFVKSMSSLQDDRDRIVSDYRQLEERHLSVILEKDELIQDAAAENNKLKEEIRGLRGHMDDLNSENAKLDAELIQYRRDLNEVITIKDSQQRQLLEAQLQQNKELRNECVKLEGRLKGSEAEKQSLQMSLDALQEENQGLSKEIKSFKEQLTALHEEGALAVYHAQLRVREEEVQKLTAALSSSQKRTVDLQEELVCVQKEASKKVSEIEDKLKRELKHLHHNAGIMRNETETAEERVAELARDLVEMEQKLLTVTKENKDLTAQIQAFGKSMSSLQDSRDHATEELSDLKKKYDASLKELAQLKGRQDLGRESDVLSQAAFPLTTSENISSRLEKLNQQLISKDEQLLHLSSELESSHNQVQSFTKAMTSLQNERDHLWNELEKFRKSEEGKQRSAAPSAASSPAEVQSLKKAMSSLQNDRDRLLKELKNLQQQYLQMNQEITELRPLKAQLQESQDQTKALQMMKEELRQENLSWQHELDQLRVEKNSWELHERRMKEQYLMAISDKDQQLGHLQNLLRELRSSSQTQILPTQYQRQASSGTSAALDGSQNLVYETDCLRTQLNDSLKEIHQKELRIQQLNSKFSQLLEEKNILSTQLRDANQSLRDSQHHYSNLFNHCAILERQVQQLQATGPLNADVAPGAPQEKDGIHIKTETETTGEEQPSFSEVQQQLCNTKHDLSELKKLLEEERDQRLTAENALSLAKEQIRRLEHSEWESARTPIIGACGSQEQVLLMDLPGSSCRRTRSSAGWKRVLRSLCRSRTRVPLLAAIYFLMIHVLLVLCFTGHL

SEQ ID NO: 1871 - DNA, 10300 bp, Homo sapiens
  ref <308>: DATABASE ACCESSION NUMBER: EMBL / X75304
  ref <309>: DATABASE ENTRY DATE: 1994-09-21
aactgctagtggctgagtccctggcggggcgcggcggtggaaggtgtcgcgtacgggcttcccgagctgacgtggcttgaattgggaggggggcagctggagcctcaggcggcagcgcttctagaaatgctgagccgattatcaggattagcaaatgttgttttgcatgaattatcaggagatgatgacactgatcagaatatgagggctcccctagaccctgaattacaccaagaatctgacatggaatttaataatactacacaagaagatgttcaggagcgcctggcttatgcagagcaattggtggtggagctaaaagatattattagacagaaggatgttcaactgcagcagaaagatgaagctctacaggaagagagaaaagctgctgataacaaaattaaaaaactaaaacttcatgcgaaggccaaattaacttctttgaataaatacatagaagaaatgaaagcacaaggagggactgttctgcctacagaacctcagtcagaggagcaactttccaagcatgacaagagttctacagaggaagagatggaaatagaaaagataaaacataagctccaggagaaggaggaactaatcagcactttgcaagcccagcttactcaggcacaggcagaacaacctgcacagagttctacagagatggaagaatttgtaatgatgaagcaacagctccaggagaaggaagaattcattagcactttacaagcccagctcagccagacacaggcagagcaagctgcacagcaggtggtccgagagaaagatgcccgctttgaaacacaagttcgtcttcatgaagatgagcttcttcagttagtaacccaggcagatgtggaaacagagatgcaacagaaattgagggtgctgcaaaggaagcttgaggaacacgaagaatccttggtgggccgtgctcaggtcgttgacttgctgcaacaggagctgactgctgctgagcagagaaaccagattctctctcagcagttacagcagatggaagctgagcataatactttgaggaacactgtggaaacagaaagagaggagtccaagattctactggaaaagatggaacttgaagtggcagagagaaaattatccttccataatctgcaggaagaaatgcatcatcttttagaacagtttgagcaagcaggccaagcccaggctgaactagagtctcggtatagtgctttggagcagaagcacaaagcagaaatggaagagaagacctctcatattttgagtcttcaaaagactggacaagagctgcagtctgcctgtgatgctctaaaggatcaaaattcaaagcttctccaagataagaatgaacaggcagttcagtcagcccagaccattcagcaactggaagatcagctccagcaaaaatccaaagaaattagccaatttctaaatagactgcccttgcaacaacatgaaacagcatctcagacttctttcccagatgtttataatgagggcacacaggcagtcactgaggagaatattgcttctttgcagaagagagtggtagaactagagaatgaaaagggagccttgctccttagttctatagagctggaggagctgaaagctgagaatgaaaaactgtcttctcagattactctcctagaggctcagaatagaactggggaggcagacagagaagtcagtgagatcagcattgttgatattgccaacaagaggagctcttctgctgaggaaagtggacaagatgttctagaaaacacattttctcagaaacataaagaattatcagttttattgttggaaatgaaagaagctcaagaggaaattgcatttcttaaattacagctccagggaaaaagggctgaggaagcagatcatgaggtccttgaccagaaagaaatgaaacagatggagggtgagggaatagctccaattaaaatgaaagtatttcttgaagatacagggcaagattttcccttaatgccaaatgaagagagcagtcttccagcagttgaaaaagaacaggcgagcactgaacatcaaagtagaacatctgaggaaatatctttaaatgatgctggagtagaattgaaatcaacaaagcaggatggtgataaatccctttctgctgtaccagatattggtcagtgtcatcaggatgagttggaaaggttaaaaagtcaaattttggagctcgagctaaactttcataaagcacaagaaatctatgagaaaaatttagatgagaaagctaaggaaattagcaacctaaaccagttgattgaggagtttaagaaaaatgctgacaacaacagcagtgcattcactgctttgtctgaagaaagagaccagcttctctctcaggtgaaggaacttagcatggtaacagaattgagggctcaggtaaagcaactggaaatgaaccttgcagaagcagaaaggcaaagaagacttgattatgaaagccaaactgcccatgacaacctgctcactgaacagatccatagtctcagcatagaagccaaatctaaagatgtgaaaattgaagttttacagaatgaactggatgatgtgcagcttcagttttctgagcagagtaccctgataagaagcctgcaaagccagctgcaaaataaggaaagtgaagtgcttgagggggcagaacgtgtaaggcatatctcaagtaaagtggaagaactgtcccaggctctttcacagaaggaacttgaaataacaaaaatggatcagctcttactagagaaaaagagagatgtggaaaccctccaacaaaccatcgaggagaaggatcaacaagtgacagaaatcagctttagtatgactgagaaaatggttcagcttaatgaagagaagttttctcttggggttgaaattaagactcttaaagaacagctaaatttattatccagagctgaggaagcaaaaaaagagcaggtggaagaagataatgaagtttcttctggccttaaacaaaattatgatgagatgagcccagcaggacaaataagtaaggaagaacttcagcatgaatttgaccttctgaagaaagaaaatgagcagagaaagagaaagctccaggcagctcttattaacagaaaggagcttctgcaaagagtcagtagattggaagaagaattagccaacttgaaagatgaatctaagaaagaaatcccactcagtgagactgagaggggagaagtggaagaagataaagaaaacaaagaatactcagaaaaatgtgtgacttctaagtgccaagaaatagaaatttatttaaaacagacaatatctgagaaagaagtggaactacagcatataaggaaggatttggaagaaaagctggcagctgaagagcaattccaggctctggtcaaacagatgaatcagaccttgcaagataaaacaaaccaaatagatttgctccaagcagaaatcagtgaaaaccaagcaattatccagaagttaatcacaagtaacacggatgcaagtgatggggactccgtagcacttgtaaaggaaacagtggtgataagtccaccttgtacaggtagtagtgaacactggaaaccagaactagaagaaaagatactggcccttgaaaaagaaaaggagcaacttcaaaagaagctacaggaagccttaacctcccgcaaggcaattcttaaaaaggcacaggagaaagaaagacatctcagggaggagctaaagcaacagaaagatgactataatcgcttgcaagaacagtttgatgagcaaagcaaggaaaatgagaatattggagaccagctaaggcaactccagattcaagtaagggaatccatagacggaaaactcccaagcacagaccagcaggaatcgtgttcttccactccaggtttagaagaacctttattcaaagccacagaacagcatcacactcaacctgttttagagtccaacttgtgcccagactggccttctcattctgaagatgcgagtgctctgcagggcggaacttctgttgcccagattaaggcccagctgaaggaaatagaggctgagaaagtagagttagaattgaaagttagttctacaacaagtgagcttactaaaaaatcagaagaggtatttcagttacaagagcagataaataaacagggtttagaaatcgagagtctaaagacagtatcccatgaagctgaagtccatgccgaaagcctgcagcagaaattggaaagcagccaactacaaattgctggcctagaacatctaagagaattgcaacctaaactggatgaactgcaaaaactcataagcaaaaaggaagaagacgttagctacctttctggacaacttagtgagaaagaagcagctctcactaaaatacagacagagataatagaacaagaagatttaattaaggctctgcatacacagctagaaatgcaagccaaagagcatgatgagaggataaagcagctacaggtggaactttgtgaaatgaagcaaaaaccagaagagattggagaagaaagtagagcaaagcaacaaatacaaaggaaactgcaagctgcccttatttcccgaaaagaagcactaaaagaaaacaaaagtctccaagaggaattgtctttggccagaggtaccattgaacgtctcaccaagtctctggcagatgtggaaagccaagtttctgctcaaaataaagaaaaagatacggtcttaggaaggttagctcttcttcaagaagaaagagacaaactcattacagaaatggacaggtctttattggaaaatcagagtctcagcagctcctgtgaaagtctaaaactagctctagagggtcttactgaagacaaggaaaagttagtgaaggaaattgaatctttgaaatcttctaagattgcagaaagtactgagtggcaagagaaacacaaggagctacaaaaagagtatgaaattcttctgcagtcctatgagaatgttagtaatgaagcagaaaggattcagcatgtggtggaagctgtgaggcaagagaaacaagaactgtatggcaagttaagaagcacagaggcaaacaagaaggagacagaaaagcagttgcaggaagctgagcaagaaatggaggaaatgaaagaaaagatgagaaagtttgctaaatctaaacagcagaaaatcctagagctggaagaagagaatgaccggcttagggcagaggtgcaccctgcaggagatacagctaaagagtgtatggaaacacttctttcttccaatgccagcatgaaggaagaacttgaaagggtcaaaatggagtatgaaaccctttctaagaagtttcagtctttaatgtctgagaaagactctctaagtgaagaggttcaagatttaaagcatcagatagaagataatgtatctaaacaagctaacctagaggccaccgagaaacatgataaccaaacgaatgtcactgaagagggaacacagtctataccaggtgagactgaagagcaagactctctgagtatgagcacaagacctacatgttcagaatcggttccatcagcgaagagtgccaaccctgctgtaagtaaggatttcagctcacatgatgaaattaataactacctacagcagattgatcagctcaaagaaagaattgctggattagaggaggagaagcagaaaaacaaggaatttagccagactttagaaaatgagaaaaataccttactgagtcagatatcaacaaaggatggtgaactaaaaatgcttcaggaggaagtaaccaaaatgaacctgttaaatcagcaaatccaagaagaactctccagagttaccaaactaaaggagacagcagaagaagagaaagatgatttggaagagaggcttatgaatcaattagcagaacttaatggaagcattgggaattactgtcaggatgttacagatgcccaaataaaaaatgagctattggaatctgaaatgaagaaccttaaaaagtgtgtgagtgaattggaagaagaaaagcagcagttagtcaaggaaaaaactaaggtggaatcagaaatacgaaaggaatatttggagaaaatacaaggtgctcagaaagaacccggaaataaaagccatgcaaaggaacttcaggaactgttaaaagaaaaacaacaagaagtaaagcagctacagaaggactgcatcaggtatcaagagaaaattagtgctctggagagaactgttaaagctctagaatttgttcaaactgaatctcaaaaagatttggaaataaccaaagaaaatctggctcaagcagttgaacaccgcaaaaaggcacaagcagaattagctagcttcaaagtcctgctagatgacactcaaagtgaagcagcaagggtcctagcagacaatctcaagttgaaaaaggaacttcagtcaaataaagaatcagttaaaagccagatgaaacaaaaggatgaagatcttgagcgaagactggaacaggcagaagagaagcacctgaaagagaagaagaatatgcaagagaaactggatgctttgcgcagagaaaaagtccacttggaagagacaattggagagattcaggttactttgaacaagaaagacaaggaagttcagcaacttcaggaaaacttggacagtactgtgacccagcttgcagcctttactaagagcatgtcttccctccaggatgatcgtgacagggtgatagatgaagctaagaaatgggagaggaagtttagtgatgcgattcaaagcaaagaagaagaaattagactcaaagaagataattgcagtgttctaaaggatcaacttagacagatgtccatccatatggaagaattaaagattaacatttccaggcttgaacatgacaagcagatttgggagtccaaggcccagacagaggtccagcttcagcagaaggtctgtgatactctacagggggaaaacaaagaacttttgtcccagctagaagagacacgccacctataccacagttctcagaatgaattagctaagttggaatcagaacttaagagtctcaaagaccagttgactgatttaagtaactctttagaaaaatgtaaggaacaaaaaggaaacttggaagggatcataaggcagcaagaggctgatattcaaaattctaagttcagttatgaacaactggagactgatcttcaggcctccagagaactgaccagtaggctgcatgaagaaataaatatgaaagagcaaaagattataagcctgctttctggcaaggaagaggcaatccaagtagctattgctgaactgcgtcagcaacatgataaagaaattaaagagctggaaaacctgctgtcccaggaggaagaggagaatattgttttagaagaggagaacaaaaaggctgttgataaaaccaatcagcttatggaaacactgaaaaccatcaaaaaggaaaacattcagcaaaaggcacagttggattcctttgttaaatccatgtcttctctccaaaatgatcgagaccgcatagtgggtgactatcaacagctggaagagcgacatctctctataatcttggaaaaagaccaactcatccaagaggctgctgcagagaataataagcttaaagaagaaatacgaggcttgagaagtcatatggatgatctcaattctgagaatgccaagctagatgcagaactgatccaatatagagaagacctgaaccaagtgataacaataaaggacagccaacaaaagcagcttcttgaagttcaacttcagcaaaataaggagctggaaaataaatatgctaaattagaagaaaagctgaaggaatctgaggaagcaaatgaggatctgcggaggtcctttaatgccctacaagaagagaaacaagatttatctaaagagattgagagtttgaaagtatctatatcccagctaacaagacaagtaacagccttgcaagaagaaggtactttaggactctatcatgcccagttaaaagtaaaagaagaagaggtacacaggttaagtgctttgttttcctcctctcaaaagagaattgcagaactggaagaagaattggtttgtgttcaaaaggaagctgccaagaaggtaggtgaaattgaagataaactgaagaaagaattaaagcatcttcatcatgatgcagggataatgagaaatgaaactgaaacagcagaagagagagtggcagagctagcaagagatttggtggagatggaacagaaattactcatggtcaccaaagaaaataaaggtctcacagcacaaattcagtcttttggaaggtctatgagttccttgcaaaatagtagagatcatgccaatgaggaacttgatgaactgaaaaggaaatatgatgccagtctgaaggaattggcacagttgaaagaacagggactcttaaacagagagagagatgctcttctttctgaaaccgccttttcaatgaactccactgaggagaatagcttgtctcaccttgagaaacttaaccaacagctcctatccaaagatgagcaattgcttcacttgtcctcacaactagaagattcttataaccaagtgcagtccttttccaaggctatggccagtctgcagaatgagagagatcacctgtggaatgagctggagaaatttcgaaagtcagaggaagggaagcagaggtctgcagctcagccttccaccagcccagctgaagtacagagtttaaaaaaagctatgtcttcactccaaaatgacagagacagactactgaaggaattgaagaatctgcagcagcaatacttacagattaatcaagagatcactgagttacatccactgaaggctcaacttcaggagtatcaagataagacaaaagcatttcagattatgcaagaagagctcaggcaggaaaacctctcctggcagcatgagctgcatcagctcaggatggagaagagttcctgggaaatacatgagaggagaatgaaggaacagtaccttatggctatctcagataaagatcagcagctcagtcatctgcagaatcttataagggaattgaggtcttcttcctcccagactcagcctctcaaagtgcaataccaaagacaggcatccccagagacatcagcttccccagatgggtcacaaaatctggtttatgagacagaacttctcaggacccagctcaatgacagcttaaaggaaattcaccaaaaggagttaagaattcagcaactgaacagcaacttctctcagctactggaagagaaaaacaccctttccattcagctctgcgataccagtcagagtcttcgtgagaaccagcagcactatggtgaccttttaaatcactgtgcagtcttggagaagcaggttcaagagctgcaggcggggccactaaatatagatgttgctccaggagctccccaggaaaagaatggagttcacagaaagagtgaccctgaggaactaagggaaccgcagcaaagcttttctgaagctcagcagcagctatgcaacaccagacaggaagtgaatgaattaaggaagctgctggaagaagaacgagaccaaagagtggctgctgagaatgctctctctgtggccgaggagcagatcagacggttagagcacagtgaatgggactcttcccggactcctatcattggctcctgtggcactcaggagcaggcactgttaatagatcttacaagcaacagttgtcgaaggacccggagtggcgttggatggaagcgagtcctgcgttcactctgtcattcacggacccgagtgccacttctagcagccatctactttctaatgattcatgtcctgctcattctgtgttttacgggccatctatagacttagttgttactctttggaccactcccttcaaaacttggaattctctcacctctaacatcagaacatcaattccagtggaacagtcttcccatttacaggtcttctctccaactcttcacggaaagtgcctgcaaaaacagaggtggatacgaggacaggttggagctgcagggactggcgagtctgctttcttctactgccctgagcctgaacgcttctgcttaatctgagaatcacatttggtttgttgagcctaatatttgttgagattttgcaggaccctgatcttttgtggtcctgtaaaagatactgaggaatgtctttcagccaagccaagaggatggtttcaataaacctaataatctgaagttcagctttttttttttttttt

SEQ ID NO: 1872 - protein, 3259 aa, Homo sapiens
  ref <308>: DATABASE ACCESSION NUMBER: SWISS-Prot / CAA53052
  ref <309>: DATABASE ENTRY DATE: 2002-10-01
MLSRLSGLANVVLHELSGDDDTDQNMRAPLDPELHQESDMEFNNTTQEDVQERLAYAEQLVVELKDIIRQKDVQLQQKDEALQEERKAADNKIKKLKLHAKAKLTSLNKYIEEMKAQGGTVLPTEPQSEEQLSKHDKSSTEEEMEIEKIKHKLQEKEELISTLQAQLTQAQAEQPAQSSTEMEEFVMMKQQLQEKEEFISTLQAQLSQTQAEQAAQQVVREKDARFETQVRLHEDELLQLVTQADVETEMQQKLRVLQRKLEEHEESLVGRAQVVDLLQQELTAAEQRNQILSQQLQQMEAEHNTLRNTVETEREESKILLEKMELEVAERKLSFHNLQEEMHHLLEQFEQAGQAQAELESRYSALEQKHKAEMEEKTSHILSLQKTGQELQSACDALKDQNSKLLQDKNEQAVQSAQTIQQLEDQLQQKSKEISQFLNRLPLQQHETASQTSFPDVYNEGTQAVTEENIASLQKRVVELENEKGALLLSSIELEELKAENEKLSSQITLLEAQNRTGEADREVSEISIVDIANKRSSSAEESGQDVLENTFSQKHKELSVLLLEMKEAQEEIAFLKLQLQGKRAEEADHEVLDQKEMKQMEGEGIAPIKMKVFLEDTGQDFPLMPNEESSLPAVEKEQASTEHQSRTSEEISLNDAGVELKSTKQDGDKSLSAVPDIGQCHQDELERLKSQILELELNFHKAQEIYEKNLDEKAKEISNLNQLIEEFKKNADNNSSAFTALSEERDQLLSQVKELSMVTELRAQVKQLEMNLAEAERQRRLDYESQTAHDNLLTEQIHSLSIEAKSKDVKIEVLQNELDDVQLQFSEQSTLIRSLQSQLQNKESEVLEGAERVRHISSKVEELSQALSQKELEITKMDQLLLEKKRDVETLQQTIEEKDQQVTEISFSMTEKMVQLNEEKFSLGVEIKTLKEQLNLLSRAEEAKKEQVEEDNEVSSGLKQNYDEMSPAGQISKEELQHEFDLLKKENEQRKRKLQAALINRKELLQRVSRLEEELANLKDESKKEIPLSETERGEVEEDKENKEYSEKCVTSKCQEIEIYLKQTISEKEVELQHIRKDLEEKLAAEEQFQALVKQMNQTLQDKTNQIDLLQAEISENQAIIQKLITSNTDASDGDSVALVKETVVISPPCTGSSEHWKPELEEKILALEKEKEQLQKKLQEALTSRKAILKKAQEKERHLREELKQQKDDYNRLQEQFDEQSKENENIGDQLRQLQIQVRESIDGKLPSTDQQESCSSTPGLEEPLFKATEQHHTQPVLESNLCPDWPSHSEDASALQGGTSVAQIKAQLKEIEAEKVELELKVSSTTSELTKKSEEVFQLQEQINKQGLEIESLKTVSHEAEVHAESLQQKLESSQLQIAGLEHLRELQPKLDELQKLISKKEEDVSYLSGQLSEKEAALTKIQTEIIEQEDLIKALHTQLEMQAKEHDERIKQLQVELCEMKQKPEEIGEESRAKQQIQRKLQAALISRKEALKENKSLQEELSLARGTIERLTKSLADVESQVSAQNKEKDTVLGRLALLQEERDKLITEMDRSLLENQSLSSSCESLKLALEGLTEDKEKLVKEIESLKSSKIAESTEWQEKHKELQKEYEILLQSYENVSNEAERIQHVVEAVRQEKQELYGKLRSTEANKKETEKQLQEAEQEMEEMKEKMRKFAKSKQQKILELEEENDRLRAEVHPAGDTAKECMETLLSSNASMKEELERVKMEYETLSKKFQSLMSEKDSLSEEVQDLKHQIEDNVSKQANLEATEKHDNQTNVTEEGTQSIPGETEEQDSLSMSTRPTCSESVPSAKSANPAVSKDFSSHDEINNYLQQIDQLKERIAGLEEEKQKNKEFSQTLENEKNTLLSQISTKDGELKMLQEEVTKMNLLNQQIQEELSRVTKLKETAEEEKDDLEERLMNQLAELNGSIGNYCQDVTDAQIKNELLESEMKNLKKCVSELEEEKQQLVKEKTKVESEIRKEYLEKIQGAQKEPGNKSHAKELQELLKEKQQEVKQLQKDCIRYQEKISALERTVKALEFVQTESQKDLEITKENLAQAVEHRKKAQAELASFKVLLDDTQSEAARVLADNLKLKKELQSNKESVKSQMKQKDEDLERRLEQAEEKHLKEKKNMQEKLDALRREKVHLEETIGEIQVTLNKKDKEVQQLQENLDSTVTQLAAFTKSMSSLQDDRDRVIDEAKKWERKFSDAIQSKEEEIRLKEDNCSVLKDQLRQMSIHMEELKINISRLEHDKQIWESKAQTEVQLQQKVCDTLQGENKELLSQLEETRHLYHSSQNELAKLESELKSLKDQLTDLSNSLEKCKEQKGNLEGIIRQQEADIQNSKFSYEQLETDLQASRELTSRLHEEINMKEQKIISLLSGKEEAIQVAIAELRQQHDKEIKELENLLSQEEEENIVLEEENKKAVDKTNQLMETLKTIKKENIQQKAQLDSFVKSMSSLQNDRDRIVGDYQQLEERHLSIILEKDQLIQEAAAENNKLKEEIRGLRSHMDDLNSENAKLDAELIQYREDLNQVITIKDSQQKQLLEVQLQQNKELENKYAKLEEKLKESEEANEDLRRSFNALQEEKQDLSKEIESLKVSISQLTRQVTALQEEGTLGLYHAQLKVKEEEVHRLSALFSSSQKRIAELEEELVCVQKEAAKKVGEIEDKLKKELKHLHHDAGIMRNETETAEERVAELARDLVEMEQKLLMVTKENKGLTAQIQSFGRSMSSLQNSRDHANEELDELKRKYDASLKELAQLKEQGLLNRERDALLSETAFSMNSTEENSLSHLEKLNQQLLSKDEQLLHLSSQLEDSYNQVQSFSKAMASLQNERDHLWNELEKFRKSEEGKQRSAAQPSTSPAEVQSLKKAMSSLQNDRDRLLKELKNLQQQYLQINQEITELHPLKAQLQEYQDKTKAFQIMQEELRQENLSWQHELHQLRMEKSSWEIHERRMKEQYLMAISDKDQQLSHLQNLIRELRSSSSQTQPLKVQYQRQASPETSASPDGSQNLVYETELLRTQLNDSLKEIHQKELRIQQLNSNFSQLLEEKNTLSIQLCDTSQSLRENQQHYGDLLNHCAVLEKQVQELQAGPLNIDVAPGAPQEKNGVHRKSDPEELREPQQSFSEAQQQLCNTRQEVNELRKLLEEERDQRVAAENALSVAEEQIRRLEHSEWDSSRTPIIGSCGTQEQALLIDLTSNSCRRTRSGVGWKRVLRSLCHSRTRVPLLAAIYFLMIHVLLILCFTGHL

SEQ ID NO: 1873 - DNA, 10170 bp, Rattus norvegicus; identical to SEQ ID NO: 1869
  ref <308>: DATABASE ACCESSION NUMBER: EMBL / D25543
  ref <309>: DATABASE ENTRY DATE: 2000-04-20

SEQ ID NO: 1874 - protein, 3187 aa, Rattus norvegicus; identical to SEQ ID NO: 1870
  ref <308>: DATABASE ACCESSION NUMBER: SWISS-Prot / BAA05026
  ref <309>: DATABASE ENTRY DATE: 2002-10-01

SEQ ID NO: 1875 - DNA, 10300 bp, Homo sapiens; identical to SEQ ID NO: 1871
  ref <308>: DATABASE ACCESSION NUMBER: EMBL / X75304
  ref <309>: DATABASE ENTRY DATE: 1994-09-21

SEQ ID NO: 1876 - protein, 3259 aa, Homo sapiens; identical to SEQ ID NO: 1872
  ref <308>: DATABASE ACCESSION NUMBER: SWISS-Prot / CAA53052
  ref <309>: DATABASE ENTRY DATE: 2002-10-01

SEQ ID NO: 1877 - DNA, 1581 bp, Rattus norvegicus
  ref <308>: DATABASE ACCESSION NUMBER: EMBL / D26073
  ref <309>: DATABASE ENTRY DATE: 1999-09-20
cacagctgtgcccacatcccgccccgcgcggaccgcttgtagccgcttctcgggccggaggatgcccaggaagctgctgctactgccccagctgtccgcgtgctccgctctgcgcgtccgcgggcccggcccgccgcctcgccggccatgaacgccgcccgcactggctaccgagtcttttcggccaactccacggccgcctgcacggagctggccaagcgcatcactgagcgtcttggtgctgaattggggaaatctgttgtttatcaggagaccaatggagaaaccagagttgaaatcaaagagtctgttcgtggccaagatattttcattatacaaaccatacccagagatgtgaatacggccgtgatggagctgctgatcatggcgtacgccctgaagactgcctgtgccaggaatatcatcggtgtcatcccctacttcccctacagcaaacaaagcaagatgaggaagaggggctccattgtgtgcaagctcctggcatccatgctggcaaaagctggtctaactcacattatcactatggatcttcaccaaaaggaaatacaaggctttttctgcttccccgtggacaaccttagagcctcacctttcctgctccagtatatccaggaagaaattccaaattacagaaatgcagtcattgtagctaagtctcctgatgctgcaaaaagggctcagtcctatgcagagagactacgcctgggcctggctgtgatccacggagaagctcagtgcacagagctagacatggatgacggtcgacactcaccccccatggtcaagaacgccactgtgcaccccggcctggagctacccttgatgatggccaaagagaagccaccaataacagtggtcggagacgtcgggggacgcattgcaatcatagtggatgacatcattgatgatgtggagagctttgttgctgctgcagagaccctgaaagagagaggtgcttacaagatctatgtcatggccacgcacggcatcctgtctgctgaagctccccgtctgatcgaggagtcccccattgatgaggtggtggtgacgaacactgtccctcacgagcttcagaaactacagtgtcccaagataaagactgtggacatcagcttgattctttctgaggcgattcggagaatccataatggcgaatccatggcttacctcttccggaacatcacagtggatgattagctccgagctgccttgacctgcaggggagcacacagcagtgtcagccggcagacaggctgccgagtcccttctcccccatcagcagaatgcagcctatttgggaatacgtcctgcggaagaggcaggctctgtcacagcaggcatccagttgtagactgagtccccacgctggtttgttcactagtgtctgctctggggaaggcaggtgaggcgttgagcttggtcagggagctgagtggccctggcactgatgcgtgcagttgtaccattggacatgaagggtccccggctgctttcacggagctcgtcagatgagagcggagcagcctgtccctcagaactgtgttgctgcaaataaaagtt

SEQ ID NO: 1878 - protein, 356 aa, Rattus norvegicus
  ref <308>: DATABASE ACCESSION NUMBER: SWISS-Prot / BAA05068
  ref <309>: DATABASE ENTRY DATE: 2002-06-15
MNAARTGYRVFSANSTAACTELAKRITERLGAELGKSVVYQETNGETRVEIKESVRGQDIFIIQTIPRDVNTAVMELLIMAYALKTACARNIIGVIPYFPYSKQSKMRKRGSIVCKLLASMLAKAGLTHIITMDLHQKEIQGFFCFPVDNLRASPFLLQYIQEEIPNYRNAVIVAKSPDAAKRAQSYAERLRLGLAVIHGEAQCTELDMDDGRHSPPMVKNATVHPGLELPLMMAKEKPPITVVGDVGGRIAIIVDDIIDDVESFVAAAETLKERGAYKIYVMATHGILSAEAPRLIEESPIDEVVVTNTVPHELQKLQCPKIKTVDISLILSEAIRRIHNGESMAYLFRNITVDD

SEQ ID NO: 1879 - DNA, 1581 bp, Rattus norvegicus; identical to SEQ ID NO: 1877
  ref <308>: DATABASE ACCESSION NUMBER: EMBL / D26073
  ref <309>: DATABASE ENTRY DATE: 1999-09-20

SEQ ID NO: 1880 - protein, 356 aa, Rattus norvegicus; identical to SEQ ID NO: 1878
  ref <308>: DATABASE ACCESSION NUMBER: SWISS-Prot / BAA05068
  ref <309>: DATABASE ENTRY DATE: 2002-06-15

SEQ ID NO: 1881 - DNA, 1746 bp, Rattus norvegicus
  ref <308>: DATABASE ACCESSION NUMBER: EMBL / D26154
  ref <309>: DATABASE ENTRY DATE: 1999-01-21
tccgcagctgtaccgcctaatcttcctggatgtttgggctgtttgatttctttaaagataataagcattatccagttatccatcatgctctatctataggctatgccatgtgacatattgggcaatgctgtattatgaaaacacatgtaaacctctctgtaacctgtgtttaacccagcatagttgtagcatgtggttgtattaatgaacgttacaggccaggggaccgtctcctggctgaggagacagctgccaccatatcagccattgaagccatgaagaatgctcaccgagaggagatggaacgggagttagagaagagccagcggtctcagatcagcagcatcaattcagacatagaagccctgaggcgacagtacctggaggagctacagtcagtgcagcgagagctggaggtcctttcggagcagtactctcagaagtgtctggagaatgcacacctagcccaggcgctggaagctgagcggcaagccctgcggcagtgtcagcgtgagaaccaagagctcaatgcccacaaccaggagctgaataaccgcctggctgcggagatcacacggttgcggacactactgactggagaaggtggtggggaatccactgggttggctctcacacagggcaaggatgcctatgagttagaggtcttgttgggggtcaacgagtcagaagttcagttcctgaaacaggagatcagctctctcaaggatgaactccagacagccctgcgggataagaagtttgcgagcgataagtacaaagacatctacacagagctcagcatcgcgaaggccaaggctgactgtgacatcagcaggctgaaggagcagctgaaagcagccacagaggcactgggcgagaaatctcctgaaggcactactgtgtcaggatatgacataatgaaatctaaaagcaatcctgacttcctgaagaaagacagatcctgtgttacccggcaactcagaaacatcaggtccaagtccgtaattgagcaggtctcatgggataactgagtcgcgcccgcttccaagtcccctgtcgtagtctgaaggaaggcctgacggtgcaggagcgcttgaagctctttgaatccagggacttgaagaaagattagctgcatccattccactgacacatccttcccagctggtggcagcacaagccaagagtgggtttcatctgtgctttctcattgttgctgtcattaactgtgggtatggatgcatgagagactgctgtggggtgtttggtccattccctccctgttaattccaacttcctgttgtctttatcacagcttttttcccatggtattctcagattagtcacgcgaaagcagtagagtggggaggtgtccccactgacacctgagcagccccttgtcctcccaccacactgtcagtattaaggcacaacagcctgttaataagctagccctgcctcggagtgcacgtgggggacgggacctgtcagtggctctgctctgccacacacagcggagcaccacccttgctgggtagagcagaccccaccgaatgttctaggttgacctggtttctgaagggcctaggatagtgtccagcctggcccacttccttttgatgtgggaggaggacagcattttgtatttggcccactaatgcagcttagaaccatacccagataatcctgccaaatctttcacgacctggaaaatgttgaaagcaaccattcctattttggtttttt

SEQ ID NO: 1882 - protein, 251 aa, Rattus norvegicus
  ref <308>: DATABASE ACCESSION NUMBER: SWISS-Prot / BAA05141
  ref <309>: DATABASE ENTRY DATE: 2001-12-01
MKNAHREEMERELEKSQRSQISSINSDIEALRRQYLEELQSVQRELEVLSEQYSQKCLENAHLAQALEAERQALRQCQRENQELNAHNQELNNRLAAEITRLRTLLTGEGGGESTGLALTQGKDAYELEVLLGVNESEVQFLKQEISSLKDELQTALRDKKFASDKYKDIYTELSIAKAKADCDISRLKEQLKAATEALGEKSPEGTTVSGYDIMKSKSNPDFLKKDRSCVTRQLRNIRSKSVIEQVSWDN

SEQ ID NO: 1883 - DNA, 1746 bp, Rattus norvegicus; identical to SEQ ID NO: 1881
  ref <308>: DATABASE ACCESSION NUMBER: EMBL / D26154
  ref <309>: DATABASE ENTRY DATE: 1999-01-21

SEQ ID NO: 1884 - protein, 251 aa, Rattus norvegicus; identical to SEQ ID NO: 1882
  ref <308>: DATABASE ACCESSION NUMBER: SWISS-Prot / BAA05141
  ref <309>: DATABASE ENTRY DATE: 2001-12-01

SEQ ID NO: 1885 - DNA, 1746 bp, Rattus norvegicus; identical to SEQ ID NO: 1881
  ref <308>: DATABASE ACCESSION NUMBER: EMBL / D26154
  ref <309>: DATABASE ENTRY DATE: 1999-01-21

SEQ ID NO: 1886 - protein, 251 aa, Rattus norvegicus; identical to SEQ ID NO: 1882
  ref <308>: DATABASE ACCESSION NUMBER: SWISS-Prot / BAA05141
  ref <309>: DATABASE ENTRY DATE: 2001-12-01

SEQ ID NO: 1887 - DNA, 1746 bp, Rattus norvegicus; identical to SEQ ID NO: 1881
  ref <308>: DATABASE ACCESSION NUMBER: EMBL / D26154
  ref <309>: DATABASE ENTRY DATE: 1999-01-21

SEQ ID NO: 1888 - protein, 251 aa, Rattus norvegicus; identical to SEQ ID NO: 1882
  ref <308>: DATABASE ACCESSION NUMBER: SWISS-Prot / BAA05141
  ref <309>: DATABASE ENTRY DATE: 2001-12-01

SEQ ID NO: 1889 - DNA, 1746 bp, Rattus norvegicus; identical to SEQ ID NO: 1881
  ref <308>: DATABASE ACCESSION NUMBER: EMBL / D26154
  ref <309>: DATABASE ENTRY DATE: 1999-01-21

SEQ ID NO: 1890 - protein, 251 aa, Rattus norvegicus; identical to SEQ ID NO: 1882
  ref <308>: DATABASE ACCESSION NUMBER: SWISS-Prot / BAA05141
  ref <309>: DATABASE ENTRY DATE: 2001-12-01

SEQ ID NO: 1891 - DNA, 1746 bp, Rattus norvegicus; identical to SEQ ID NO: 1881
  ref <308>: DATABASE ACCESSION NUMBER: EMBL / D26154
  ref <309>: DATABASE ENTRY DATE: 1999-01-21

SEQ ID NO: 1892 - protein, 251 aa, Rattus norvegicus; identical to SEQ ID NO: 1882
  ref <308>: DATABASE ACCESSION NUMBER: SWISS-Prot / BAA05141
  ref <309>: DATABASE ENTRY DATE: 2001-12-01

SEQ ID NO: 1893 - DNA, 2350 bp, Rattus norvegicus
  ref <308>: DATABASE ACCESSION NUMBER: EMBL / D26178
  ref <309>: DATABASE ENTRY DATE: 1999-01-21
gggttcctgctggatgccacgcgctgccgggtgtggacttgccgggttcgcccgctcggatcccactgcccttgcctgccgggcccgctcgggtgcacgcgccgcccggctgtgatcgccgccagcagaagactgatctttgaaaatatgtatttgggagataatcacgttctgttgaatactttgtgctggtgctgccatcgaaaaatctggttacagtccggggaggcctgctaccattgcaggactgaaccgcctcggccctgagatgagtgtcccgacagagcaggcgcaccatgaatagatacacaacgatcaaacagcttggggatgggacctatggttctgtcctgctggggagaagcattgaatctggagaactaattgccattaaaaaaatgaaaagaaagttttactcctgggaagaatgcatgaaccttcgggaggttaagtctttaaagaagctcaaccatgccaatatagtgaagttaaaagaggttatcagggagaacgaccatctctatttcatcttcgagtacatgaaggaaaacctttaccagctcattaaagaaagaaataagttgttcccagagtctgcaataaggaatataatgtatcagatattgcaaggactggcgttcattcacaaacatggtttcttccaccgggacttaaagcctgagaacctcctctgcatgggaccagaacttgtgaaaatcgcggacttcggattggcccgagaaatccgatcaagacctccatacacagactatgtgtctactagatggtatagggctccagaagtactcctgagatctaccaactacagctcccccattgatgtctgggccgtgggctgcatcatggcagaggtgtacaccctccggcctcttttccctggggccagtgaaattgacacgattttcaaaatttgccaagtgttgggaacaccgaagaagactgactggcctgaaggctaccagctgtcaagtgctatgaatttcatctggccccagtgcatacccaataacttaaagacactaattccaaatgctagcagcgaagcaattcagctcctgagagacttgcttcagtgggatcccaagaaacgaccaactgctagtcaggcacttcgatacccttacttccagatcggacacccactgggcatcagcacacaggactcgggaaagccacagaaagatgtccaagacaagacaggcccacctccttacgtcaagccagcccctcctgcccaggccccaaccaaggcgcatacactgatttcttcacgaccaaaccaagccagtcaaccccatcagcattttgtatatccctacaagggcgaagcctctaggacagagcagctgagccacgtgcaggagggccagccaaacccaccattcttcccgtccctccacaacaagaatctcccgccaaaaatcctagctggcctggaacagaaaagcggtgacatgaaaccaaagagcaggagaagatggggtctcatttccaggtcaaccaagggttctgatgattgggccgacttggctgacttagatttcagttcctctctcaccagaatagatgtcaaaaacaagaagagacagagtgacgaccccctctgcaggtttgaaagtgttttggacctgaagccatctgagccggtgggtacaggaactagtgtctccacccaggcttcctcccagaggagagacacgccgaccctgcagtccacagcaaagcagcactacttgaagcactctcgctacctgcctggaataaatataagaaatggcgtgctcccaaatccaggcaaggactttcttccatcaagttcatggtccagttctggtttgtctggaaaatcttcaggaacggtatcagtagtgagcaaaataacttcagttggctcaggctccacgagctctactggactgactggaagctacatcccttcctttctgaagaaggaagtcggctctgtcatgcagagggtccagctggcgcctctcgcagccccttcccccggctactcttccctcaaggccgtgagacctcacccagggaggccattctttcacacccagcctaggagcacgcctggcttgattccacgacctccagctgtgcagcctgtgcacggcaggatagactggtcttccaagtacccatctcggcggtgactgtcccagctgactccgttgtacccccacaaccacgtggcggtgtaaaagcacccacacttacagcagttctgaactaacacatttcaatatttcttttaaatgtttttttaaacattgatttgaatgcaataccctctttttgtataaaattattttattct

SEQ ID NO: 1894 - protein, 629 aa, Rattus norvegicus
  ref <308>: DATABASE ACCESSION NUMBER: SWISS-Prot / BAA05166
  ref <309>: DATABASE ENTRY DATE: 2003-02-01
MNRYTTIKQLGDGTYGSVLLGRSIESGELIAIKKMKRKFYSWEECMNLREVKSLKKLNHANIVKLKEVIRENDHLYFIFEYMKENLYQLIKERNKLFPESAIRNIMYQILQGLAFIHKHGFFHRDLKPENLLCMGPELVKIADFGLAREIRSRPPYTDYVSTRWYRAPEVLLRSTNYSSPIDVWAVGCIMAEVYTLRPLFPGASEIDTIFKICQVLGTPKKTDWPEGYQLSSAMNFIWPQCIPNNLKTLIPNASSEAIQLLRDLLQWDPKKRPTASQALRYPYFQIGHPLGISTQDSGKPQKDVQDKTGPPPYVKPAPPAQAPTKAHTLISSRPNQASQPHQHFVYPYKGEASRTEQLSHVQEGQPNPPFFPSLHNKNLPPKILAGLEQKSGDMKPKSRRRWGLISRSTKGSDDWADLADLDFSSSLTRIDVKNKKRQSDDPLCRFESVLDLKPSEPVGTGTSVSTQASSQRRDTPTLQSTAKQHYLKHSRYLPGINIRNGVLPNPGKDFLPSSSWSSSGLSGKSSGTVSVVSKITSVGSGSTSSTGLTGSYIPSFLKKEVGSVMQRVQLAPLAAPSPGYSSLKAVRPHPGRPFFHTQPRSTPGLIPRPPAVQPVHGRIDWSSKYPSRR

SEQ ID NO: 1895 - DNA, 6014 bp, Homo sapiens
  ref <308>: DATABASE ACCESSION NUMBER: Refseq / NM_014920
  ref <309>: DATABASE ENTRY DATE: 2002-11-05
cccatttccagctccggagcgggcggctgcgccccgctcgtcgaggagctgcgctcacctcaggggcgggcccccgcctgcgttcgcggcgccagcagaagactgatttttggaaatatgtatttgggagacagtcacgtcctattgaataccttgtgctggtgctgccatcgaaaaatctggttacactctggggaggactgctaccactgcagaactgaaccacttcggccgtgagatgagtgtccggcctgagcaggcacaccatgaatagatacacaacaatcaggcagctcggggatggaacctacggttccgtcctgctgggaagaagcattgagtctggggagctgatcgctattaaaaaaatgaaaagaaaattttattcctgggaggaatgcatgaaccttcgggaggttaagtctttaaagaagctcaaccatgccaatgtagtcaaattaaaagaagttatcagggaaaatgatcatctttattttatcttcgagtacatgaaggaaaatctttaccagctcattaaagagagaaataagttgtttcctgagtctgctataaggaatatcatgtatcagatattacaaggactcgcatttattcacaaacacggcttctttcatcgagacttaaagcctgagaacctcctctgcatgggaccagaacttgtgaaaattgcagactttggtttggcccgagaaatacgatcaaaacctccatatacagattatgtatctaccagatggtacagggctccagaagtactcctgaggtctaccaactacagctcccccattgacgtctgggcggtgggctgcatcatggcagaagtttacaccctcaggccactcttccctggagccagtgaaattgacacaatattcaaaatttgccaagtgctggggacaccaaaaaagactgactggcctgaaggctatcaactttcaagtgcaatgaacttccgttggccacagtgtgtacccaataacttaaagaccttgattcccaatgctagcagtgaagcagtccagctcctgagagacatgcttcagtgggatcccaagaaacgaccaacagctagtcaggcacttcgatatccttacttccaagttggacacccactaggcagcaccacacaaaaccttcaggattcagaaaaaccacagaaaggcatcctggaaaaggcaggcccacctccttatattaagccagtcccacctgcccagccaccagccaagccacacacacgaatttcttcacgacagcatcaagccagccagccccctctgcatctcacgtacccctacaaagcagaggtctccaggacagatcacccaagccatctccaggaggacaagccaagcccgttgcttttcccatccctccacaacaagcatccacagtcgaaaatcacagctggcctggagcacaaaaatggtgagataaagccaaagagtaggagaaggtggggtcttatttccaggtcaacaaaggattcagatgattgggctgacttggatgacttggatttcagtccatccctcagcaggattgacctgaaaaacaagaaaagacagagtgatgacactctctgcaggtttgagagtgttttggacctgaagccctctgagcctgtgggcacaggaaacagtgcccccacccagacgtcatatcagcggcgagacacgcccaccctgagatctgcagccaagcagcactatttgaagcactctcgatacttgcctgggatcagtataagaaatggcatactctcgaatccaggcaaggaatttattccacctaatccatggtctagttctggcttgtctggaaaatcttcagggacaatgtcagtaatcagcaaagtaaattcagttggttccagctctacaagttctagtggactgactggaaactatgtcccttcctttctgaaaaaagaaatcggttctgctatgcagagggtacacctagcacctattccagacccttcccctggttattcctccctgaaggccatgagacctcatcctgggcgaccattcttccacacccagcctagaagcactcctgggttgataccacggcctccagccgcccagccagtgcatggccggacagactgggcttccaagtacgcatctcggcgatgactgtctgccttggtgatgaatctcttcctagggagaagcaggatactttccctcagctgactggtgttctacctgcaagatgtgcagagggcataaaagcaaatcaacactttatagttattcttctgaactaagacatgtcaatattcttttttaaagtttttttttaaaatattgatttgaatgcagtaggcttttttgtataaaattattttattctaaaactgggtcccattattttcttaaacaacagcattttgtatatatggattatgttttagcattttatacagtcaactttgtaatgaactttttaaaaattaattgattttcctttggggttccagataatattttctacagattttgaaaaatgtaataatattaatgcagtattgcaacaggggtgcaatttaaggctatgtgatagagggttatttactcagtgtgtgcagatatttatgaagtggtgaaatttcaagtgtggctcactaggtacttcaggccttcttggactgttgttagaaaagtgatcctctgcttttcttagtaggtcattggtttgatttttggataccactctgctgttctaaaaggactattatattatataattcactttgttttacttttgttccccagatgaaagaactctaagtaaatacattttaaaaaatttttctgacaccctttaatgtggttgcagatctcagatgaaaccaagcttaattatactatgccattatattctaatttattccatttttgaaatcaagttgtatgtgtaccaataaaagagatttctgcttcaaaaggctctcaacatgaaggttaacacagtcaatcaaacttacattcctgccaagatgcatggccaaaaaactaagtatcaaagcagcagaaggtttttgattatagtaactgagatggaattttgtgcctagctcagttctccagatctggctaggagcagtcaatgactaatgttctgtcctagccaaattctcaggacaatttggggagcagaaagagttatggcagaggttccactcatctacaaagtcacagtcacatgccacatttgatctcctaaccctggtgtagtttctttcaagagtgagaactttatttgttgggcagaggctgttccattgagaggaatgtttacagcagtttcaaaaatgacaaagtcagtttggagacagaaaaagacaaaaggtccagtctcatccatctctatatggtacatttgcctcacttatggttgccttaaaggcaagagggaaggtcaccatcagtgaacgcaatgcaatctcaacagtgtattgattcatattctcctagggctcaaactactctctattggttccaggataatgacaaattgaaccatatgtaagtaatcttttattttttattttttttttgagacagagtctcactctgtcacccaggctggagtgcagtggcgcgatcttagctctctgcaacctctgcctcccaggttcaagcctcctgagtaactgggactacaggcgcccgccaccacgcccagctaattttttgtatttttagtagagacggggtttcactgtgttagccaggacggcctcgatctcctgacctcgtgatccaccctcctccacctcccaaagtactgggattacaggcatgagccactgcacccagccaagtgatcatttttataggttaaaatgataggtgaaatgaatatagacactttcatatggttcaacctaatgacttggtaaattattgccttggtgtattaataatatgttgcattctgaacaaataaccatggcttccaaagggccctaacctaaaatcggagagtaatttatgctttggagaatttgactcaaatatatacttgaccaagcaccatgatccctaggggcatgagaaaagcacataatggatgtggatgtgataggtggtcttttcctgttaacaagctggcagcaaagcttcagaaaatatatatgcaagcacaacttgaagctgaattcatttctgtattatattctcaactcgttatctaaagcatcagaacatgtgttttcagagatgagtcctttactataaggttaatatttattttcattttctgtattatatatgaaaagtaaattaatgtgaaacctggcccagcttgctggaaagcaggttttaaattgtaaatattccttagaggagcaaatggattgtttaataccatagtctcagtaatctagcttatataaggtcattacattttttaactgaaaaacctagttacctgattattgcacattataaaattgtttttctaatactttatagggcccaacttcagaaaatacttcgcttttttctttttatgctttcgtttgtttaccagcaagcaacttccctggggaagccaaacacatattcataaaaaaaatcaagtagctgatgtgcagttgagaaaactagaggactgaaaaaacaaattttaactagcaaatgctgtgaattactcttcctccccttctctgaaatgggtaaaggacaaattgtgtaaaaaaacctatgcactatagaagggaatagtaaccatttcttttgtctctctgtttctgttctgactgagaacctgcagccatttcttgttacatgaaaacaaaatgctacttgttacctctattttttgttactatacaattatgaaatgtaatgtaagacaccaacagaaatgatatacctgtaactgtacctatcaggactatacctcatttacagtcagaaagcttactgggatgtcaggaaatgatacagggttggttctcatttcgtgccgaaatgagacagaaattcagtgacgaaggtgcgttgtaggggtattgatgtgccccaggtagtgccagcagagtagggaaaactgcatttgcataaaaactactcttgacatgattgttcattttacaaaaaaattccattaattaccaagccctcacccagcccatgtgtgataggatttatgtaggaagaaacttgattttcaaataattttttaaatgtatctcttgcctaaaggactatatacatctaataaagtaacactgtgtcatcttctggagttatcaaaaattgtatacaatcaagacaacacaagaattattttatttttgagtgcaaatacaggtactgttggagttgatgggcaccatgctttctcatgaagtagcatttccctaccatcaagccattgttttgtgccattcaggagaggaaaaaaaggaatttatgctgtacatttcagttcagtgtatgaccaaaagcaatatgtttataagaagatgtttgacatactaattattttatatcatttaaaccatactgtagcaacataatatatggagctaatttgtagaattatttttacgatttccaaacaaatgtactgtactgttatataatttattgtgaggaccttctcatggaagccattaggaaaacaaactagaggtaaatatcacattaatctgtattatcaatttctcatagacactgtgctaatgtgaattttaaatgacctgcatcaagtcttctgatctcagataactcagtacagatagcaattagtcagctgatttgattacaatggagtaaccgacaatatatttatttataaagcacatattcataataacgagaagaattcagaaaaccacttaagcaagacccttctgaaataaaaaatgttgctttttaaatagtttgtcctaaggtgtttaaaacatgtcaaccttatgtaaggaaaaatttcctggtccaaataaagttgaagtttaagaaaaattg

SEQ ID NO: 1896 - protein, 632 aa, Homo sapiens
  ref <308>: DATABASE ACCESSION NUMBER: Refseq / NP_055735
  ref <309>: DATABASE ENTRY DATE: 2002-11-05
MNRYTTIRQLGDGTYGSVLLGRSIESGELIAIKKMKRKFYSWEECMNLREVKSLKKLNHANVVKLKEVIRENDHLYFIFEYMKENLYQLIKERNKLFPESAIRNIMYQILQGLAFIHKHGFFHRDLKPENLLCMGPELVKIADFGLAREIRSKPPYTDYVSTRWYRAPEVLLRSTNYSSPIDVWAVGCIMAEVYTLRPLFPGASEIDTIFKICQVLGTPKKTDWPEGYQLSSAMNFRWPQCVPNNLKTLIPNASSEAVQLLRDMLQWDPKKRPTASQALRYPYFQVGHPLGSTTQNLQDSEKPQKGILEKAGPPPYIKPVPPAQPPAKPHTRISSRQHQASQPPLHLTYPYKAEVSRTDHPSHLQEDKPSPLLFPSLHNKHPQSKITAGLEHKNGEIKPKSRRRWGLISRSTKDSDDWADLDDLDFSPSLSRIDLKNKKRQSDDTLCRFESVLDLKPSEPVGTGNSAPTQTSYQRRDTPTLRSAAKQHYLKHSRYLPGISIRNGILSNPGKEFIPPNPWSSSGLSGKSSGTMSVISKVNSVGSSSTSSSGLTGNYVPSFLKKEIGSAMQRVHLAPIPDPSPGYSSLKAMRPHPGRPFFHTQPRSTPGLIPRPPAAQPVHGRTDWASKYASRR

SEQ ID NO: 1897 - DNA, 3035 bp, Rattus norvegicus
  ref <308>: DATABASE ACCESSION NUMBER: EMBL / D26180
  ref <309>: DATABASE ENTRY DATE: 1999-09-02
gaattccgccgagcgcagcaggccggatcgcgcagcgcgccagggaaggtctgggctccgcgcttcccgccccacacgccgacgcgctcgcaagccctccctcggcgctgggacccctggcggacatggccggcgacgccgtgcagagtgaacctcgcagctggtcactgctggagcagctgggtctggctggggcagacctggcagcccctggggtgcagcagcagctggagttagagcgagagcggctgaagcgggaaatccgaaaagagctgaagctgaaggagggcgctgagaacctgaggcgggccaccactgacctgggccgcagcttggcccctgtggaactgctgctgaggggctccgctagacggcttgacttgctgcaccagcagctgcaggagctgcatgcacatgtggtgctgcccgaccctacagcggggagtgatgctccccaatcccttgcagagggcagccctgtctgctcatccaccaacctgagccgagtggctggcctggagaagcagctggccattgagctcaaggtcaaacagggggcagaaaacatgatccagacctacagcaatggcagcaccaaggaccggaagctgctgttgacggcccaacagatgctgcaggatagtaagaccaagattgacatcatccgcatgcagcttcgccgggcgctacaagcactccaggctggccagctggagagtcaggcagctcctgatgaggcccacggagatccagacctgggagccgtagagctacgcattgaggagctacgacaccattttcgagtagagcatgcagtggcagaaggcgccaagaatgtcctgcgtctgctcagtgctgcaaaggccccagaccgcaaagcagtcagcgaggctcaggagaaattgactgagtccaaccagaagctgggcttgctgcgggagtcactggagaggcgcttgggggaactgcctgctgatcaccccaagggacgcctgcttcgggaggagctcactgcggcctcatcggcagccttcagtgcaatactgcctgggcccttccctgccactcactacagcaccttgagcaagcctgcaccactcacagggaccctggaagtacgagtggtgggctgcaaaaaccttcccgagaccatcccttggagccctcccccctcagtcggggcatctgggacccccgacagccgcactcctttcctgagtcgtccagctcggggcctttacaaccgaagtggaagccttagtggacggagcagcctcaagggggaggcagagaattccactgaggtcagcaccgtgctcaagctggacaacactgtggtggggcaaacagcctggaagccatgcggccccaatgcctgggaccagagcttcaccctggagctggagagggctcgggagctggagttggctgtgttctggcgtgaccagaggggtctgtgtgctctcaaatttctgaagttggaagacttcttggacaatgagaggcatgaggtgcagctggacatggaaccccagggctgcctggtggctgaggtcaccttccgtaaccccatcatcgagcggatccctaggctccaaaggcagaaaaaaattttctccaagcagcaagggcagacatttcagcgtgccagacacatgaacatcgatgtggccacctgggtgcggctgctccggagactcatcccgaacgccgtggccactggctccttcagccccaatgcatctccaggctctgagatccggagcactggagacatatccatggagaaattgaatctcggtgctgactcagacagctcgtcccagaagagccccgcagggctgccctccacctcatgtagcctgagttctccaacccacgaatccaccacctctccagagctgccttcagagacccaggagaccccaggccctggcctgtgcagtcccctgaggaagtcgcccctgacgcttgaggacttcaagttcctggcagtgcttggtcggggtcactttggaaaggtgctgctgtctgaattccactccagtggggagctctttgccattaaagccttgaagaaaggtgacattgtagcccgggatgaggttgagagcctgatgtgtgagaagcggattttggcgaccgtgaccagggcaggacatcccttccttgtgaaccttttcggctgtttccagaccccagagcatgtgtgctttgtgatggagtactcagccggtggggacttgatgctgcatatccacagcgacgtgttctcagagcctcgggctggcttctattcggcctgtgtggtgctgggactgcagttcctccatgaacacaagattgtctacagggacctgaagttggacaatttgctcctggatactgagggctacgtcaagatcgcagactttggcctctgcaaggaggggatgggctatggggaccggaccagcacattctgcggaactccggagttcctggcgccggaagtgctcacagacacatcctacactcgagccgtggactggtggggactgggtgtatttctctatgagatgctggttggagagtctccgttccctggggacgacgaggaggaagtatttgacagcatcgtcaatgatgaggttcgttatccccgcttcctgtctgcggaggccatcggcatcatgagaaggctactgcggaggaacccagagcggaggttgggatccactgagcgtgatgcagaagatgtgaaaaaacagcctttcttcaggactctggactgggatgccctgctggcccgtcgcctgcctccacccttcgtgcctacactttcggggcgcacagacgtcagcaacttcgatgaggagttcactggggaggcccccacactgagccctccccgggatgcacggcccctgacagctgcggagcaggcggccttccgggatttcgactttgtggcaggaggctattagccctaagcccctgccttgcccaagagttcttggtttttaaaaaagcctttggggtttactccggaattc

SEQ ID NO: 1898 - protein, 946 aa, Rattus norvegicus
  ref <308>: DATABASE ACCESSION NUMBER: SWISS-Prot / Q63433
  ref <309>: DATABASE ENTRY DATE: 2000-05-30
MAGDAVQSEPRSWSLLEQLGLAGADLAAPGVQQQLELERERLKREIRKELKLKEGAENLRRATTDLGRSLAPVELLLRGSARRLDLLHQQLQELHAHVVLPDPTAGSDAPQSLAEGSPVCSSTNLSRVAGLEKQLAIELKVKQGAENMIQTYSNGSTKDRKLLLTAQQMLQDSKTKIDIIRMQLRRALQALQAGQLESQAAPDEAHGDPDLGAVELRIEELRHHFRVEHAVAEGAKNVLRLLSAAKAPDRKAVSEAQEKLTESNQKLGLLRESLERRLGELPADHPKGRLLREELTAASSAAFSAILPGPFPATHYSTLSKPAPLTGTLEVRVVGCKNLPETIPWSPPPSVGASGTPDSRTPFLSRPARGLYNRSGSLSGRSSLKGEAENSTEVSTVLKLDNTVVGQTAWKPCGPNAWDQSFTLELERARELELAVFWRDQRGLCALKFLKLEDFLDNERHEVQLDMEPQGCLVAEVTFRNPIIERIPRLQRQKKIFSKQQGQTFQRARHMNIDVATWVRLLRRLIPNAVATGSFSPNASPGSEIRSTGDISMEKLNLGADSDSSSQKSPAGLPSTSCSLSSPTHESTTSPELPSETQETPGPGLCSPLRKSPLTLEDFKFLAVLGRGHFGKVLLSEFHSSGELFAIKALKKGDIVARDEVESLMCEKRILATVTRAGHPFLVNLFGCFQTPEHVCFVMEYSAGGDLMLHIHSDVFSEPRAGFYSACVVLGLQFLHEHKIVYRDLKLDNLLLDTEGYVKIADFGLCKEGMGYGDRTSTFCGTPEFLAPEVLTDTSYTRAVDWWGLGVFLYEMLVGESPFPGDDEEEVFDSIVNDEVRYPRFLSAEAIGIMRRLLRRNPERRLGSTERDAEDVKKQPFFRTLDWDALLARRLPPPFVPTLSGRTDVSNFDEEFTGEAPTLSPPRDARPLTAAEQAAFRDFDFVAGGY

SEQ ID NO: 1899 - DNA, 2965 bp, Homo sapiens
  ref <308>: DATABASE ACCESSION NUMBER: Refseq / XM_031273
  ref <309>: DATABASE ENTRY DATE: 2002-08-01
acgcgcgctcctctggccgcccctccctccgcgcggggacccctggcgggcggcaggaggacatggccagcgacgccgtgcagagtgagcctcgcagctggtccctgctagagcagctgggcctggccggggcagacctggcggcccccggggtacagcagcagctggagctggagcgggagcggctgcggcgggaaatccgcaaggagctgaagctgaaggagggtgctgagaacctgcggcgggccaccactgacctgggccgcagcctgggccccgtagagctgctgctgcggggctcctcgcgccgcctcgacctgctgcaccagcagctgcaggagctgcacgcccacgtggtgcttcccgacccggcggccacccacgatggcccccagtcccctggtgcgggtggccccacctgctcggccaccaacctgagccgcgtggcgggcctggagaagcagttggccattgagctgaaggtgaagcagggggcggagaacatgatccagacctacagcaatggcagcaccaaggaccggaagctgctgctgacagcccagcagatgttgcaggacagtaagaccaagattgacatcatccgcatgcaactccgccgggcgctgcaggccggccagctggagaaccaggcagccccggatgacacccaagggagtcctgacctgggggctgtggagctgcgcatcgaagagctgcggcaccacttccgagtggagcacgcggtggccgagggtgccaagaacgtactgcgcctgctcagcgctgccaaggccccggaccgcaaggcagtcagcgaggcccaggagaaattaacagaatccaaccagaagctggggctgctgcgggaggctctggagcggagacttggggagctgcccgccgaccaccccaaggggcggctgctgcgagaagagctcgctgcggcctcctccgctgccttcagcacccgcctggccgggccctttcccgccacgcactacagcaccctgtgcaagcccgcgccgctcacagggaccctggaggtacgagtggtgggctgcagagacctcccagagaccatcccgtggaaccctaccccctcaatggggggacctgggaccccagacagccgcccccccttcctgagccgcccagcccggggcctttacagccgaagcggaagcctcagtggccggagcagcctcaaagcagaagccgagaacaccagtgaagtcagcactgtgcttaagctggataacacagtggtggggcagacgtcttggaagccatgtggccccaatgcctgggaccagagcttcactctggagctggaaagggcacgggaactggagttggctgtgttctggcgggaccagcggggcctgtgtgccctcaaattcctgaagttggaggatttcttggacaatgagaggcatgaggtgcagctggacatggaaccccagggctgcctggtggctgaggtcaccttccgcaaccctgtcattgagaggattcctcggctccgacggcagaagaaaattttctccaagcagcaagggaaggcgttccagcgtgctaggcagatgaacatcgatgtcgccacgtgggtgcggctgctccggaggctcatccccaatgccacgggcacaggcacctttagccctggggcttctccaggatccgaggcccggaccacgggtgacatatcggtggagaagctgaacctcggcactgactcggacagctcacctcagaagagctcgcgggatcctccttccagcccatcgagcctgagctcccccatccaggaatccactgctcccgagctgccttcggagacccaggagaccccaggccccgccctgtgcagccctctgaggaagtcacctctgaccctcgaagatttcaagttcctggcggtgctgggccggggtcattttgggaaggtgctcctctccgaattccggcccagtggggagctgttcgccatcaaggctctgaagaaaggggacattgtggcccgagacgaggtggagagcctgatgtgtgagaagcggatattggcggcagtgaccagtgcgggacaccccttcctggtgaacctcttcggctgtttccagacaccggagcacgtgtgcttcgtgatggagtactcggccggtggggacctgatgctgcacatccacagcgacgtgttctctgagccccgtgccatcttttattccgcctgcgtggtgctgggcctacagtttcttcacgaacacaagatcgtctacagggacctgaagttggacaatttgctcctggacaccgagggctacgtcaagatcgcagactttggcctctgcaaggaggggatgggctatggggaccggaccagcacattctgtgggaccccggagttcctggcccctgaggtgctgacggacacgtcgtacacgcgagctgtggactggtggggactgggtgtgctgctctacgagatgctggttggcgagtccccattcccaggggatgatgaggaggaggtcttcgacagcatcgtcaacgacgaggttcgctacccccgcttcctgtcggccgaagccatcggcatcatgagaaggctgcttcggaggaacccagagcggaggctgggatctagcgagagagatgcagaagatgtgaagaaacagcccttcttcaggactctgggctgggaagccctgttggcccggcgcctgccaccgccctttgtgcccacgctgtccggccgcaccgacgtcagcaacttcgacgaggagttcaccggggaggcccccacactgagcccgccccgcgacgcgcggcccctcacagccgcggagcaggcagccttcctggacttcgacttcgtggccgggggctgctagccccctcccctgcccctgcccctgcccctgcccgagagctcttagtttttaaaaaggcctttgggatttgccgg

SEQ ID NO: 1900 - protein, 942 aa, Homo sapiens
  ref <308>: DATABASE ACCESSION NUMBER: Refseq / XP_031273
  ref <309>: DATABASE ENTRY DATE: 2002-08-01
MASDAVQSEPRSWSLLEQLGLAGADLAAPGVQQQLELERERLRREIRKELKLKEGAENLRRATTDLGRSLGPVELLLRGSSRRLDLLHQQLQELHAHVVLPDPAATHDGPQSPGAGGPTCSATNLSRVAGLEKQLAIELKVKQGAENMIQTYSNGSTKDRKLLLTAQQMLQDSKTKIDIIRMQLRRALQAGQLENQAAPDDTQGSPDLGAVELRIEELRHHFRVEHAVAEGAKNVLRLLSAAKAPDRKAVSEAQEKLTESNQKLGLLREALERRLGELPADHPKGRLLREELAAASSAAFSTRLAGPFPATHYSTLCKPAPLTGTLEVRVVGCRDLPETIPWNPTPSMGGPGTPDSRPPFLSRPARGLYSRSGSLSGRSSLKAEAENTSEVSTVLKLDNTVVGQTSWKPCGPNAWDQSFTLELERARELELAVFWRDQRGLCALKFLKLEDFLDNERHEVQLDMEPQGCLVAEVTFRNPVIERIPRLRRQKKIFSKQQGKAFQRARQMNIDVATWVRLLRRLIPNATGTGTFSPGASPGSEARTTGDISVEKLNLGTDSDSSPQKSSRDPPSSPSSLSSPIQESTAPELPSETQETPGPALCSPLRKSPLTLEDFKFLAVLGRGHFGKVLLSEFRPSGELFAIKALKKGDIVARDEVESLMCEKRILAAVTSAGHPFLVNLFGCFQTPEHVCFVMEYSAGGDLMLHIHSDVFSEPRAIFYSACVVLGLQFLHEHKIVYRDLKLDNLLLDTEGYVKIADFGLCKEGMGYGDRTSTFCGTPEFLAPEVLTDTSYTRAVDWWGLGVLLYEMLVGESPFPGDDEEEVFDSIVNDEVRYPRFLSAEAIGIMRRLLRRNPERRLGSSERDAEDVKKQPFFRTLGWEALLARRLPPPFVPTLSGRTDVSNFDEEFTGEAPTLSPPRDARPLTAAEQAAFLDFDFVAGGC

SEQ ID NO: 1901 - DNA, 564 bp, Rattus norvegicus
  ref <308>: DATABASE ACCESSION NUMBER: EMBL / D26500
  ref <309>: DATABASE ENTRY DATE: 1999-01-21
aggtgctacatcactctcactcagtctctacacttgaccatgagtggggctccagccggacctgcaggcacaggcaagacagagaccaccaaggacctgggccgagcactgggcatcatggtctatgtgtttaactgttccgagcagatggactacaagtcctgtggcaacatctacaaaggcctggctcagactggtgcctggggctgttttgatgaatttaaccgaatctctgtggaggtcttgtcagtggtggctgtgcaggtgaaaagcatccaggacgcaatcagagacaagaagcagaggttcagcttccttggggaggagattagccttgacccttctgtgggcatcttcatcactatgaacccgggctatgctggccgcacagaactgccagaaaacctcaaggccctcttcaggccctgtgcaatggtagttccagactttgagctgatctgtgagattatgctggtagcagaaggattcattgaagcccgattgctggccaggaagttcattaccctttaccggctgtgtaaagaacttctctccaaacaggat

SEQ ID NO: 1902 - protein, 188 aa, Rattus norvegicus
  ref <308>: DATABASE ACCESSION NUMBER: SWISS-Prot / BAA05508
  ref <309>: DATABASE ENTRY DATE: 2001-12-01
RCYITLTQSLHLTMSGAPAGPAGTGKTETTKDLGRALGIMVYVFNCSEQMDYKSCGNIYKGLAQTGAWGCFDEFNRISVEVLSVVAVQVKSIQDAIRDKKQRFSFLGEEISLDPSVGIFITMNPGYAGRTELPENLKALFRPCAMVVPDFELICEIMLVAEGFIEARLLARKFITLYRLCKELLSKQD

SEQ ID NO: 1903 - DNA, 13748 bp, Homo sapiens
  ref <308>: DATABASE ACCESSION NUMBER: Refseq / NM_001372
  ref <309>: DATABASE ENTRY DATE: 2001-06-29
agcagaggagtgagtcctggccgcgtccccgtcgctagggaaaccgatgcagctggaggccgcgcgcgatgcggctcgcggaggagcgggccgcgctcgcggcggagaacgcggatggggaacccggcgccgaccgacgactgcgactcctggggacctacgtggccatgagcctgcggccggctgcgggcgcctgggagcgttgcgcggggagtgctgaggcggagcagctgctccaggccttcctgggccgcgatgctgccgaggggccgcggccgctgctggtggtgcggcccgggcccaggggcctggcaatacgccccgggctggaggtgggacctgagtcgggcctggctggcgctaaggcgctttttttccttcgcaccgggcccgagcctccagggcccgacagcttccgcggcgcagtggtctgcggggacctgcccgcggcacctctggagcacctagccgcgctgttctcggaggttgttctacccgtcctggccaatgagaagaatcgcctaaactggccccacatgatatgtgaggatgtcaggcggcacgcccacagcctccaatgtgacctctcagttatacttgagcaagtgaagggaaaaactttgctgcctcttccagcaggctcagaaaaaatggagtttgcggattccaaaagtgagacagtcttggattctatagataagtcagtcatctatgccattgagtctgcagtgatcaaatggagctaccaagtccaggtggtactcaagagagagtcttcccagccactcttacaaggggagaatcccacccctaaggtggagttggagttctggaagagcaggtatgaagatctgaaatacatctataatcaactgagaacaataacggtgaggggcatggccaagctcctggacaagcttcagagtagctactttccagctttcaaagccatgtacagagatgttgttgcagctctagcagaggcacaggacatccatgtgcacctgataccgctccagcgccacctggaagctctggagaatgcagaatttccggaggtgaagccccagctgcggcccctgctccacgtggtctgtctgatttgggccacatgcaagtcctaccgctccccgggaaggctgactgtgctgctccaggagatttgcaaccttctcatccagcaggcctctaattatctcagcccagaagacctgctgagaagtgaggtagaagaaagtcagagaaaactgcaagtggtctcagacactttgagcttcttcaagcaagagtttcaggacagaagggagaatctccacacttacttcaaagagaaccaggaagtcaaggaatgggatttccagtcttctttggtctttgtgcgattggatggcttcctgggacgactgcacgtggtggagggtcttctgaagacggccctggatttccacaaactgggaaaggtggagttcagcggcgtcagagggaatgctctgagtcagcaggtccagcaaatgcatgaagaatttcaagagatgtacaggcttctctcaggatcctcctccgactgcctgtacctccaaagcacggactttgaaaatgacgtctctgaatttaaccagaaagtagaagatcttgaccgaagattggggactatctttattcaagcttttgatgatgcacctggcttggagcatgcctttaagctgctagacatagcaggaaacctccttgaaagaccgctggtagcgagggatacatctgataaatacctggtcctcatccaaatgttcaacaaagatctggatgcagtgaggatgatctacagtcagcacgtccaggaggaagcagaacttgggttctccccggtgcacaagaacatgcccaccgtggctggcggcctccgctgggcacaggagctgaggcagcgcatccagggtcctttcagcaactttggacgcatcacacacccttgcatggaatctgcagaaggaaagcgaatgcaacaaaaatatgaagatatgctgtcattgctagaaaagtatgagacaagactttatgaggattggtgccggacagtatcagagaagtcacagtacaatctttcccaaccacttctaaaacgtgacccagagacgaaggagatcactatcaactttaacccacagctgatttcagtgctgaaagaaatgagctatcttgaacccagagagatgaaacacatgcctgagacagcagcagccatgttctcctccagggatttctatcggcagcttgtggctaatttagagttgatggcaaattggtacaacaaggttatgaaaactctgctggaggtggaatttccattagtggaggaagagctgcaaaatattgatctccgcctcagagcagcagaggagactttgaactggaaaacagaaggcatttgcgattatgtcactgaaatcaccagtagtattcatgatcttgaacaaagaattcagaaaactaaagacaatgtggaagagatccaaaacatcatgaaaacatgggtgactccaatatttaagacaaaagatggaaaaagggaatcccttctttctctggatgatcggcatgatcgaatggaaaaatattacaatctcatcaaggaatctggccttaagatccacgcccttgttcaggaaaacctgggtctattttcagcagacccaacctccaatatctggaagacttatgttaactctattgacaatttgttgctgaatggattctttcttgccattgagtgctccctcaagtatcttctggaaaatactgagtgtaaggcaggacttaccccaatatttgaagcacaactgagtctagccatcccagagctagttttctatccgtctctggagtctggagtgaaggggggtttctgtgacattgttgagggtctcatcaccagcatttttaggataccatctctggtgccacggctttccccacaaaatggctctcctcactatcaggtcgacctggacggtataccagatttggcaaacatgcggcgcacactcatggagagagtccagagaatgatgggcctctgctgtggctatcagagcaccttcagccagtattcgtacctctatgtggaggaccggaaggaggttctgggtcagtttctgctgtacgggcacatcctcactccggaagaaattgaagaccatgtggaagatggcatcccagagaaccctcccctcctttctcagtttaaagtgcaaatcgactcctatgaaacgctctatgaagaggtgtgcaggctggaacccatcaaggtgtttgacggctggatgaaaattgatattcgaccctttaaggcatctctgctgaatattattaagaggtggagcctcctgttcaaacagcatcttgtggaccacgtcactcacagcttggccaacctggacgcgtttataaagaagagtgagagcggcttactcaagaaagttgaaaaaggagatttccaaggcttggttgagatcatgggacaccttatggctgttaaagaacggcagagtaacactgatgagatgtttgagcccttaaagcagactattgaattgctgaagacctatgaacaagaattgccagaaacagtgtttaagcagctggaggagctgcctgagaaatggaacaacataaaaaaggtggccattactgtgaagcagcaggtggccccactgcaggcaaatgaagtgacactcctccgccagaggtgcacagccttcgatgcagaacagcagcaattctgggagcaattccacaaagaagccccgttcaggtttgatagcatccaccctcatcaaatgctggatgccaggcacatcgagatccagcagatggaatccactatggcctccatttctgagtctgccagcttatttgaagtcaatgtccctgactataagcagctgaggcagtgcaggaaggaggtctgccagctgaaggagctctgggacaccattggaatggtgacctccagcatccatgcctgggagaccacaccctggaggaatatcaacgtggaagccatggagttggagtgcaaacagtttgcccggcatatccgaaacctggacaaggaggtcagggcctgggatgcattcacaggcctggaaagcactgtgtggaacacgctgagctccctgagggcagtagctgagctgcagaatccagccatccgggagcggcactggaggcagctgatgcaggccaccggtgtgagcttcactatggaccaggacaccaccctagcgcacctgctgcagctccagctgcaccactatgaggatgaggtccggggcattgtggacaaagctgcaaaagagatgggtatggagaaaaccttaaaggagctgcagactacctgggctggcatggaattccagtatgagccccacccacggaccaatgtccccctcctgtgctctgatgaggacctcatagaggttctggaggataatcaagttcaacttcagaacctggtgatgtccaagtatgttgctttcttcttggaggaggtgtcgggctggcagaagaagctgtccacagtggacgctgtcatctctatctggtttgaagtgcagcgaacatggactcacctggaaagcatattcactggatctgaagatattcgggcacagctaccccaggattctaaaaggtttgaaggcatcgacattgactttaaagagctagcttatgatgcccagaaaattccaaatgtagtgcaaaccaccaacaagccaggcctgtatgaaaagctggaggatattcagggcagattgtgcctgtgtgagaaggccctggcagagtacctcgacaccaagaggcttgccttcccgcggttttactttctctcctcctccgatctgttagacatcctttccaacggcacagctccacaacaggttcaacgtcacctttccaaactctttgacaacatggccaagatgcgattccagctagatgccagtggggaaccaaccaagacaagcctcggcatgtacagcaaagaagaggagtatgtggctttcagtgagccctgtgactgcagcgggcaggtagaaatatggctgaaccatgtccttggtcacatgaaggccactgtgaggcatgagatgacagaaggtgtaactgcctatgaagaaaagccgagggagcagtggctttttgaccacccagctcaggtggccctgacctgtactcagatctggtggacaacagaagtgggcatggcatttgccaggctggaggaaggctatgagagtgccatgaaggactattataagaagcaagtggcccagctcaaaacccttatcaccatgctgattggccagctctccaagggagaccggcagaagattatgactatatgcaccatcgatgtgcatgcccgggatgtggtagccaagatgattgctcagaaggtagacaatgcccaggctttcctctggctgtctcagctgcgccatcgttgggatgacgaggtcaaacactgctttgccaacatctgtgatgcccagtttttgtattcctatgagtacctgggaaacacacctcgcttggtgatcacacctttgactgacaggtgctacatcaccctcacccagtccctgcacctgaccatgagtggggctcccgcaggacctgcaggcacaggcaagaccgagaccaccaaggacctgggccgcgcactgggcatcctggtctatgtgttcaactgctcggagcagatggattacaagtcttgtggcaacatctacaaaggccttgctcagactggtgcctggggctgctttgatgagtttaatcgaatctccgtggaggtcttgtcagtggtggcagtgcaggtaaaaagcattcaagatgcgattagagataagaagcagtggttcagcttccttggggaggagatcagcctgaatccttctgtcggtatcttcatcaccatgaacccaggctatgctggccgcacagagctgccagagaatctcaagtctctcttcaggccttgtgcaatggtggttccagactttgaattgatctgtgaaatcatgctggtggcagaaggattcattgaagcccagtcattagccagaaagttcatcactctttaccagttgtgcaaagagcttctctccaaacaggatcactacgactggggcctacgggccatcaagtccgtgctggtggtggcaggatccctgaagagaggagaccctgaccggcctgaggaccaggtcctgatgcgctccttgcgggatttcaacatccccaagattgtgactgatgacatgcccatcttcatgggcctgatcggggacctctttcccgccctggatgtcccccggaggagagaccccaacttcgaagctttggttaggaaggcgatagtggatctgaagctccaggctgaggacaactttgtgctcaaggtggtccagctggaggagctcctggctgtgcggcactctgtatttgtggtgggtggcgctggtaccggcaagtcacaggtgctgaggtccttgcacaagacctatcagatcatgaaacggcgccccgtctggactgacctcaatcccaaagcagtcacaaatgatgagctctttggcatcatcaatccagccacaggagaatggaaggatggattgttctcttccatcatgcgggagcttgccaacatcacccatgatgggcccaagtggattttactggatggcgacatagatccaatgtggattgaatccctgaatactgtcatggatgataacaaggtgctgacattggccagcaatgagaggattcctctgaaccccaccatgaagctcctctttgagatcagccacctgcgcacagccactccagcaactgtctctagagcagggatcttgtacatcaacccggcagacttgggatggaaccctccagtgagcagctggattgagaagagggaaatccagacagagagagccaacttaaccattttgttcgacaagtatcttccaacctgcctagacacactcagaaccaggtttaagaagatcattcccatcccagagcagagcatggttcagatggtgtgtcaccttctggaatgtctcctgaccacggaggacatccctgcagactgccctaaggaaatttatgagcattattttgtgtttgctgccatctgggctttcggcggagcaatggtccaagatcagcttgtggactaccgggcagagttcagcaaatggtggctgactgagttcaaaacagtcaagtttccttcccaaggaaccatctttgactattacatcgacccagagaccaagaaattcgagccttggtccaagctcgtcccccagttcgaatttgaccccgagatgcccttgcaggcgtgtttggtgcacacgagtgagaccatccgtgtgtgctacttcatggagcggttgatggcgcggcagcggcctgtcatgctggtgggcacggctggcactggcaagtcggtgctggtgggagctaagctggccagccttgaccccgaggcatacctggtgaaaaacgtgccattcaactactacaccacgtcagcaatgctgcaggctgtcctggagaagcctctggaaaagaaggctggcagaaactatggccctccagggaacaagaaactcatctatttcattgatgacatgaacatgcctgaggtggatgcctacgggacggtgcagccccacaccatcatccggcagcatctggactatggccactggtatgatcggagcaagctgtccctaaaggagatcacaaatgtacagtatgtttcctgtatgaaccccacggcaggcagcttcaccatcaacccccggcttcagcgtcacttcagcgtgtttgtcctctccttcccgggggcagatgccctgtcctctatctacagcatcatcctcactcagcatctgaagctcggaaacttcccggcgtccctgcagaaatccatccccccactgatcgatctggccctcgccttccaccagaaaattgctaccaccttcctacccacaggaatcaaattccactacatcttcaacctcagagattttgccaacattttccagggcattctcttctcctcagtggaatgtgtgaaatccacatgggatcttataaggctctatctgcatgaatcaaatcgagtttatcgggataagatggtagaagaaaaggactttgatctttttgataaaatccagacagaagtgctcaagaaaacttttgatgatattgaagaccctgtggagcagacccaaagcccgaacctgtattgtcactttgcaaatggtattggggagcccaaatacatgcctgtacagtcttgggaacttttgacccagactctggtggaggccttggagaaccacaatgaagtcaacacagtgatggacctagttctctttgaggatgccatgcgccatgtctgccatatcaatcgcatcttggagtccccgcggggaaatgctctgctggttggtgtaggtgggagcggcaagcagagcctgacaaggctggcagctttcatcagctccatggatgtcttccagatcacactgcgcaaaggctaccagatccaggacttcaagatggacctggccagcctgtgtctgaaagctggagtgaagaatctcaacacagtgtttctcatgactgatgcccaagtggctgatgagaggttccttgtgctcatcaatgatcttttggcatctggggagatcccagatctctactctgatgatgaagttgaaaacatcataagcaatgtgaggaatgaagtcaagagccagggtctggttgacaacagagagaactgttggaagttctttatagatcggatccggcgacagctgaaggtgactctctgtttctcccctgtgggaaacaagctaagagtccgcagcaggaagttcccagccattgtgaactgcacagccatccactggttccacgagtggcctcagcaagcattggagtctgtcagcctccgcttcttgcagaacacagagggcattgagcccacagtaaagcagtcgattagcaaattcatggcctttgtccacacaagtgtcaaccaaacatcccagtcttatctgagcaatgaacagcgctacaactatacaactcccaagtcctttctggagttcatcagactctaccagagcttgttgcacaggcacagaaaagagctcaagtgcaagacagagcggttggagaacgggctgctgaagctgcatagcacctctgcccaggtggatgatctgaaagcaaagctggctgcccaggaagtagagctgaagcagaaaaatgaagatgcagacaaactgattcaggtcgtgggtgtggagactgacaaagtgagcagagagaaagccatggcagatgaagaggagcagaaggtggccgtcatcatgctagaggtgaaacagaagcagaaggactgtgaggaggacctggcaaaggctgagccagcactcacagcagcgcaggcagctctcaacaccctgaacaagaccaacctgacagagctgaagtcatttggctctccgcctctggccgtcagcaatgtcagcgctgcggtgatggtactgatggctcccaggggtagggtgcccaaggaccggagctggaaggctgctaaggtcaccatggccaaagtggatggcttcctggactcgctaataaacttcaacaaagagaacattcacgagaactgcctcaaagccatcaggccgtatctgcaagacccggagttcaatcctgagtttgtggccaccaaatcctatgcggctgcaggcctctgctcctgggtcatcaatattgtgagattttatgaggtgttctgtgatgtggaacccaagcgccaggcactgaacaaagccaccgcggacctcacagctgcccaggagaagctggctgccatcaaagccaagatcgctcaccttaatgaaaacctggcaaagctcacagccaggtttgagaaagcaacagcagacaaactcaaatgtcagcaagaagccgaagtgaccgcagtcaccatctcccttgccaaccgcctggttggaggactcgcttctgaaaacgtgaggtgggcagatgccgtgcagaacttcaaacagcaggaaaggacgttatgtggagacattttacttataacggctttcatttcctaccttggcttcttcacaaagaaataccggcagagcctcctggacagaacttggaggccctacctgagccagctgaaaactcccattccagtcaccccagccctggatcccctgaggatgctgatggatgatgctgacgtggctgcctggcagaacgagggcctcccagccgaccgcatgtccgtggagaatgccaccattctcatcaactgtgagcgctggccactcatggttgaccctcagctacaaggcatcaaatggatcaagaataaatatggtgaagatctccgggtcacgcagattggtcagaaaggctaccttcaaatcatagagcaggccctggaagctggagctgtggtgctgattgaaaatctagaggagtccattgatcctgttctgggacccctgcttgggagagaagtcattaaaaaaggacgattcattaaaattggagacaaagaatgtgaatacaatcccaagttccggctcatcctccacaccaagctggctaatcctcactaccagcctgagctgcaggctcaggccaccctgatcaacttcaccgtgaccagggatggcctggaggaccagttgctggccgctgtggtcagcatggagaggccagacttggagcagctgaagtccgatctcacaaagcagcagaatggattcaaaattaccctgaaaacgctggaagacagtcttctctctcgcctctcctccgcctctgggaacttcctgggagaaacagtgctggtggaaaacctagagatcaccaagcagactgctgccgaagttgagaaaaaggtccaggaggccaaggtgactgaagtgaaaatcaacgaggcccgagagcactaccggccagcagctgccagggcctcactgctctacttcatcatgaacgacctcagcaagatccatccaatgtaccagttttctctcaaggccttcagtatcgtcttccagaaggctgtggagagggctgctcctgacgaaagcctcagggagcgggtggccaacctaatagacagcataaccttctctgtgtaccagtacaccatccgcgggctctttgagtgtgataagctgacctaccttgcccagctcacctttcagattctcctcatgaaccgagaagtcaatgcagtggagttggatttcctgcttcgatctccagtgcagacgggcaccgccagccccgtggagttcctctcccatcaggcgtggggagctgtcaaggtactttcatcaatggaagaattctctaatctggatcgggacatagagggatctgctaagagctggaaaaagtttgtggagtccgaatgtcctgagaaagagaagctcccacaggagtggaagaacaagacagccctgcagcgcctctgcatgctgagagccatgcggcccgaccggatgacctatgctttgcgagattttgttgaagagaagttaggaagcaaatacgtggtgggaagagccctagattttgcaacctcatttgaagaatcgggaccagccactcctatgtttttcatcctgtctccaggggtggacccactgaaggatgtagaaagtcaaggaagaaaacttggatacaccttcaacaatcagaactttcacaacgtgtctttggggcaaggacaggaagtggtggctgaggctgcgctggacctcgctgccaagaaaggtcactgggttattttgcagaacattcacctggtggccaagtggctcagcaccctggagaagaagctggaggagcacagtgagaacagccacccagagttcagggtcttcatgagtgcagagccagcaccctcccctgagggccacatcatcccccagggcatcctggagaactccattaagatcaccaatgagccccccacgggcatgcatgccaacctgcacaaggccctggacaacttcactcaggacactctggagatgtgttctcgggagacggagtttaagagcatcctctttgctctttgttacttccatgcggtggtggcagaaagacgaaaatttgggccccagggatggaatcgctcatacccctttaacactggagacctcactatctctgtgaatgtcctctacaacttcctggaggccaacgcaaaggtcccctatgatgatttgcgctacctgtttggagagatcatgtatggaggccatatcacagatgactgggacagaagactctgcagaacctacctgggggaattcattcgaccagaaatgttagaaggagaactgtctttggccccagggttcccactcccaggcaacatggactacaatggttatcatcagtacatcgatgctgagctgcccccagaatccccctacctctatggcctccacccgaacgcagagattggcttcctgacccaaacctcagaaaagctcttccgcactgtgctggagctgcagcctcgggacagccaggccagagacggagcgggcgccacaagagaagaaaaggtcaaggcacttctggaagaaatattggagcgggtgacagacgagtttaacatcccagaactgatggccaaagtggaggagcgcaccccttacattgtagttgccttccaggagtgtggccggatgaatatcctcaccagagagattcagcgctcactgagggagctggagctcggcttaaagggggagctgactatgaccagccacatggagaacttacagaatgccctgtacttcgatatggtgccagagtcctgggctagacgagcctacccttccacagcaggcctggcagcctggtttccagacctcctcaacagaatcaaggagctagaggcttggacgggtgactttacaatgccctccactgtgtggctgacaggcttcttcaacccccagtcgttcctgactgccatcatgcagtccacggctcgcaagaatgagtggccactggaccagatggccctgcaatgtgacatgacgaagaagaacagagaagagtttaggagtcctcctcgggaaggggcctacatccatggcctcttcatggaaggtgcctgctgggacacacaggctgggatcattacagaggcaaagctgaaggatctgacaccccctatgcctgtgatgttcatcaaggccattcctgcagataagcaggactgccgcagtgtctattcctgtcctgtgtacaagactagtcagcggggacccacctacgtgtggactttcaacctgaagactaaggaaaacccatccaagtgggttctggctggagtagccttgcttctccagatttagcatcctgcagagccaccgagaaaataaaaaagctgggcttggaggctgcctagagggacaggtgggtgaagggtcaccacagacacttagaacggtaagaaaccatgagcactcacaattctgtagaattcctctagggaacttggagaggtgtgcctaaggtgaggctgagctgaaggaatgtgggcccaggtttcttaataaaatgatttactcttc

SEQ ID NO: 1904 - protein, 4486 aa, Homo sapiens [sequence omitted]

SEQ ID NO: 1905 - DNA, 2096 bp, Rattus norvegicus
  ref <308>: DATABASE ACCESSION NUMBER: EMBL / D28512
  ref <309>: DATABASE ENTRY DATE: 2000-04-18
gctcgtccaccctgcaacccccatgggctaccgccccccgcctcctcggctgccacccaagacaaggcagggataagcacagtgtaggatcacgtggccactatgtctggggactacgaagatgacctctgtcggcgggccctcatcctggtttcagacctctgtgcacggatccgagatgctgataccaatgacaggtgtcaagagttcaacgaactgcgaatcagaggatatccccggggtccggatgcagacatttccgtgagcctgctgtcagtcatcgtgacgttctgtggcatcgtcctcttgggtgtctctctcttcgtgtcctggaagttgtgctgggtgccctggagggacaaagggggctcagcagtgggtggtggccccctgcgcaaagacttagcccctggggttgggctggcaggcctggtaggaggtggtgggcaccatctgggagccagcctaggtggccatcccctgctgggtggtccgcaccatcatgcacacccagcccaccatccaccatttgctgaactgctggaaccaggtggccttgggggctctgagcctccagaaccttcctacctggacatggactcatatccagaggctgctgtggcctctgtggtagctgctggggtcaaaccaagccagacatcccctgagctgccttctgagggtggaacaggctctgggctgctcctgctgcctcctagtggtgggggcttgcccagtgcccagtctcatcagcaggtcacaagtctagcacccaccaccaggtacccagccctgcctcggcccctcacccagcagaccctgaccacccaagcagacccaagcagtgaggagcgaccacctgcactgcccttacccctgccaggcggagaggagaaagccaagctcatcggtcagatcaagccagagctataccagggcactggacctggtggccggcgaacgggcgggggctctggggaggcaggggcaccctgtggccgcatcagttttgcccttcggtacctctatggctctgaccagctcgtggtgcggatccttcaggccctggatctcccagcaaaggactccaatgggttctcagacccctacgtcaagatctacctgttgcctgatcgcaaaaagaagttccagaccaaggtgcacaggaagacgctgaaccctatcttcaacgagacgtttcagttttcggtacccttggccgagctggcgcagcgcaagctgcacttcagtgtctatgacttcgacagattctcgaggcacgatctcatcggccaggtggttttggacaacctgctggagcttgctgaacagccccctgaccgtccactctggagggacatcctggagggtggctcggaaaaggcagatcttggggagctcaacttctcactctgctacctccccacggccgggctcctcaccgtgaccatcatcaaagcctctaacctcaaagcaatggacctcactggtttctcagacccctacgtgaaggcctctctgatcagcgaggggcggcgtctgaagaaacggaagacctccattaagaagaacacgctgaaccccacatacaacgaggccctggtgttcgacgtggctccggagagcgtggagaacgtgggtctcagtatcgcagtggtagactatgactgcatcggccacaatgaagtgatcggggtgtgccgcgtgggcccagaggccgctgacccacatggcagagaacactgggcagagatgctggctaaccctcgcaagcctgtggagcactggcaccagctagtggaggagaagactctaagcagctttaccaagggcggcaaaggattgtcagagaaagagaattcagagtgagggtctggtctaggcctgggattggaccaggcgccctcaggacccatcccttcctgcccggactgtgaactcatctcgaagccataatgtccgagctgctggtgcggggcggcctggacctgttcctccttatcctggaggcgtgaggctaggaggcagcaggcccagctccctgtttcagggtgggaggttctcggcctccattgtctgtcttcttatccccagag

SEQ ID NO: 1906 - protein, 588 aa, Rattus norvegicus
  ref <308>: DATABASE ACCESSION NUMBER: SWISS-Prot / P40748
  ref <309>: DATABASE ENTRY DATE: 2002-06-15
MSGDYEDDLCRRALILVSDLCARIRDADTNDRCQEFNELRIRGYPRGPDADISVSLLSVIVTFCGIVLLGVSLFVSWKLCWVPWRDKGGSAVGGGPLRKDLAPGVGLAGLVGGGGHHLGASLGGHPLLGGPHHHAHPAHHPPFAELLEPGGLGGSEPPEPSYLDMDSYPEAAVASVVAAGVKPSQTSPELPSEGGTGSGLLLLPPSGGGLPSAQSHQQVTSLAPTTRYPALPRPLTQQTLTTQADPSSEERPPALPLPLPGGEEKAKLIGQIKPELYQGTGPGGRRTGGGSGEAGAPCGRISFALRYLYGSDQLVVRILQALDLPAKDSNGFSDPYVKIYLLPDRKKKFQTKVHRKTLNPIFNETFQFSVPLAELAQRKLHFSVYDFDRFSRHDLIGQVVLDNLLELAEQPPDRPLWRDILEGGSEKADLGELNFSLCYLPTAGLLTVTIIKASNLKAMDLTGFSDPYVKASLISEGRRLKKRKTSIKKNTLNPTYNEALVFDVAPESVENVGLSIAVVDYDCIGHNEVIGVCRVGPEAADPHGREHWAEMLANPRKPVEHWHQLVEEKTLSSFTKGGKGLSEKENSE

SEQ ID NO: 1907 - DNA, 2931 bp, Homo sapiens
  ref <308>: DATABASE ACCESSION NUMBER: EMBL / AL136594
  ref <309>: DATABASE ENTRY DATE: 2002-03-20
actctatgtctcctctcgttggattgtgacaccgggaggtcagggaactccaggaccttgttctctgctggattcgcagcaaccagcacagcacgtagggcgtagttggtgctggatggatgtttgttgaatgaatgaatgatgaatggctggcaccttgtctgctcatccctaactcctgttccttcatctgtgcagccctaatctttgtttcctcatctgtccatccctttatttgtgcatcctcattcttagccccttcactgcccttctccatctcttcctccttgttcatttgtccctgttctctgtcctctactccactcatgcccatctctgtccccttgacttacccagtccctgctactatctccatccctaatttctgccctcttgtctgtctactcctaattccttttccttgtccatccctaatacctgtcaccttgtccttcttcctcgaatctccatccctaatccatctgcccctaatctctgtcccctttgcccatccttccttttctcggtgtctctttccacccttatctccacacctgcccaccctgcactcccattctgtttcccatctgcacccttgccccatccctcccacacacaggaccagacggccaccatgtcaggagactacgaggatgacctctgccggcgggcactcatcctggtctcggacctctgtgcgcgggtccgagatgctgacaccaacgacaggtgccaggagttcaatgaccgaatccgaggctatccccggggtccagatgcagacatctccgtgagcctgctgtcggtcatcgtgacattctgtggcattgtccttctgggtgtctctctcttcgtgtcctggaagttgtgctgggtgccctggcgggacaagggaggctcggcagtgggcggtggccccctgcgcaaagacctaggccctggtgtcgggctggcaggcctggtaggcggaggcgggcaccacctggcggctggcctgggtggccatcctctgctgggcggcccacaccaccatgcccatgccgcccaccatccaccctttgctgagctgctggagccaggcagcctggggggttctgacacccctgagccctcctacttggacatggactcgtatccagaggctgcagcagcagcagtggccgctggggtcaaaccgagccaaacatcccctgagctgccctctgaggggggagcaggctctgggttgctcctgctgccccccagtggtgggggcttgcccagtgcccagtcacatcagcaggtcacaagcctggcacccactaccaggtacccagccctgccccgacccctcacccagcagactctgacctcccagccggaccccagcagtgaggagcgcccacctgccctgcccttacccctgcctggaggcgaggaaaaagccaaactcattgggcagattaagccagagctgtaccaggggactggccctggtggccggcggagcggtgggggcccaggctctggagaggcaggcacaggggcaccctgtggccgtatcagcttcgccctgcggtacctctatggctcggaccagctggtggtgaggatcctgcaggccctggacctccctgccaaggactccaacggcttctcagacccctacgtcaagatctacctgctgcctgaccgcaagaaaaagtttcagaccaaggtgcacaggaagaccctgaaccccgtcttcaatgagacgtttcaattctcggtgcccctggccgagctggcccaacgcaaactgcacttcagcgtctatgactttgaccgcttctcgcggcacgacctcatcggccaggtggtgctggacaacctcctggagctggccgagcagccccctgaccgcccgctctggagggacatcgtggagggcggctcggaaaaagcagatcttggggagctcaacttctcactctgctacctccccacggccgggcgcctcaccgtgaccatcatcaaagcctctaacctcaaagcgatggacctcactggcttctcagacccctacgtgaaggcctccctgatcagcgaggggcggcgtctgaagaagcggaaaacctccatcaagaagaacacgctgaaccccacctataatgaggcgctggtgttcgacgtggcccccgagagcgtggagaacgtggggctcagcatcgccgtggtggactacgactgcatcgggcacaacgaggtgatcggcgtgtgccgtgtgggccccgacgctgccgacccgcacggccgcgagcactgggcagagatgctggccaatccccgcaagcccgtggagcactggcatcagctagtggaggaaaagactgtgaccagcttcacaaaaggcagcaaaggactatcagagaaagagaactccgagtgaggggtctggcctaggcccgggatcggaccaggctccctcaggaccccatcctttcctgcccggaccgtgaattcatctccttgaagccataacgtccgagctgctggtgcggggcagccctggccctaggcttcctaaccctggaagcgagaggatgagaggaggccggcccagctccttctttcagggtgggggtcattcagcctccactgtgtctgtcttttcttccctggggctccccctcgaggcgaggggccatgcatgtctgggggacccctgccccccaaaaccctctgtctgtctctgtctctttgctgtttgtccaagactcagtgtcccgacccttgttctcgccgtgaatgtcaatgggccaatcctctctgtcctttcagacacacacacacctgtgtccaccccttctgttcgccacaccctgcgtctggccggtccccccactgctgctgctatcaacgccagaataaacacactctgtgggtctcactccaaaaaaaaaaaaaaaaaaa

SEQ ID NO: 1908 - protein, 590 aa, Homo sapiens
  ref <308>: DATABASE ACCESSION NUMBER: SWISS-Prot / Q9BQG1
  ref <309>: DATABASE ENTRY DATE: 2002-06-15
MSGDYEDDLCRRALILVSDLCARVRDADTNDRCQEFNDRIRGYPRGPDADISVSLLSVIVTFCGIVLLGVSLFVSWKLCWVPWRDKGGSAVGGGPLRKDLGPGVGLAGLVGGGGHHLAAGLGGHPLLGGPHHHAHAAHHPPFAELLEPGSLGGSDTPEPSYLDMDSYPEAAAAAVAAGVKPSQTSPELPSEGGAGSGLLLLPPSGGGLPSAQSHQQVTSLAPTTRYPALPRPLTQQTLTSQPDPSSEERPPALPLPLPGGEEKAKLIGQIKPELYQGTGPGGRRSGGGPGSGEAGTGAPCGRISFALRYLYGSDQLVVRILQALDLPAKDSNGFSDPYVKIYLLPDRKKKFQTKVHRKTLNPVFNETFQFSVPLAELAQRKLHFSVYDFDRFSRHDLIGQVVLDNLLELAEQPPDRPLWRDIVEGGSEKADLGELNFSLCYLPTAGRLTVTIIKASNLKAMDLTGFSDPYVKASLISEGRRLKKRKTSIKKNTLNPTYNEALVFDVAPESVENVGLSIAVVDYDCIGHNEVIGVCRVGPDAADPHGREHWAEMLANPRKPVEHWHQLVEEKTVTSFTKGSKGLSEKENSE

SEQ ID NO: 1909 - DNA, 1500 bp, Rattus norvegicus
  ref <308>: DATABASE ACCESSION NUMBER: EMBL / D28557
  ref <309>: DATABASE ENTRY DATE: 1999-01-21
taaccgcgccaaccgccaccgaggtgcccggagagaggcggagaggcggcatgagcgaggcgggcgaggccaccaccggcggcaccacgcacccgcaggccgcggccgacgcgcccgccgcggcgcccccggaccccgcgcctaagagcccggcggccagcggcgcgccccaggccccggcgcccgccgcgctgctcgcgggagccccggcgagagccagcccccgggcccgccccggcctcatcagcccccgcgggaagcgaggacgcgagaagaaagttctcgccaccaaagtccttggcactgtcaaatggttcaacgtcagaaatggatatggatttataaaccgaaacgacaccaaagaagatgtgtttgtacaccagactgccatcaagaagaataaccacgtcaagtatctgcgcagtgtgggggatggagaaactgtagagtttgatgtggttgaaggagaaaagggtgctgaagcagcaaatgtgactggcccagatggagttcctgtagaagggagtcgctatgctgctgatcggcgccggtacagacgcggctactatggcaggcgccgaggacctccccgtaatgctggtgagattggagagatgaaggatggagtccccgagggagcgcagctccaggttcatcggaatcccacttaccgcccaaggttccgcaggggacctgctcgcccacgacctgcccctgctattggagaggctgaagataaagaaaatcagcaagcggccaatggtccaaaccagccgtctgcccgccgtggattccgacgcccctacaactacaggcgccgcccccgtcccctcaacgctgtttcacaagatggcaaagagaccaaggcaggtgaagcaccaactgagaaccccgctccagccaccgaacagagcagtgccgagtgaccctggctcccaggcaccttcaccaccagcagggtgaccttaagaattaatgaccattcaaaaacaaggcaaaaagcacacccacgaccttaccaacaccaaagaaacatctaagcaataaaacggaagactaacaagatttggacattagaatgtttactgctattctctacgaaactaacaactgcaaagggaaggagcccgcactgtccatcaagctgcgtcccgggaacctgcacaggcagagagcagcctccccatttcagcaacctagtgctttatatttttttcctggtttttactgttttggtaatatgaattaaaagaagaaatattaataccacatggggattgccccaaccaaagaaatctgaaatatatagtaaatgctctttttcctttgttgttcattttggatgctggtgctaaacttccaagtgtcatgatttaagaagaaattttatgcccttatttattcctaggatgaggggagaacatttttgctttcttacatagctctctctgaaatgtgcagtaacaagttcctcaaaaataaaatttttaccttcaaaga

SEQ ID NO: 1910 - protein, 361 aa, Rattus norvegicus
  ref <308>: DATABASE ACCESSION NUMBER: SWISS-Prot / Q62764
  ref <309>: DATABASE ENTRY DATE: 2000-05-30
MSEAGEATTGGTTLPQAAADAPAAAPPDPAPKSPAASGAPQAPAPAALLAGSPGGDAAPGPAPASSAPAGSEDAEKKVLATKVLGTVKWFNVRNGYGFINRNDTKEDVFVHQTAIKKNNPRKYLRSVGDGETVEFDVVEGEKGAEAANVTGPDGVPVEGSRYAADRRRYRRGYYGRRRGPPRNYAGEEEEEGSGSSEGFEPPAADGQFSGARNQLRRPQYRPPYRQRRFPPYHVGQTFDRRSRVFPHPNRMQAGEIGEMKDGVPEGAQLQVHRNPTYRPRFRRGPARPRPAPAIGEAEDKENQQAANGPNQPSARRGFRRPYNYRRRPRPLNAVSQDGKETKAGEAPTENPAPATEQSSAE

SEQ ID NO: 1911 - DNA, 419 bp, Homo sapiens
  misc_feature (1)..(419): n=a, c, g or t
  ref <308>: DATABASE ACCESSION NUMBER: EMBL / BE122757
  ref <309>: DATABASE ENTRY DATE: 2000-10-27
accggcagcggcggttcccgccttaccacgtgggacagacctttgaccgtcgctcacgggtcttaccccatcccaacagaatacaggctggtgagattggagagatgaaggatggagtcccagagggagcacaacttcagggaccggttcatcgaaatccaacttaccgcccaaggtacacatctctctcagccgcagaaatgaagacatctttcaccagccgcatggctctgtccaaggacagcggaacatgctccacattctgcatgttcttaaaaccaacctggttgtcaagcangggctgtagcatggcacttgctgagcctccagccttgaaggantctctctggtaagaccctactggatcaaagctgtntacagccccctttccttcttcatcaattcaccgatgatttttt

SEQ ID NO: 1912 - protein, 241 aa, Homo sapiens
  ref <308>: DATABASE ACCESSION NUMBER: SWISS-Prot / P20618
  ref <309>: DATABASE ENTRY DATE: 2002-06-15
MLSSTAMYSAPGRDLGMEPHRAAGPLQLRFSPYVFNGGTILAIAGEDFAIVASDTRLSEGFSIHTRDSPKCYKLTDKTVIGCSGFHGDCLTLTKIIEARLKMYKHSNNKAMTTGAIAAMLSTILYSRRFFPYYVYNIIGGLDEEGKGAVYSFDPVGSYQRDSFKAGGSASAMLQPLLDNQVGFKNMQNVEHVPLSLDRAMRLVKDVFISAAERDVYTGDALRICIVTKEGIREETVSLRKD

SEQ ID NO: 1913 - DNA, 4469 bp, Rattus norvegicus
  ref <308>: DATABASE ACCESSION NUMBER: EMBL / D29683
  ref <309>: DATABASE ENTRY DATE: 2000-02-01
cgtgcggtcggagcgtagagctcagcgcagagcaccgggagccggagccttagcgggaggtgcatccaaagcccggccgttcggagcccgcgagcgatgatgtcatcctacaagcgggccacgctggacgaagaggatctggtggactcactctccgagggcgatgtgtaccccaatggcctacaggtgaacttccgcagcccccggagcggacagaggtgctgggcagctcggacctcggtggagaagcggctggtggttctggtgacgcttctggcagcagggctggtggcctgcctggcagccctaggcatccagtaccggacaagaacgcctccggtatgtctgactgaggcctgtgtctcagtgaccagctccatcctaaactccatggaccccacggtagacccctgccaggacttcttcagctacgcctgtggtggctggatcaaggccaaccccgttcccgacggtcactcacgctgggggaccttcagcaacctctgggagcacaaccaagccatcattaagcatctgctggaaaattccacggccagcgcgagcgaggcagagaaaaaggcgcaagtgtactaccgtgcgtgtatgaacgaaactaggatcgaggagcttcgggccaagcccctgatggagctgattgagaagctcggaggttggaatatcacaggaccctgggccaaggacaacttccaggacacgctgcaggtggtcacagcgcactaccgcacctcacccttcttctctgtctatgtcagtgccgactccaagaactccaacagcaatgtgatccaggtggaccagtccggccttggcttgccctccagagactattacctgaacaagacggaaaatgaaaaggtactgactggctatctgaactacatggtccagctggggaaactgctgggtggtggggacgaggactccatccggccccagatgcagcagatcctggattttgagaccgctctggccaacatcaccatcccccaggagaagcgccgggatgaagagctcatctaccacaaagtcacggctgctgagctgcagaccttggcacccgccatcaactggttaccctttctgaatgccattttttacccagtggagatcaatgagtctgagcccatcgtggtctacgacaaggaatacctcagacaagtctccacactcatcaacagcaccgacaaatgcctgctcaacaactacatgatgtggaacctggtacggaaaacaagctcctttctcgaccagcgctttcaggatgccgatgagaagttcatggaggttatgtacgggacaaagaagacctgtcttccccgctggaagttttgcgtgagtgacacagaaaacaacctgggctttgccctgggccccatgtttgtgaaagcaacctttgcggaggacagcaagaacatagccagcgagatcatcctggagatcaagaaggcattcgaggagagcctgagcaccctgaaatggatggatgaagatactcggaggtcagccaaggagaaggcggacgccatctacaacatgataggctaccccaacttcatcatggaccccaaggagctggacaaagtgttcaatgactacacagcagttcccgatctctactttgagaacgccatgcgatttttcaacttctcattgagggtcacagccgaccagctcaggaaagcccccaacagagatcagtggagtatgaccccgcccatggtgaacgcctactactcgcccaccaagaacgagattgtgtttccagctggaatcctgcaggcgccattttatacccgctcttcgcccaacgccttgaactttggtggtatcggggtcgttgtggggcacgagctgactcatgctttcgacgatcaaggccgggagtatgacaaggatgggaacctccggccctggtggaagaactcgtcggtggaggcattcaagcagcagaccgagtgcatggtacagcagtataacaactacagtgtgaacggagagcccgtgaatgggcggcacaccctcggggagaacatcgcggacaacgggggactcaaggcagcctaccgggcgtaccagaactgggtaaagaagaacggagctgagcagatactgcccaccctgggtctcaccagcaaccagctcttcttcctgggattcgcacaggtctggtgctcggtccgcacaccagagagctcccacgaaggcctcatcaccgatccgcacagcccctcccgcttccgggtcatcggctcactctccaactccaaggagttctcagaacacttccgctgcccgctcggctcccccatgaaccctcgccacaaatgcgaagtctggtaagggctgaagcgcagagaacacaggtggaagaagggaaggggcctgcagccagctcccgggaacagggccgcgctgtcaccctccttccagcccctcggccgagggccccttccccaccctggagggtatgcagccatcttgtctaagcctatgccagaggctcagcactggaagccaacatttgacccccttcgaagctccagcatcccagacacccttgagtgatgctataccgggcctttgggtgtgtcaagctggtggcttgccagccctgggcctcacactgacaatggcagtgggacaggaccctttgccacgtccaatgccagatataccacaataccactgtgtcaaatgctttaaagatatattttttggggagactattttttaagcattatggaatacactggaaatcttcagggaaaatgcatttaaaacacttttttttaaaaaaagattagtatatttattatgttctctcttttttttctaaacaacctgcggacaaaggaaaccccactgattgaccccaggggaccccaggctgttgagcaggccaccagtttgagcactgctttagcccattgttggtgtaattgcttgtgcagtcaggagatgtaggggccaggcagaaggggtggccagctgaagggcctgatttatgagcatggccttctctgtcctgtctccggagtccaaccatgggaaccccaacaaggacgggctgttacccaagttgatccctatggcagtacaaagccagagtaatggcctccgtacaaccgggggacccctgaacactctggacaacatcacaggagcccgtcggggctgagaccccacaccccatcagatgcacactattgtccaaagatgtcttgttttggtcccacctcttctggccttgggaccggttgcctctctgtagcagttctgacatcctgaagtggtcgccctctgtaccaggggaaaggggaaagagaaagcagtccagttctccctccaagctccgtagcctgtagttaccctggcttggctcctgggaccccttctctagtgccttaccccaggccacagcccctgagcccctttgaggaggcagcatttgtcttgctttctcagtggagcccccaagtgtcctgactagaagccaacaccatagccccactcccagaagccccagggtaccgtcccaaaccctacaggacagccattccacacattccccaccccacccccctctgcagcaggccaagactggaaggttcccagccccatcgggctccagggaatggcaggatgtcatccacccacagcatcacctaacagatatgtgggcctccactaagtggcgctcactgaggttttcatgactgctgtagggagcaagctcttgtgacctgtgtgtgaggagcgcagtagaagtgcccatcacagcccctggcaagtcatgcccccacatagcacaacacacacacacactcacctggaagccagagtcctccttggccaagacgcagagacagtgtagtctcggtcctgctagcgtagcgatagtcttagcactgggatggggagctgcaagcgggtgtctggcaaggttcttggtccctgtgaacacattcgaggtctcagctcttcggggaaaagtaacacaggaagcaggaaggtgctggagccacgccctgccacacaggggggaccttctgggtgggatcatctgccctttctatcccctcgccctgcttccccacaggtggccgtcctggatgccagtatctagaagcagggtcctgagctggagttagccatgcacgcattgctcagggtgtgcagggagccaaggcaggaaaacccaggctggttagggatggatgggtgcaaaagcagcatcccgacccctgtccctccagagatttgagaagggcagaattaggaagggcacccgccctcagaaagagccctcctctcaagcccggagtttccctgcaggcacaaggacatggggtttggaactggggactctatttttttgtattattgtgttttgtgctactgtagttttggtgtggcacctattataattaaaataaagtacttatacc

SEQ ID NO: 1914 - protein, 762 aa, Rattus norvegicus
  ref <308>: DATABASE ACCESSION NUMBER: SWISS-Prot / P42893
  ref <309>: DATABASE ENTRY DATE: 2002-06-15
MGSLRPPQGLGLQWSSFFLGKKGPGLTVSLPLLASSLQVNFRSPRSGQRCWAARTSVEKRLVVLVTLLAAGLVACLAALGIQYRTRTPPVCLTEACVSVTSSILNSMDPTVDPCQDFFSYACGGWIKANPVPDGHSRWGTFSNLWEHNQAIIKHLLENSTASASEAEKKAQVYYRACMNETRIEELRAKPLMELIEKLGGWNITGPWAKDNFQDTLQVVTAHYRTSPFFSVYVSADSKNSNSNVIQVDQSGLGLPSRDYYLNKTENEKVLTGYLNYMVQLGKLLGGGDEDSIRPQMQQILDFETALANITIPQEKRRDEELIYHKVTAAELQTLAPAINWLPFLNAIFYPVEINESEPIVVYDKEYLRQVSTLINSTDKCLLNNYMMWNLVRKTSSFLDQRFQDADEKFMEVMYGTKKTCLPRWKFCVSDTENNLGFALGPMFVKATFAEDSKNIASEIILEIKKAFEESLSTLKWMDEDTRRSAKEKADAIYNMIGYPNFIMDPKELDKVFNDYTAVPDLYFENAMRFFNFSLRVTADQLRKAPNRDQWSMTPPMVNAYYSPTKNEIVFPAGILQAPFYTRSSPNALNFGGIGVVVGHELTHAFDDQGREYDKDGNLRPWWKNSSVEAFKQQTECMVQQYNNYSVNGEPVNGRHTLGENIADNGGLKAAYRAYQNWVKKNGAEQILPTLGLTSNQLFFLGFAQVWCSVRTPESSHEGLITDPHSPSRFRVIGSLSNSKEFSEHFRCPLGSPMNPRHKCEVW

SEQ ID NO: 1915 - DNA, 2720 bp, Homo sapiens
  ref <308>: DATABASE ACCESSION NUMBER: EMBL / Z35307
  ref <309>: DATABASE ENTRY DATE: 1995-03-31
cgcccccccggtgtccgccctgctgtcggcgctggggatgtcgacgtacaagcgggccacgctggacgaggaggacctggtggactcgctctccgagggcgacgcataccccaacggcctgcaggtgaacttccacagcccccggagtggccagaggtgctgggctgcacggacccaggtggagaagcggctggtggtgttggtggtacttctggcggcaggactggtggcctgcttggcagcactgggcatccagtaccagacaagatccccctctgtgtgcctgagcgaagcttgtgtctcagtgaccagctccatcttgagctccatggaccccacagtggacccctgccatgacttcttcagctacgcctgtgggggctggatcaaggccaacccagtccctgatggccactcacgctgggggaccttcagcaacctctgggaacacaaccaagcaatcatcaagcacctcctcgaaaactccacggccagcgtgagcgaggcagagagaaaggcgcaagtatactaccgtgcgtgcatgaacgagaccaggatcgaggagctcagggccaaacctctaatggagttgattgagaggctcgggggctggaacatcacaggtccctgggccaaggacaacttccaggacaccctgcaggtggtcaccgcccactaccgcacctcacccttcttctctgtctatgtcagtgccgattccaagaactccaacagcaacgtgatccaggtggaccagtctggcctgggcttgccctcgagagactattacctgaacaaaactgaaaacgagaaggtgctgaccggatatctgaactacatggtccagctggggaagctgctgggcggcggggacgaggaggccatccggccccagatgcagcagatcttggactttgagacggcactggccaacatcaccatcccacaggagaagcgccgtgatgaggagctcatctaccacaaagtgacggcagccgagctgcagaccttggcacccgccatcaactggttgccttttctcaacaccatcttctaccccgtggagatcaatgaatccgagcctattgtggtctatgacaaggaataccttgagcagatctccactctcatcaacaccaccgacagatgcctgctcaacaactacatgatctggaacctggtgcggaaaacaagctccttccttgaccagcgctttcaggacgccgatgagaagttcatggaagtcatgtacgggaccaagaagacctgtcttcctcgctggaagttttgcgtgagtgacacagaaaacaacctgggctttgcgttgggccccatgtttgtcaaagcaaccttcgccgaggacagcaagagcatagccaccgagatcatcctggagattaagaaggcatttgaggaaagcctgagcaccctgaagtggatggatgaggaaacccgaaaatcagccaaggaaaaggccgatgccatctacaacatgataggataccccaacttcatcatggatcccaaggagctggacaaagtgtttaatgactacactgcagttccagacctctactttgaaaatgccatgcggtttttcaacttctcatggagggtcactgccgatcagctcaggaaagcccccaacagagatcagtggagcatgaccccgcccatggtgaacgcctactactcgcccaccaagaatgagattgtgtttccggccgggatcctgcaggcaccattctacacacgctcctcacccaaggccttaaactttggtggcataggtgtcgtcgtgggccatgagctgactcatgcttttgatgatcaaggacgggagtatgacaaggacgggaacctccggccatggtggaagaactcatccgtggaggccttcaagcgtcagaccgagtgcatggtagagcagtacagcaactacagcgtgaacggggagccggtgaacgggcggcacaccctgggggagaacatcgccgacaacgggggtctcaaggcggcctatcgggcttaccagaactgggtgaagaagaacggggctgagcactcgctccccaccctgggcctcaccaataaccagctcttcttcctgggctttgcacaggtctggtgctccgtccgcacacctgagagctcccacgaaggcctcatcaccgatccccacagcccctctcgcttccgggtcatcggctccctctccaattccaaggagttctcagaacacttccgctgcccacctggctcacccatgaacccgcctcacaagtgcgaagtctggtaaggacgaagcggagagagccaagacggaggaggggaaggggctgaggacgagacccccatccagcctccagggcattgctcagcccgcttggccacccggggccctgcttcctcacactggcgggttttcagccggaaccgagcccatggtgttggctctcaacgtgacccgcagtctgatcccctgtgaagagccggacatcccaggcacacgtgtgcgccaccttcagcaggcattcgggtgctgggctggtggctcatcaggcctgggccccacactgacaagcgccagatacgccacaaataccactgtgtcaaatgctttcaagatatatttttggggaaactattttttaaacactgtggaatacactggaaatcttcagggaaaaacacatttaaacacttttttttttaagccc

SEQ ID NO: 1916 - protein, 770 aa, Homo sapiens
  ref <308>: DATABASE ACCESSION NUMBER: SWISS-Prot / P42892
  ref <309>: DATABASE ENTRY DATE: 2002-06-15
MRGVWPPPVSALLSALGMSTYKRATLDEEDLVDSLSEGDAYPNGLQVNFHSPRSGQRCWAARTQVEKRLVVLVVLLAAGLVACLAALGIQYQTRSPSVCLSEACVSVTSSILSSMDPTVDPCHDFFSYACGGWIKANPVPDGHSRWGTFSNLWEHNQAIIKHLLENSTASVSEAERKAQVYYRACMNETRIEELRAKPLMELIERLGGWNITGPWAKDNFQDTLQVVTAHYRTSPFFSVYVSADSKNSNSNVIQVDQSGLGLPSRDYYLNKTENEKVLTGYLNYMVQLGKLLGGGDEEAIRPQMQQILDFETALANITIPQEKRRDEELIYHKVTAAELQTLAPAINWLPFLNTIFYPVEINESEPIVVYDKEYLEQISTLINTTDRCLLNNYMIWNLVRKTSSFLDQRFQDADEKFMEVMYGTKKTCLPRWKFCVSDTENNLGFALGPMFVKATFAEDSKSIATEIILEIKKAFEESLSTLKWMDEETRKSAKEKADAIYNMIGYPNFIMDPKELDKVFNDYTAVPDLYFENAMRFFNFSWRVTADQLRKAPNRDQWSMTPPMVNAYYSPTKNEIVFPAGILQAPFYTRSSPKALNFGGIGVVVGHELTHAFDDQGREYDKDGNLRPWWKNSSVEAFKRQTECMVEQYSNYSVNGEPVNGRHTLGENIADNGGLKAAYRAYQNWVKKNGAEHSLPTLGLTNNQLFFLGFAQVWCSVRTPESSHEGLITDPHSPSRFRVIGSLSNSKEFSEHFRCPPGSPMNPPHKCEVW

SEQ ID NO: 1917 - DNA, 3335 bp, Rattus norvegicus
  ref <308>: DATABASE ACCESSION NUMBER: EMBL / D29766
  ref <309>: DATABASE ENTRY DATE: 1998-10-27
gtacgcgggtagcacggcctctggccgtggagcaccatgaagtacctggtgagtgtgggcgcggggccggccaggcgggcgggcggtctggaggacgtttcctgggggccccgagtgtcccgccggccgcagagttaccgggcagctcggcacgtaaacgagtccctccctcggtccgcctttcgagtccccgcagctcacggagctagcgtgacgccctccgcagcccttgggtccgggttgcctgagactcagcccgaggcggtatgcagagggactgagaaaccgagatttgctgagggctgcaaaccggcggcgagccgcgacaagaacgtgctggccaaagccctctatgacaacgtagctgagtctccggatgaactctccttccgaaagggtgacatcatgacagtgctcgagcgggacactcagggcctggatggctggtggctctgctcactgcatgggcgccagggcattgtgcctggtaaccgcctcaagattctggttggcatgtatgacaagaagccagcagcacctggaccaggcccacctgccaccccaccccagccccagcccagccttccccagggcgtccatactccagtgcctccagcttcccagtacagtcccatgctccccactgcataccaaccccaacctgacaatgtgtacctggtacccactcccagcaagactcagcaaggtctctaccaagcccctgggcccaacccacagttccagtcacccccagccaaacaaacatccacattctcaaagcaaacacctcatcactcatttcccagccctgccacagacctttaccaggtgcctccagggcctggaagtccagcccaggacatttaccaggtgccaccttccgctggcacagggcatgacatctaccaagtccctccatctttggacacccgcagctgggagggaacgaagccaccggcaaaggtggtggtacctactcgagtgggacagggctatgtgtacgaggcctcccaggcagaacaggatgagtacgacaccccgcgccacctgctagctccaggttcccaggacatctatgatgtgccccctgttcgaggactgcttcccaaccagtatggccaggaggtatatgacaccccgcctatggcagtcaaaggccccaatggccgagacccgttgttggatgtgtatgacgtgccccctagtgtggagaaaggcctgccgccgtccaaccatcattcggtgtatgatgttcctccttctgtgagcaaggatgtgcctgatggcccactgctgcgtgaggaaacatatgatgtaccccctgccttcgccaaacccaagccttttgatccgacccgacatccattaatcctcgctgcacctcctccggactccccaccagctgaggatgtgtatgatgtgccaccccctgctcctgacctctatgatgtgccccctggtttgcggcggcctggccctggaacactgtatgacgtgcctcgagagcgggtgctccctcctgaggtggctgatgggagtgtaattgatgatggtgtgtatgctgtgcccccaccagccgagcgagaggcgccaacagatggcaagcgcctgtcggcctctagcacgggcagcacacgcagcagccaatcggcgtcttccttggaggtagtggtgccaggtcgggagcccctggagctggaagttgctgtggagaccctggctcggctacagcagggtgtgagcaccaccgtagcccaccttctggacctggtgggcagtgccagtggccccgggggctggcgtagtacctctgagccccaggagcctcccgtgcaggacctgaaagctgcagtggccgcagttcatggggcagtacatgagctcctggagtttgcccgcagtgcagtgagcagtgccactcacacttctgaccgcactttgcacgccaagcttagccggcagctacagaagatggaggatgtgtaccagacactggtggtccatggtcaggtccttgacagtggccggggaggtccaggattcactctggacgacctggaccgcctggtggcctgctcacgggctgtgcccgaggatgccaagcagctggcctcctttttgcatggtaatgcctcgctgcttttcagacggaccaaagcccctggccccgggcctgagggcagcagctccctgcacctcaaccccaccgataaagccagcagcatccagtcacgccctctaccctcacctccaaagttcacctcccaggactctccggatggccagtatgagaacagtgaagggggttggatggaggactatgactacgttcatctgcaggggaaggaggaatttgagaagacccagaaggaactgctggaaaagggcaacatcgtgcgacagggaaaaggccaactggagctgcagcagctgaaacagtttgagcgactggagcaggaggtgtctcgtcccatagaccatgacctggccaactggacaccagcccagccccttgtgccggggcggacagggggactggggccttcagaccgacagctgctgctcttctacttggagcagtgtgaggccaacctgaccacactgacagatgcggtggacgccttcttcaccgcagtggccaccaaccagccacccaagatctttgtggcacacagcaagtttgtcattcttagtgcacacaagcttgtgttcattggggacacactgtcacggcaggcaaaggcagctgatgtgcgaagcaaagtgacccactacagcaatctgctgtgtgacctcctgcgtggcatcgtggccaccaccaaggccgctgccctgcagtacccatccccatctgctgcccaggacatggtagacagggtcaaggagctaggccacagcactcagcagttccgccgtgtcctgggccagctggctgccgcctgaaagcagaagactgggctgtgaggctggggagtgggtagcggtggtgtgagctacccaggcgctcgtcttgaagtggagatcctgcaggtttggggacaggtaaccccagctctgctttgggcctggtgccctcaactgtccagggatttgtacatatttatatcaaggcaggatgcagaatgcctcctcggagaggctgaggagccccgtcagagtggaccatgggctgggatcaccagggttggggcacatgggctccagtccacagggctccctgggacaggaagtacagtgtggtgtacacctctgcaccaagaaaacctaaagaactatttttcactattgatttttttccaatcatttgactaatagtctacatttaataaaatttt

SEQ ID NO: 1918 - protein, 968 aa, Rattus norvegicus
  ref <308>: DATABASE ACCESSION NUMBER: SWISS-Prot / Q63767
  ref <309>: DATABASE ENTRY DATE: 2002-06-15
MKYLVSVGAGPARRAGGLEDVSWGPRVSRRPQSYRAARHVNESLPRSAFRVPAAHGASVTPSAALGSGLPETQPEAVCRGTEKPRFAEGCKPAASRDKNVLAKALYDNVAESPDELSFRKGDIMTVLERDTQGLDGWWLCSLHGRQGIVPGNRLKILVGMYDKKPAAPGPGPPATPPQPQPSLPQGVHTPVPPASQYSPMLPTAYQPQPDNVYLVPTPSKTQQGLYQAPGPNPQFQSPPAKQTSTFSKQTPHHSFPSPATDLYQVPPGPGSPAQDIYQVPPSAGTGHDIYQVPPSLDTRSWEGTKPPAKVVVPTRVGQGYVYEASQAEQDEYDTPRHLLAPGSQDIYDVPPVRGLLPNQYGQEVYDTPPMAVKGPNGRDPLLDVYDVPPSVEKGLPPSNHHSVYDVPPSVSKDVPDGPLLREETYDVPPAFAKPKPFDPTRHPLILAAPPPDSPPAEDVYDVPPPAPDLYDVPPGLRRPGPGTLYDVPRERVLPPEVADGSVIDDGVYAVPPPAEREAPTDGKRLSASSTGSTRSSQSASSLEVVVPGREPLELEVAVETLARLQQGVSTTVAHLLDLVGSASGPGGWRSTSEPQEPPVQDLKAAVAAVHGAVHELLEFARSAVSSATHTSDRTLHAKLSRQLQKMEDVYQTLVVHGQVLDSGRGGPGFTLDDLDRLVACSRAVPEDAKQLASFLHGNASLLFRRTKAPGPGPEGSSSLHLNPTDKASSIQSRPLPSPPKFTSQDSPDGQYENSEGGWMEDYDYVHLQGKEEFEKTQKELLEKGNIVRQGKGQLELQQLKQFERLEQEVSRPIDHDLANWTPAQPLVPGRTGGLGPSDRQLLLFYLEQCEANLTTLTDAVDAFFTAVATNQPPKIFVAHSKFVILSAHKLVFIGDTLSRQAKAADVRSKVTHYSNLLCDLLRGIVATTKAAALQYPSPSAAQDMVDRVKELGHSTQQFRRVLGQLAAA

SEQ ID NO: 1919 - DNA, 3208 bp, Homo sapiens
  ref <308>: DATABASE ACCESSION NUMBER: EMBL / AJ242987
  ref <309>: DATABASE ENTRY DATE: 2000-03-02
gaggcggcagctgcgcggcggcaccggggcggctgcggcgcgctcggagccccgaggcacgcggcccgggcagctcggtgtgcgcccccgcgagagccgggccccaggcccgccggacaccatgaaccacctgaacgtgctggccaaagcgctctatgacaatgtggccgagtccccggatgagctctccttccgcaagggtgacatcatgacggtgctggagcaggacacgcagggcctggacggctggtggctctgctcgctgcatgggcgccagggcatcgtgcctgggaaccgcctcaagatcttggtgggcatgtatgataagaagccagcagggcctggctccggccctcccgccaccccggcccagcctcagcctggcctccatgccccagcgcctccggcctcccagtacacgcccatgctccccaacacctaccagccccagccagacagcgtctacctggtgcccactcccagcaaggctcagcaaggcctctaccaagtcccgggtcccagccctcagttccagtctcccccagccaagcagacatccaccttctcgaagcagacaccccatcacccgtttcccagcccggccacagacctgtaccaggtgcccccagggcctggaggccctgcccaggatatttaccaggtgccaccttctgccgggatggggcatgacatctaccaggtccccccgtccatggacacacgcagctgggagggcacgaagcccccggcaaaggtggtggtgcccacccgcgtggggcagggctatgtatacgaggccgcccagccggagcaggacgagtacgacatcccgcgacacctgctggccccggggccacaggacatctatgatgtgcccccggttcgggggctgcttcccagccagtatggccaggaggtgtatgacacaccccccatggctgtcaagggtcccaatggccgagacccgttgctggaggtgtatgacgtgccccccagtgtggagaagggcctgccaccgtccaaccaccacgcagtctacgacgttcctccatcggtgagcaaggatgtgcccgatggcccactgctgcgtgaggagacctacgatgtgccccccgccttcgccaaggccaagccctttgacccggcccgcaccccactggtactggctgcgccccctccagactccccgccggccgaggacgtgtatgacgtgccgcccccggctcctgacctctacgacgtgccccctggcttgcggcggcctggcccgggcaccctgtacgatgtgccccgtgaacgggtgcttcctcctgaggtggctgatggtggcgtggtcgacagtggtgtgtatgcggtgcctcccccagctgaacgtgaagccccggcagagggcaagcgcctgtcggcctccagcaccggcagcacacgcagcagccagtctgcgtcctccttggaggtggcagggccgggccgggaacccctggagctggaagttgctgtggaggccctggcacggctgcagcagggtgtgagcgccaccgttgcccaccttctggacctggcaggcagcgccggtgcgactgggagctggcgtagcccctctgagccacaggagccgctggtgcaggacctgcaggctgctgtggccgctgtccagagtgccgtccacgagctgttggagtttgcccgcagcgcggtgggcaatgctgcccacacatctgaccgtgccctgcatgccaagcttagccggcagctgcagaagatggaggacgtgcaccagacgctggtggcacatggtcaggccctcgacgctggccggggaggctctggagccacccttgaggacctggaccggctggtggcctgctcgcgggctgtgcccgaggacgccaagcagctggcctccttcctgcacggcaatgcctcactgctcttcagacggaccaaggccactgccccggggcctgaggggggtggcaccctgcaccccaaccccactgacaagaccagcagcatccagtcacgacccctgccctcaccccctaagttcacctcccaggactcaccagatgggcagtacgagaacagcgaggggggctggatggaggactatgactacgtccacctacaggggaaggaggagtttgagaagacccagaaggagctgctggaaaagggcagcatcacgcggcagggcaagagccagctggagttgcagcagctgaagcagtttgaacgactggaacaggaggtgtcacggcccatagaccacgacctggccaactggacgccagcccaacccctggccccggggcgaacaggcggcctggggccctcggaccggcagctgctgctcttctacctggagcagtgtgaggccaacctgaccacactgaccaacgccgtggacgccttctttaccgccgtggccaccaaccagccgcccaagatctttgtggcgcacagcaagttcgtcatcctcagcgcccacaagctggtgttcatcggggacacactgtcacggcaggccaaggctgctgacgtgcgcagccaggtgacccactacagcaacctgctgtgcgacctcctgcgcggcatcgtggccaccaccaaggccgctgccttgcagtacccatcgccttccgcggcccaggacatggtggagagggtcaaggagctgggccacagcacccagcagttccgccgcgtcctaggccagctggcagccgcctgagggtggtgaccccaggagggaggcaggggaggggtgcggcggtcccagctccctggctcccatgtcaagagtcgctgtgccacaggcttagggacaggaccccagctctgcgtcggtcctggtgccctggatgcccaggaatctgtatatatttatggccgggcagggtgtggggccatgcctcctcaggagccgaagcccaggggccgcagtggccttccccagcatgcaccacgggcccgggttgggtcaccagacggggctggagtgtgagggtcctgcagcctgcaggacctcgtgccaccccgagggctgagcctggtcccacgagggtgccgtgtcccctgacagggccagtgcagtttggtgtgtcctccgccttaccaggagaagaacctgaagaactatttttcgttattggttttccaatcatttgactaagagtctccatttaaataaagtttttaaaaggaa

SEQ ID NO: 1920 - protein, 870 aa, Homo sapiens
  ref <308>: DATABASE ACCESSION NUMBER: SWISS-Prot / P56945
  ref <309>: DATABASE ENTRY DATE: 2002-06-15
MNHLNVLAKALYDNVAESPDELSFRKGDIMTVLEQDTQGLDGWWLCSLHGRQGIVPGNRLKILVGMYDKKPAGPGSGPPATPAQPQPGLHAPAPPASQYTPMLPNTYQPQPDSVYLVPTPSKAQQGLYQVPGPSPQFQSPPAKQTSTFSKQTPHHPFPSPATDLYQVPPGPGGPAQDIYQVPPSAGMGHDIYQVPPSMDTRSWEGTKPPAKVVVPTRVGQGYVYEAAQPEQDEYDIPRHLLAPGPQDIYDVPPVRGLLPSQYGQEVYDTPPMAVKGPNGRDPLLEVYDVPPSVEKGLPPSNHHAVYDVPPSVSKDVPDGPLLREETYDVPPAFAKAKPFDPARTPLVLAAPPPDSPPAEDVYDVPPPAPDLYDVPPGLRRPGPGTLYDVPRERVLPPEVADGGVVDSGVYAVPPPAEREAPAEGKRLSASSTGSTRSSQSASSLEVAGPGREPLELEVAVEALARLQQGVSATVAHLLDLAGSAGATGSWRSPSEPQEPLVQDLQAAVAAVQSAVHELLEFARSAVGNAAHTSDRALHAKLSRQLQKMEDVHQTLVAHGQALDAGRGGSGATLEDLDRLVACSRAVPEDAKQLASFLHGNASLLFRRTKATAPGPEGGGTLHPNPTDKTSSIQSRPLPSPPKFTSQDSPDGQYENSEGGWMEDYDYVHLQGKEEFEKTQKELLEKGSITRQGKSQLELQQLKQFERLEQEVSRPIDHDLANWTPAQPLAPGRTGGLGPSDRQLLLFYLEQCEANLTTLTNAVDAFFTAVATNQPPKIFVAHSKFVILSAHKLVFIGDTLSRQAKAADVRSQVTHYSNLLCDLLRGIVATTKAAALQYPSPSAAQDMVERVKELGHSTQQFRRVLGQLAAA

SEQ ID NO: 1921 - DNA, 3335 bp, Rattus norvegicus; identical to SEQ ID NO: 1917
  ref <308>: DATABASE ACCESSION NUMBER: EMBL / D29766
  ref <309>: DATABASE ENTRY DATE: 1998-10-27

SEQ ID NO: 1922 - protein, 968 aa, Rattus norvegicus; identical to SEQ ID NO: 1918
  ref <308>: DATABASE ACCESSION NUMBER: SWISS-Prot / Q63767
  ref <309>: DATABASE ENTRY DATE: 2002-06-15

SEQ ID NO: 1923 - DNA, 3208 bp, Homo sapiens; identical to SEQ ID NO: 1919
  ref <308>: DATABASE ACCESSION NUMBER: EMBL / AJ242987
  ref <309>: DATABASE ENTRY DATE: 2000-03-02

SEQ ID NO: 1924 - protein, 870 aa, Homo sapiens; identical to SEQ ID NO: 1920
  ref <308>: DATABASE ACCESSION NUMBER: SWISS-Prot / P56945
  ref <309>: DATABASE ENTRY DATE: 2002-06-15

SEQ ID NO: 1925 - DNA, 1310 bp, Rattus norvegicus
  ref <308>: DATABASE ACCESSION NUMBER: EMBL / D29960
  ref <309>: DATABASE ENTRY DATE: 1999-01-21
gcaggatggagatccgggtgcctgtgcagccttcttggctgcgccgtgcttcagctcctttaccgggtttttccactccgggacgcctctttgaccagcgtttcggcgaagggctgcttgaggcagagctggcttcactgtgccctgctgcgatcgcgccctactatctgcgcgcccccagtgtggcgttacccacagcccaggtgcccacggaccctgggtatttttctgtgctgctggatgtgaagcacttctcgccagaggaaatctctgtcaaggtggttggtgaccatgtggaggtccatgctcggcatgaggagcgcccagatgaacatggattcattgctcgagagttccaccgccgataccgcctgcctcctggcgtggaccctgctgcagtgacctctgcactgtctcctgagggtgttctgtctatccaggccacaccagcgtcggcccaggcctcacttccgtcaccacctgctgccaagtaggggtcccagcattacaggaccgaaccgggaagcctctttaggctcccttttaaaatgccgatctgactccactgcccagccagatgtcccaatcgctgtcaagacagcctttcccaaccacaactagatgtcctcccctgagaccttcccaacccaaaccctacctgagccttagtgacctagacacccttcctaagccctctcccagctttcaggccccacccatgacatctctctagaggcaacacaaacactactgtcaggagccaaggctcccatcagactgaccccactttgggcttctctcacactcaggctgcatttgtgagctgtagaacaccccaccgtgacagcagagtacaatgtagtcagcgctcccctccttccaatcctgtcacctaattccccacagtgatgtagactgcataggctttccacaccagaacgctcaagcctggtccaccagactccagtctctgtaacctaacactcctctgccccagcccactgtctgacttaaaactccaggcaccgaaattcttgaatactattctgacctccaattcttgggactcctattcctgacaaaccaggaaccccaaactcaaattgtatggacactccaccttctccagatgtgctagaccaatgaacaagaacctgtgagctctctgtcctggctccccatctgcagtcagatgtcttagggagcccgctccacatctgccatcctctaaggttgcaccttcactctgaacatttcctgtctccccaggccttcctgccattagttcccaataaatgcacttgagattt

SEQ ID NO: 1926 - protein, 162 aa, Rattus norvegicus
  ref <308>: DATABASE ACCESSION NUMBER: SWISS-Prot / P97541
  ref <309>: DATABASE ENTRY DATE: 2002-06-15
MEIRVPVQPSWLRRASAPLPGFSTPGRLFDQRFGEGLLEAELASLCPAAIAPYYLRAPSVALPTAQVPTDPGYFSVLLDVKHFSPEEISVKVVGDHVEVHARHEERPDEHGFIAREFHRRYRLPPGVDPAAVTSALSPEGVLSIQATPASAQASLPSPPAAK

SEQ ID NO: 1927 - DNA, 691 bp, Homo sapiens
  ref <308>: DATABASE ACCESSION NUMBER: Refseq / NM_001885
  ref <309>: DATABASE ENTRY DATE: 2001-05-15
gacccctcacactcacctagccaccatggacatcgccatccaccacccctggatccgccgccccttctttcctttccactcccccagccgcctctttgaccagttcttcggagagcacctgttggagtctgatcttttcccgacgtctacttccctgagtcccttctaccttcggccaccctccttcctgcgggcacccagctggtttgacactggactctcagagatgcgcctggagaaggacaggttctctgtcaacctggatgtgaagcacttctccccagaggaactcaaagttaaggtgttgggagatgtgattgaggtgcatggaaaacatgaagagcgccaggatgaacatggtttcatctccagggagttccacaggaaataccggatcccagctgatgtagaccctctcaccattacttcatccctgtcatctgatggggtcctcactgtgaatggaccaaggaaacaggtctctggccctgagcgcaccattcccatcacccgtgaagagaagcctgctgtcaccgcagcccccaagaaatagatgccctttcttgaattgcattttttaaaacaagaaagtttccccaccagtgaatgaaagtcttgtgactagtgctgaagcttattaatgctaagggcaggcccaaattatcaagctaataaaatatcattcagcaac

SEQ ID NO: 1928 - protein, 175 aa, Homo sapiens
  ref <308>: DATABASE ACCESSION NUMBER: SWISS-Prot / P02511
  ref <309>: DATABASE ENTRY DATE: 2002-06-15
MDIAIHHPWIRRPFFPFHSPSRLFDQFFGEHLLESDLFPTSTSLSPFYLRPPSFLRAPSWFDTGLSEMRLEKDRFSVNLDVKHFSPEELKVKVLGDVIEVHGKHEERQDEHGFISREFHRKYRIPADVDPLTITSSLSSDGVLTVNGPRKQVSGPERTIPITREEKPAVTAAPKK

SEQ ID NO: 1929 - DNA, 1984 bp, Rattus norvegicus
  ref <308>: DATABASE ACCESSION NUMBER: EMBL / D30041
  ref <309>: DATABASE ENTRY DATE: 1999-09-02
gccgcttaggaagccttcagtttggatcccaaggcctccttgatcctgcacctggagctctgttagcaccgttctttctgagtcctgtttctgcgcgtgctacgcttacgcacctgcctccttgggcactcaagctcggaactggatttccactgaccttgtatctgattttctaaaaggccttcactaaattaagactatactgtatcggaggagcctcctacatgtcctgctgccctgagctctctcaagctaggtgacagcgtgttaatgctgccaccatgaatgaggtatctgtcatcaaagaaggctggctccacaaacgtggtgaatacatcaagacctggaggccccggtacttccttctgaagagtgatggatcttttattgggtataaagagagacctgaggcccccgaccagaccctacccccccttaacaatttctctgtagcagaatgccagctgatgaagactgagaggccacgacccaacacctttgtcatacgctgcctgcagtggaccacagtcatcgagaggaccttccatgtcgactctccagatgagagggaagagtggatacgggctatccagatggtagccaacagtctgaagcagcggggccccggggaggatgccatggattacaagtgtggctcccccagtgactcttccacatctgagatgatggaggtagcggtcagcaaggcacgggccaaagtgaccatgaacgacttcgattatctcaaactcctcggcaagggcaccttcggcaaagtcattctagttcgagagaaggccactggccgctattatgccatgaagatcctgcggaaggaggtcatcattgcaaaggatgaagtcgcccacacagtcacagagagccgagtcctacagaataccaggcaccccttccttacagccctgaagtatgccttccagacccatgaccgcctgtgctttgtgatggagtatgccaacgggggcgacctgtttttccacctctctcgggagcgagtcttcacggaggatcgggcacgcttttatggtgcagagattgtgtcagctctggagtacttgcactcgacggatgtggtgtaccgcgacatcaagctggaaaaccttatgctggacaaagatggccacatcaagatcactgactttggcttgtccaaagagggcatcagtgatggggccaccatgaaaaccttctgtggtaccccggagtacttggcgcctgaggtgctagaggacaatgactacgggcgtgcagtggactggtggggactgggcgtggtcatgtacgagatgatgtgcggccgcctgcccttctacaaccaggaccacgagcgcctcttcgagctcatcctcatggaggagatccggttcccacgcacgcttgggccagaggccaagtccctgctggctggactgctcaagaaggaccccaagcagaggctcggtgggggtcccagtgatgccaaggaggtcatggagcatcggttcttcctcagcatcaactggcaggatgtggtacagaagaagctcctgccacccttcaaacctcaggtcacttcagaagtggacacaaggtactttgatgatgaattcaccgcccagtccatcacaatcacacccccagaccgatatgacagcctgggctcgctggaactggaccagcgcacacacttcccccagttctcctactcagccagcatccgagagtgagcagccctctgccaccacaggacacagcatgggcgccatccactgcctgggtggctttttaaaaaaaactttattttgcctttggtttgcgttcccttccctgtcccctcatcccatatccagtttcttcttcagttcttgctcagacttagtggtcctggcgggcctctcctccgggctcccctctgctcccagaggagtgctgggaacctgcccaaggacaggccgttgggaggatggagagtgaggttattaat

SEQ ID NO: 1930 - protein, 481 aa, Rattus norvegicus
  ref <308>: DATABASE ACCESSION NUMBER: SWISS-Prot / P47197
  ref <309>: DATABASE ENTRY DATE: 2001-10-16
MNEVSVIKEGWLHKRGEYIKTWRPRYFLLKSDGSFIGYKERPEAPDQTLPPLNNFSVAECQLMKTERPRPNTFVIRCLQWTTVIERTFHVDSPDEREEWIRAIQMVANSLKQRGPGEDAMDYKCGSPSDSSTSEMMEVAVSKARAKVTMNDFDYLKLLGKGTFGKVILVREKATGRYYAMKILRKEVIIAKDEVAHTVTESRVLQNTRHPFLTALKYAFQTHDRLCFVMEYANGGDLFFHLSRERVFTEDRARFYGAEIVSALEYLHSTDVVYRDIKLENLMLDKDGHIKITDFGLSKEGISDGATMKTFCGTPEYLAPEVLEDNDYGRAVDWWGLGVVMYEMMCGRLPFYNQDHERLFELILMEEIRFPRTLGPEAKSLLAGLLKKDPKQRLGGGPSDAKEVMEHRFFLSINWQDVVQKKLLPPFKPQVTSEVDTRYFDDEFTAQSITITPPDRYDSLGSLELDQRTHFPQFSYSASIRE

SEQ ID NO: 1931 - DNA, 3402 bp, Homo sapiens
  ref <308>: DATABASE ACCESSION NUMBER: EMBL / AK054771
  ref <309>: DATABASE ENTRY DATE: 2002-08-06
atttttgaggagtcttactctgttgagtgcagtggtgtgatctcggctcgctgcaacctctgcctcccgggttcaagcgattgtcctgcctcagcctcccgaataggtgggattacaggtgcccgccaccatgcccagctaatttttgtatttttagtagagacggggtttcatcatattggccaggctggtctcaaactcctgaccttgtgatccacccacctcagcctcccaaagtgcttggattacaggcatgagcccccgcgcccggccaagtttagaagatagtttggcagtgtccaccaaagctgagcaccagccatctgccctagctgtgtgcacaggagaagtggggacacacactcaccttagaaagtgtccccctcactcagcagcaggacttactctagccccaactggaacaacccaagtatccactgtgagaggaacagtcagatccactgtggagtgttctcacagtgggacgccacacagcagttaggaatgagctacagctacacacgacagtgtggacgcgtctcataggctaatgtcgagggaaagccgcacagaggaggtgagtccacagttcacaggtgtgtctgtgtgcagtggtacagatgggaagtagaggttaattcttgtgggggatggtcagtaaccgggaggggcacacagggccttccagggggagatgccacctcagcctcgcaagtagctgggactataggtgtgtgccaccatgcctggctaattttttttttcatattaagaaatatggagatggggtctcgctgtgttgcccaggctggtctcaaactcatgggttcaagcaatcctgccacctaagtcccccaaattgctgggattacaggtgtgagccactttgcctggctgcatatttcataattaaaggacagaaagtctagaaaaaaagaatagaagaaagctagtgcccccacgttcgaaataagaaccacagttcacaatggggacggtgggtggacagggcctggctctcggctctccctgcccagctgttcccaggtaccatgggggtgggccagagggtgaggagggttggatctggcctctctctgagcctcagagggtgaggctgtgtgtgctgggcccagcctggcatgggagggttgatgtccaggagccccgggcatctttccctggaaggaaaggctggggtggcaggaagccttgggagcatgcgcctgagatccgttgacttttccaacagctggaaaacctcatgctggacaaagatggccacatcaagatcactgactttggcctctgcaaagagggcatcagtgacggggccaccatgaaaaccttctgtgggaccccggagtacctggcgcctgaggtgctggaggacaatgactatggccgggccgtggactggtgggggctgggtgtggtcatgtacgagatgatgtgcggccgcctgcccttctacaaccaggaccacgagcgcctcttcgagctcatcctcatggaagagatccgcttcccgcgcacgctcagcctcgaggccaagtccctgcttgctgggctgcttaagaaggaccccaagcagaggcttggtggggggcccagcgatgccaaggaggtcatggagcacaggttcttcctcagcatcaactggcaggacgtggtccagaagaagctcctgccacccttcaaacctcaggtcacgtccgaggtcgacacaaggtacttcgatgatgaatttaccgcccagtccatcacaatcacaccccctgaccgctatgacagcctgggcttactggagctggaccagcggacccacttcccccagttctcctactcggccagcatccgcgagtgagcagtctgcccacgcagaggacgcacgctcgctgccatcaccgctgggtggttttttacccctaactttttacttagcctttttggtttgtgtccccacccccacctcctcaccccctttccagttcttcttcaggcccctcccagacgcaccccagcggcccctgcagcccctgcctccagcctccagcctcacctttgtgcccagactcgcatttggaagactccacctcccgcccaggcctgggctgttgggcggttggagactcaggttttaatccacacaagccccagtgaggggtgaagcatggcgcctggggcctgcctgagtttctggcctgggtgtcgtgctggtgtctgcctccgcgctgctgcatctggacgaaggctgccttctggtgggacgcgacacccggcagacagtggtgctgccttccaggccccgtggcctaggctcggagtggccaggcacggggcggtccaatcccccacccgctgtccccctatgggggcagaaaagcaataatgtccaggggcaggcaggggcccttgggagctgcagggctgggggttagggctgctccctggtgaatggagtcagatcctaggatctgtaccatggggaaccaggagtggccgggctgggtgccgcctcctggtccggcctcctccccaccaaactgtcctcaccctatggatgaggcaggaggaacatttggggccaaacctgcctgcctcccagccccgtgccttactagggcttccttccagctggccttacctcccgctggaccctgggcctggcctggccccactgggggctatgggctgggctcaccctctcctctgcgggggtggagggccaccagccttggctgttacaatcttacaccggacagtattgggccccatggacttggtcagggaggggtgggggtgggcatctctggtacctattggggtggggggcctctgaaaagggaggctcctaggcccccctcacccctccctctccccagggccccacgttctgcagccttaaggttgaacatgagtgcacgtccatgtcagtgctgtgggactcctgtgcgtgcctcggactgcgtgtgccggcgggacgcaggcacacgtgggtgtgtgtgcatgtgtgtttgtgtgagggcagcgtgtcctccagtgtgcatggtgtgtgggcttgggccccatccctggcccgagcatttcatcctgtgggggaggggtgctgacctagtgggaggagccccactgtgatccatgagctgccctgcccacgcctcccctccctgtagcaacacctctgggtgtttggagtttagcttttgtgggtttgctctccctatcccatctcctgtactacacagttcatggcagggtggggaggggtggggttggttcgggtgggtgagggtctttttcctctgtgtgcgatgttgttatctgacagttctccgtccctactggcctttctcctcgtcttcatatttgtacggtacaagcaataaagacactcatttc

SEQ ID NO: 1932 - protein, 481 aa, Homo sapiens
  ref <308>: DATABASE ACCESSION NUMBER: SWISS-Prot / P31751
  ref <309>: DATABASE ENTRY DATE: 2001-10-16
MNEVSVIKEGWLHKRGEYIKTWRPRYFLLKSDGSFIGYKERPEAPDQTLPPLNNFSVAECQLMKTERPRPNTFVIRCLQWTTVIERTFHVDSPDEREEWMRAIQMVANSLKQRAPGEDPMDYKCGSPSDSSTTEEMEVAVSKARAKVTMNDFDYLKLLGKGTFGKVILVREKATGRYYAMKILRKEVIIAKDEVAHTVTESRVLQNTRHPFLTALKYAFQTHDRLCFVMEYANGGELFFHLSRERVFTEERARFYGAEIVSALEYLHSRDVVYRDIKLENLMLDKDGHIKITDFGLCKEGISDGATMKTFCGTPEYLAPEVLEDNDYGRAVDWWGLGVVMYEMMCGRLPFYNQDHERLFELILMEEIRFPRTLSPEAKSLLAGLLKKDPKQRLGGGPSDAKEVMEHRFFLSINWQDVVQKKLLPPFKPQVTSEVDTRYFDDEFTAQSITITPPDRYDSLGLLELDQRTHFPQFSYSASIRE

SEQ ID NO: 1933 - DNA, 2117 bp, Rattus norvegicus
  ref <308>: DATABASE ACCESSION NUMBER: EMBL / D30647
  ref <309>: DATABASE ENTRY DATE: 1999-01-21
aattccgcggcggctttggagatgcagtcggcccggatgaccccgagtgtggggcgacaactgctgcggctgggggcccgaagctcgcggtctgctgcgcttcagggacaaccccggcctacctctgcccagcgactttatgccagtgaggccactcaggcagttctggaaaagccagagaccctctcctctgatgcttccaccagagaaaaacctgccagggcggaatctaagtcttttgctgtgggaatgttcaaaggccagcttaccaccgaccaggtgttcccatacccatctgtgctcaatgaaggacagacacaatttctcaaagagctggtgggaccagtggcccggttctttgaagaagtgaatgaccctgccaagaatgactccttggagaaggtggaggaggacactttgcagggactcaaagaactgggggcatttggtctgcaagtacccagcgagctgggtggtttgggcctctctaatacccagtacgctcgcttggcagagattgtgggcatgcatgaccttggtgttagcgttaccctgggagcccatcagagcatcggtttcaaaggcatcttgctctatggcacaaaggcccagaaggaaaaatacctccccagagtggcatccgggcaggctttggcggctttctgcctgactgagccctcgagcgggtccgatgtggcctctatccgaagctcagctgtacctagcccctgtggaaagtattatactctcaacggaagcaagatctggatcagtaatgggggtctggcagacattttcactgtctttgccaaaacgccaattaaagatgcagccacgggggccgtgaaagagaagatcacagctttcgtagtggaacggagctttggaggggttacccatgggctccccgaaaagaagatgggcatcaaggcatctaacacatcagaggtgtactttgatggagtcaaggtgccagcagagaatgtgctaggagaagtgggagatggcttcaaggttgctgtcaacatcctcaacaacggaagatttgggatggctgcaaccctagcaggcaccatgaaagccatcattgccaaggcggttgatcatgctactaaccgtacccagtttggggacaaaattcacaactttggggtgatccaggaaaagctggctcggatggctattctgcagtatgtgactgagtccatggcttacatgctgagtgccaacatggaccagggattcaaagacttccagatagaagctgccatcagcaaaatctttggctcggaggcggcctggaaagtgacagatgagtgcatccagataatggggggcatgggcttcatgaaggaaccaggggtagagcgtgtgctccgagatattcgaatcttccggatctttgaagggacaaatgacattcttcgactgtttgtggctctacaaggctgcatggacaaaggaaaggaactcacgggacttggtaatgccctaaagaatcctcttggaaatgttggcctcctcataggagaagcaagcaaacagctgaggcggcggacagggattggcagtggtctgagtctctcgggaattgtccacccagagttgagtcgcagtggtgaactggcagtgcaggctctggaacaatttgccactgtagtggaggcgaagctgatgaagcacaagaaagggattgtcaatgaacagttcctgctgcagcgactggcagatggagccattgacctctacgccatggtggtggttctctccagagcctcaagatccctgagtgagggctacccgacagcacagcatgagaaaatgctctgtgatagttggtgcattgaggctgcaacacggattcgagaaaacatggccagccttcagtccaaccctcagcagcaggagctctttcgtaacttcagaagtatctccaaggccatggtggagaatggtggcctggtcaccagtaacccccttagagtctgaagactcctaatcaggccctagcacagtcgtgtgccttcttctatgccaaacacaggcccccttcatgggggcactggagtacttactgccttaaggacaataaattttctaccaaaaaaaaaaaaaaa

SEQ ID NO: 1934 - protein, 655 aa, Rattus norvegicus
  ref <308>: DATABASE ACCESSION NUMBER: SWISS-Prot / P45953
  ref <309>: DATABASE ENTRY DATE: 2002-06-15
MQSARMTPSVGRQLLRLGARSSRSAALQGQPRPTSAQRLYASEATQAVLEKPETLSSDASTREKPARAESKSFAVGMFKGQLTTDQVFPYPSVLNEGQTQFLKELVGPVARFFEEVNDPAKNDSLEKVEEDTLQGLKELGAFGLQVPSELGGLGLSNTQYARLAEIVGMHDLGVSVTLGAHQSIGFKGILLYGTKAQKEKYLPRVASGQALAAFCLTEPSSGSDVASIRSSAVPSPCGKYYTLNGSKIWISNGGLADIFTVFAKTPIKDAATGAVKEKITAFVVERSFGGVTHGLPEKKMGIKASNTSEVYFDGVKVPAENVLGEVGDGFKVAVNILNNGRFGMAATLAGTMKAIIAKAVDHATNRTQFGDKIHNFGVIQEKLARMAILQYVTESMAYMLSANMDQGFKDFQIEAAISKIFGSEAAWKVTDECIQIMGGMGFMKEPGVERVLRDIRIFRIFEGTNDILRLFVALQGCMDKGKELTGLGNALKNPLGNVGLLIGEASKQLRRRTGIGSGLSLSGIVHPELSRSGELAVQALEQFATVVEAKLMKHKKGIVNEQFLLQRLADGAIDLYAMVVVLSRASRSLSEGYPTAQHEKMLCDSWCIEAATRIRENMASLQSNPQQQELFRNFRSISKAMVENGGLVTSNPLRV

SEQ ID NO: 1935 - DNA, 2505 bp, Homo sapiens
  ref <308>: DATABASE ACCESSION NUMBER: EMBL / AF006012
  ref <309>: DATABASE ENTRY DATE: 2000-03-03
gagaccatggcgggtagcagcactgggggcggtggggttggggagacgaaggtgatttaccacctggatgaggaagagactccctacctggtgaagatccctgtccccgccgagcgcatcaccctcggcgatttcaagagcgtcctgcagcggcccgcgggcgccaagtactttttcaagtctatggatcaggatttcggggtggtgaaggaagaaatttcagatgacaacgcccgcctcccctgcttcaacggaagggtggtatcctggctggtgtcctcagataatccccaacccgagatggcccctccagtccatgagcctcgggcagaactggcgcctccagccccacctttacctcctttgccacccgagaggaccagcggcattggggactcaaggcctccatctttccaccctaatgtgtccagcagccatgagaatctggagcctgagacagaaaccgagtcagtagtgtcactgaggcgggagcggcctcgcaggagagacagcagtgagcatggcgctgggggccacaggactggtggcccctcaaggctggagcgccacctggccggatacgagagctcctctaccctcatgaccagcgagctggagagtaccagtctgggggactcggacgaggaggacaccatgagcaggttcagcagctccacggagcagagcagtgcctcccgcctccttaagcgccaccggcggcgaaggaagcagaggccgccccgcctggagaggacgtcatccttcagcagcgtcacagattccacaatgtctctcaatatcatcacagtcacgctaaacatggagaagtacaacttcctgggtatctccattgttggccaaagcaatgagcggggagacggaggcatctacattggctccatcatgaagggtggggctgtggcggccgacgggcgcattgagccaggggacatgcttttgcaggtgaatgacatgaactttgagaacatgagcaacgatgacgctgtgcgggtgctgagggacattgtgcacaagcctggccccattgtgctgactgtggccaagtgctgggatccctctcctcaggcctatttcactctcccccgaaatgagcccatccagccaattgaccctgctgcctgggtgtcccattccgcggctctgactggcaccttcccagcctatccaggttcctcctccatgagcaccattacatctggatcgtctttgcctgatggctgtgaaggccggggtctctccgtccatacggacatggcatcggtgaccaaggccatggcagctccagagtctggactggaagtccgggaccgcatgtggctcaagatcaccatccctaatgcctttctgggctcggatgtggttgactggctctaccatcacgtggagggctttcctgagcggcgggaggcccgcaagtatgccagcgggctgctcaaagcaggcctgatccgacacaccgtcaacaagatcaccttctctgagcagtgctattacgtcttcggagacctcagtggtggctgtgagagctacctagtcaacctgtctctcaatgacaacgatggctccagtggggcttcagaccaggataccctggctcctctgcctggggccaccccctggcccctgctgcccactttctcctaccagtaccctgccccacacccctacagcccgcagcctccaccctaccatgagctttcatcttacacctatggtgggggcagtgccagcagccagcatagtgagggcagccggagcagtgggtcgacacggagtgatgggggggcagggcgcacggggaggcccgaggagcgggcccccgagtccaagtccggcagtggcagtgagtctgagccctccagccgagggggcagccttcggcggggtggggaagcaagtgggactagcgatgggggccctcctccatccagaggctcaactgggggtgcccctaatctccgagcccacccagggctccatccctatggaccgccccctggcatggccctcccctacaaccccatgatggtggtcatgatgcccccacctccacctccagtccctccagcagtgcagcctccgggggcccctccagtcagagacctgggctctgtgcccccagaactgacagccagccgccaaagcttccacatggccatgggcaatcccagcgagttctttgtggatgttatgtagcccactgtggggccaggctgggccgggcgctcctggtgtgtgactgggtgtcctggccgtcatgtgcttgctcttacagtgcctgggctcagcctaccagctgctgccatacaggagattgtggccactgtgactctcaccagcagtgcctggttcctcccccttggctcaggggtagacaagggacctttgattatttttagctttgtttttttataagcctttttgggggttaaaatagagtttcttacatttttgggaccttttttaataggcatttcctctttt

SEQ ID NO: 1936 - protein, 736 aa, Homo sapiens
  ref <308>: DATABASE ACCESSION NUMBER: SWISS-Prot / O14641
  ref <309>: DATABASE ENTRY DATE: 2002-06-15
MAGSSTGGGGVGETKVIYHLDEEETPYLVKIPVPAERITLGDFKSVLQRPAGAKYFFKSMDQDFGVVKEEISDDNARLPCFNGRVVSWLVSSDNPQPEMAPPVHEPRAELAPPAPPLPPLPPERTSGIGDSRPPSFHPNVSSSHENLEPETETESVVSLRRERPRRRDSSEHGAGGHRTGGPSRLERHLAGYESSSTLMTSELESTSLGDSDEEDTMSRFSSSTEQSSASRLLKRHRRRRKQRPPRLERTSSFSSVTDSTMSLNIITVTLNMEKYNFLGISIVGQSNERGDGGIYIGSIMKGGAVAADGRIEPGDMLLQVNDMNFENMSNDDAVRVLRDIVHKPGPIVLTVAKCWDPSPQAYFTLPRNEPIQPIDPAAWVSHSAALTGTFPAYPGSSSMSTITSGSSLPDGCEGRGLSVHTDMASVTKAMAAPESGLEVRDRMWLKITIPNAFLGSDVVDWLYHHVEGFPERREARKYASGLLKAGLIRHTVNKITFSEQCYYVFGDLSGGCESYLVNLSLNDNDGSSGASDQDTLAPLPGATPWPLLPTFSYQYPAPHPYSPQPPPYHELSSYTYGGGSASSQHSEGSRSSGSTRSDGGAGRTGRPEERAPESKSGSGSESEPSSRGGSLRRGGEASGTSDGGPPPSRGSTGGAPNLRAHPGLHPYGPPPGMALPYNPMMVVMMPPPPPPVPPAVQPPGAPPVRDLGSVPPELTASRQSFHMAMGNPSEFFVDVM

SEQ ID NO: 1937 - DNA, 2744 bp, Rattus norvegicus
  ref <308>: DATABASE ACCESSION NUMBER: EMBL / D30649
  ref <309>: DATABASE ENTRY DATE: 2000-04-19
tgaggacagttcctttttccctccctagaggaaagaaagagccttattttctggctaaacaggtttacacagctacaggaacaatggattccaggctagctttagccacggaggagcccattaagaaagacagcctgaagagatataagatcctttgtgcggttcttcttgctttgctggtgatcgtgtcgcttggattgggcctgggcctgggactcaggaaacctgaagagcatataggcagctgcaggaaaaaatgctttgattcgtcacacagaggactggagggttgccgctgtgactccggatgcacagaccggggagactgctgctgggactttgaagatacctgtgtgaaatcaactcaaatctggacgtgtaattcgttccgctgtggggagaccagactagagacagccctctgttcctgtgcggatgactgtctgcagaggaaggactgctgcactgactacaaggctgtgtgccaaggagaagtcccatgggtgacagaagcctgtgcctcatcccaggagccccagtgtccagaagggtttgaccagccgccggttatcttgttctccatggacggctttagagctgagtacttacaaacatggagcaccctgctgccaaacattaacaaactgaaaacatgtggactccattccaaatatatgagagcagtgtatcccaccaaaacctttccaaatcattataccattgtcacgggtttgtatccagagtcgcacggcatcattgacaataacatgtatgatgtgtacctcaacaagaatttttcactttcttcagtggagaaaagtaaccctgcctggtggagtgggcagccgatttggttaacagcaatgtatcaaggcttaaaagctgcttcctactactggccaggatcagatgtggctgtcaatggctccttccctaacatctacaggaattacagcaattccgtcccatatgaaagtaggattgctacactgttgcaatggctggacctgcccaaagctgaacgacccagtttttacaccatatatgtggaagagcccgattctgcggggcacaagagtggaccagtcagtgctggagtcattaaagccttacagttagttgatgatgcctttgggatgttgatggagggtttgaaacagaggaatttacacaactgtgtcaacataatcgttctggctgatcatggaatggaccagacctcttgtgacagagtggaatacatgacagattattttcctgaaataaacttctacatgtaccaaggacctgcccctcgaatcaggactcgtaatatacctcaggacttctttacctttaattccgaagagattgtcagagacctcagctgtcgaaaatccgatcaacacttcaaaccctacttgactccggatttgccgaaacgactgcactatgccaagaacgtcaggattgacaaagttcatctaatggtggatcggcaatggctggcttacaggaacaaaggagttcccaactgcgaaggcgggacacacggttacaacaatgaatttaaaagtatggaggcaatctttttggcacatggacccagctttaaagagaagactgttatcgaaccatttgaaaacatcgaagtctataatctactgtgtgatcttctgcacatccaaccggcaccaaacaacggttctcacggtagcctgaatcatcttctgaaggcaccattttaccagccgtcgcatgcagaagaattgtcaaagtctgctggctgtggttttactactccattgcctaaggactcactaaactgctcctgcctcgcactgcagacttctggtcaagaagagcaagtcaaccaaagactaaatctcaatagaggagaggtctcggcaacagagaagacaaatttgccatttgggaggcccagggtgatacagaagaacaaagaccactgtctgctttaccacagggaatacgtcagtgggtttgggaaagctatgaagatgcccatgtggagttcatacactgttcccaagccgggagacacatcatctcttcctcccacagttccagactgtctgcgggctgatgtcagggttgatccttcggagagccaaaaatgttccttctatttagcagaccagaatatcgaccatggcttcctctatcctcccgcaatcaaaggaaataatgagagtcaatatgatgctttaattacaagtaatttggtcccaatgtataaagaattcaaaaaaatgtgggactacttccataaagttctccttataaaatacgctatagaaagaaatggagtgaatgtggttagtggacccatatttgattacaattatgatggccattttgatgcccccgatgaaatcacaaactatgtagctggcaccgatgttcctgtcccgacacactactttgtggtactgacaagctgtaaaaacaaaacccacacacccgacagctgccctgggtggctggatgtcctgccctttgtcgtccctcaccggcccaccaaacccgtggaaagctgtcctgaaaacaaagcagaagacctttgggttgaagagagatttaaagcacacatcgcccgggtccgtgatgtggagctcctcactggccttgacttttatcaggaaaaaacacagcccgtctctgaaattttgcagctgaagacatatttgcccacattcgaaaccattatttgaatagatgtgtaaagccatttgacaaaatga

SEQ ID NO: 1938 - protein, 876 aa, Rattus norvegicus
  ref <308>: DATABASE ACCESSION NUMBER: SWISS-Prot / BAA06333
  ref <309>: DATABASE ENTRY DATE: 2002-06-15
MDSRLALATEEPIKKDSLKRYKILCAVLLALLVIVSLGLGLGLGLRKPEEHIGSCRKKCFDSSHRGLEGCRCDSGCTDRGDCCWDFEDTCVKSTQIWTCNSFRCGETRLETALCSCADDCLQRKDCCTDYKAVCQGEVPWVTEACASSQEPQCPEGFDQPPVILFSMDGFRAEYLQTWSTLLPNINKLKTCGLHSKYMRAVYPTKTFPNHYTIVTGLYPESHGIIDNNMYDVYLNKNFSLSSVEKSNPAWWSGQPIWLTAMYQGLKAASYYWPGSDVAVNGSFPNIYRNYSNSVPYESRIATLLQWLDLPKAERPSFYTIYVEEPDSAGHKSGPVSAGVIKALQLVDDAFGMLMEGLKQRNLHNCVNIIVLADHGMDQTSCDRVEYMTDYFPEINFYMYQGPAPRIRTRNIPQDFFTFNSEEIVRDLSCRKSDQHFKPYLTPDLPKRLHYAKNVRIDKVHLMVDRQWLAYRNKGVPNCEGGTHGYNNEFKSMEAIFLAHGPSFKEKTVIEPFENIEVYNLLCDLLHIQPAPNNGSHGSLNHLLKAPFYQPSHAEELSKSAGCGFTTPLPKDSLNCSCLALQTSGQEEQVNQRLNLNRGEVSATEKTNLPFGRPRVIQKNKDHCLLYHREYVSGFGKAMKMPMWSSYTVPKPGDTSSLPPTVPDCLRADVRVDPSESQKCSFYLADQNIDHGFLYPPAIKGNNESQYDALITSNLVPMYKEFKKMWDYFHKVLLIKYAIERNGVNVVSGPIFDYNYDGHFDAPDEITNYVAGTDVPVPTHYFVVLTSCKNKTHTPDSCPGWLDVLPFVVPHRPTKPVESCPENKAEDLWVEERFKAHIARVRDVELLTGLDFYQEKTQPVSEILQLKTYLPTFETII

SEQ ID NO: 1939 - DNA, 3858 bp, Homo sapiens
  ref <308>: DATABASE ACCESSION NUMBER: EMBL / AF005632
  ref <309>: DATABASE ENTRY DATE: 2000-03-03
ctactttattctgataaaacaggtctatgcagctaccaggacaatggaatctacgttgactttagcaacggaacaacctgttaagaagaacactcttaagaaatataaaatagcttgcattgttcttcttgctttgctggtgatcatgtcacttggattaggcctggggcttggactcaggaaactggaaaagcaaggcagctgcaggaagaagtgctttgatgcatcatttagaggactggagaactgccggtgtgatgtggcatgtaaagaccgaggtgattgctgctgggattttgaagacacctgtgtggaatcaactcgaatatggatgtgcaataaatttcgttgtggagagaccagattagaggccagcctttgctcttgttcagatgactgtttgcagaagaaagattgctgtgctgactataagagtgtttgccaaggagaaacctcatggctggaagaaaactgtgacacagcccagcagtctcagtgcccagaagggtttgacctgccaccagttatcttgttttctatggatggatttagagctgaatatttatacacatgggatactttaatgccaaatatcaataaactgaaaacatgtggaattcattcaaaatacatgagagctatgtatcctaccaaaaccttcccaaatcattacaccattgtcacgggcttgtatccagagtcacatggcatcattgacaataatatgtatgatgtaaatctcaacaagaatttttcactttcttcaaaggaacaaaataatccagcctggtggcatgggcaaccaatgtggctgacagcaatgtatcaaggtttaaaagccgctacctacttttggcccggatcagaagtggctataaatggctcctttccttccatatacatgccttacaacggaagtgtcccatttgaagagaggatttctacactgttaaaatggctggacctgcccaaagctgaaagacccaggttttataccatgtattttgaagaacctgattcctctggacatgcaggtggaccagtcagtgccagagtaattaaagccttacaggtagtagatcatgcttttgggatgttgatggaaggcctgaagcagcggaatttgcacaactgtgtcaatatcatccttctggctgaccatggaatggaccagacttattgtaacaagatggaatacatgactgattattttcccagaataaacttcttctacatgtacgaagggcctgccccccgcatccgagctcataatatacctcatgacttttttagttttaattctgaggaaattgttagaaacctcagttgccgaaaacctgatcagcatttcaagccctatttgactcctgatttgccaaagcgactgcactatgccaagaacgtcagaatcgacaaagttcatctctttgtggatcaacagtggctggctgttaggagtaaatcaaatacaaattgtggaggaggcaaccatggttataacaatgagtttaggagcatggaggctatctttctggcacatggacccagttttaaagagaagactgaagttgaaccatttgaaaatattgaagtctataacctaatgtgtgatcttctacgcattcaaccagcaccaaacaatggaacccatggtagtttaaaccatcttctgaaggtgcctttttatgagccatcccatgcagaggaggtgtcaaagttttctgtttgtggctttgctaatccattgcccacagagtctcttgactgtttctgccctcacctacaaaatagtactcagctggaacaagtgaatcagatgctaaatctcacccaagaagaaataacagcaacagtgaaagtaaatttgccatttgggaggcctagggtactgcagaagaacgtggaccactgtctcctttaccacagggaatatgtcagtggatttggaaaagctatgaggatgcccatgtggagttcatacacagtcccccagttgggagacacatcgcctctgcctcccactgtcccagactgtctgcgggctgatgtcagggttcctccttctgagagccaaaaatgttccttctatttagcagacaagaatatcacccacggcttcctctatcctcctgccagcaatagaacatcagatagccaatatgatgctttaattactagcaatttggtacctatgtatgaagaattcagaaaaatgtgggactacttccacagtgttcttcttataaaacatgccacagaaagaaatggagtaaatgtggttagtggaccaatatttgattataattatgatggccattttgatgctccagatgaaattaccaaacatttagccaacactgatgttcccatcccaacacactactttgtggtgctgaccagttgtaaaaacaagagccacacaccggaaaactgccctgggtggctggatgtcctaccctttatcatccctcaccgacctaccaacgtggagagctgtcctgaaggtaaaccagaagctctttgggttgaagaaagatttacagctcacattgcccgggtccgtgatgtagaacttctcactgggcttgacttctatcaggataaagtgcagcctgtctctgaaattttgcaactaaagacatatttaccaacatttgaaaccactatttaacttaataatgtctacttaatatataatttactgtataaagtaattttggcaaaatataagtgattttttctggagaattgtaaaataaagttttctatttttccttaaaaaaaaaaccggaattccgggcttgggaggctgaggcaggagactcgcttgaacccgggaggcagaggttgcagtgagccaagattgcgccattgcactccagagcctgggtgacagagcaagactacatctcaaaaaataaataaataaaataaaagtaacaataaaaataaaaagaacagcagagagaatgagcaaggagaaatgtcacaaactattgcaaaatactgttacactgggttggctctccaagaagatactggaatctcttcagccatttgcttttcagaagtagaaaccagcaaaccacctctaagcggagaacatacgattctttattaagtagctctggggaaggaaagaataaaagttgatagctccctgattgggaaaaaatgcacaattaataaagaatgaagatgaaagaaagcatgcttatgttgtaacacaaaaaaaattcacaaacgttggtggaaggaaaacagtatagaaaacattactttaactaaaagctggaaaaattttcagttgggatgcgactgacaaaaagaacgggatttccaggcataaagttggcgtgagctacagagggcaccatgtggctcagtggaagacccttcaagattcaaagttccatttgacagagcaaaggcacttcgcaaggagaagggtttaaattatgggtccaaaagccaagtggtaaagcgagcaatttgcagcataactgcttctcctagacagggctgagtgggcaaaatacgacagtacacacagtgactattagccactgccagaaacaggctgaacagccctgggagacaagggaaggcaggtggtgggagttgttcatggagagaaaggagagttttagaaccagcacatccactggagatgctgggccaccagacccctcccagtcaataaagtctggtgcctcatttgatctcagcctcatcatgaccctggagagaccctgataccatctgccagtccccgacagcttaggcactccttgccatcaacctgaccccccgagtggttctccaggctccctgccccacccattcaggccggaattc

SEQ ID NO: 1940 - protein, 875 aa, Homo sapiens
  ref <308>: DATABASE ACCESSION NUMBER: SWISS-Prot / AAC51813
  ref <309>: DATABASE ENTRY DATE: 2002-06-15
MESTLTLATEQPVKKNTLKKYKIACIVLLALLVIMSLGLGLGLGLRKLEKQGSCRKKCFDASFRGLENCRCDVACKDRGDCCWDFEDTCVESTRIWMCNKFRCGETRLEASLCSCSDDCLQKKDCCADYKSVCQGETSWLEENCDTAQQSQCPEGFDLPPVILFSMDGFRAEYLYTWDTLMPNINKLKTCGIHSKYMRAMYPTKTFPNHYTIVTGLYPESHGIIDNNMYDVNLNKNFSLSSKEQNNPAWWHGQPMWLTAMYQGLKAATYFWPGSEVAINGSFPSIYMPYNGSVPFEERISTLLKWLDLPKAERPRFYTMYFEEPDSSGHAGGPVSARVIKALQVVDHAFGMLMEGLKQRNLHNCVNIILLADHGMDQTYCNKMEYMTDYFPRINFFYMYEGPAPRIRAHNIPHDFFSFNSEEIVRNLSCRKPDQHFKPYLTPDLPKRLHYAKNVRIDKVHLFVDQQWLAVRSKSNTNCGGGNHGYNNEFRSMEAIFLAHGPSFKEKTEVEPFENIEVYNLMCDLLRIQPAPNNGTHGSLNHLLKVPFYEPSHAEEVSKFSVCGFANPLPTESLDCFCPHLQNSTQLEQVNQMLNLTQEEITATVKVNLPFGRPRVLQKNVDHCLLYHREYVSGFGKAMRMPMWSSYTVPQLGDTSPLPPTVPDCLRADVRVPPSESQKCSFYLADKNITHGFLYPPASNRTSDSQYDALITSNLVPMYEEFRKMWDYFHSVLLIKHATERNGVNVVSGPIFDYNYDGHFDAPDEITKHLANTDVPIPTHYFVVLTSCKNKSHTPENCPGWLDVLPFIIPHRPTNVESCPEGKPEALWVEERFTAHIARVRDVELLTGLDFYQDKVQPVSEILQLKTYLPTFETTI

SEQ ID NO: 1941 - DNA, 2744 bp, Rattus norvegicus; identical to SEQ ID NO: 1937
  ref <308>: DATABASE ACCESSION NUMBER: EMBL / D30649
  ref <309>: DATABASE ENTRY DATE: 2000-04-19

SEQ ID NO: 1942 - protein, 876 aa, Rattus norvegicus; identical to SEQ ID NO: 1938
  ref <308>: DATABASE ACCESSION NUMBER: SWISS-Prot / BAA06333
  ref <309>: DATABASE ENTRY DATE: 2002-06-15

SEQ ID NO: 1943 - DNA, 3858 bp, Homo sapiens; identical to SEQ ID NO: 1939
  ref <308>: DATABASE ACCESSION NUMBER: EMBL / AF005632
  ref <309>: DATABASE ENTRY DATE: 2000-03-03

SEQ ID NO: 1944 - protein, 875 aa, Homo sapiens; identical to SEQ ID NO: 1940
  ref <308>: DATABASE ACCESSION NUMBER: SWISS-Prot / AAC51813
  ref <309>: DATABASE ENTRY DATE: 2002-06-15

SEQ ID NO: 1945 - DNA, 2996 bp, Rattus norvegicus
  ref <308>: DATABASE ACCESSION NUMBER: EMBL / D30734
  ref <309>: DATABASE ENTRY DATE: 1999-01-21
ccgccttgacgggctacgcaggcggtagggctgcggtaggggccgggcggcaccatggcggcggcagcgcctgctgcggcggctttaaccgaggcgccggccgtcccgggcaccgcagaacccgagacgggagacgaggacagtcgtgaggtccgagtgctgcagagcctgcgcggcaggatctatgaagcaaaaaatttattgccatatcttggacccaacaaaatgcgggattgtttctgcactataaatttggaccaggaagaagtttatcgcacccaggttgttgaaaagtctttaagtccatatttcagtgaagaattttattttgagattccaagaactttccagtatttgtcattttatgtttatgataaaaatgttttacaaagagatcttcgtataggaaaagtagccatcaaaaaagaagacttgtgcagtcatagtggtaaagaaacttggttttcattgcagcctattgactcaaattcagaagttcagggaaaagttcaccttgaattaaaactgaatgaattgataacagaaaatggaactgtgtgccagcagcttgttgtacacatcaaggcatgccacgggttgcctcttatcaatggacaaagctgtgatccttacgcaacagtttccctcgtgggcccttccaggaatgaccaaaagaagacaaaagtaaagaagaaaacaagcaatccacagttcaatgaagtcttctactttgaggtaaccagatccagcagttacaccaggaagtcccagttccaggtggaggaggaagacattgagaagctggaaatcaggattgacttgtggaataatgaaaacctagttcaagatgttttcctgggggagattaaggttcctgtcaatgtgttaagaaatgattcctctcatcaagcctggtacttgctacaaccaagagacaatggaaacaagtcgtctaaacctgatgacctgggatccctcctgttaactctgtgttacacagaagactacgtgctcccatcagagtactatggacccttgaaagctttgctgctaaaatcaccagatgttcagccagtatccgcctcagctgcttatattttgggtgaaatatgtcgagaccagaaggatgccgttttgcccctcgtacgactgttgctgcatcacaataagcttgttccctttatcactgcggtggctgacctggacttgaaggatactcaagatgccaacgcaatatttagaggaaactccctggctacccagtgtctgactgagatgatgaagatagtgggagggcactacctgaaagtcacattgaagcctgttctggatgagatatgtgagtcctcgaaatcctgtgaaatagatcctgttaagttgaaagagggagataatgtggagagtaataaggagaatctgtactactatgtggacaaagtattcagtgcgatcgtaggatcgagtgtgagctgtcccactgtgatgtgtgatattttttattctctgagacagatggctgctaagagatttcctaataaccctcatgttcagtactctgccgtgagcagctttgtgtttcttcgtttctttgctgtagcgattctgtcacctcatgcttttcatttgcgacctcattatccagatacacagacagttaggactttaactctcatctcaaaaaccattcagattattggaaactggggatgtcaatccagaagaaagtcacggttcaaaaagtcagtcatgtgtgaatttctcaaaatgtttcaagaagaaaggtattttacagacgtgaaaaagttcttggatgaaatttcgtctacggaaactaaggagtccagtggtacgagtgagcctgtgcacctgaaagaaggtgagatgtataaaagagctcaaggaagaacccgtattggaaaaaagaacttcaagaaacgatggttctgcttgacaagcaaagagctcacctaccacaaacagcaaggcaaagatgcaatttacactattccagtaaagaacattcttgctgtggaaaaactggaagaaagctctttcaacaagaaaaatatgttccaagtgatccatacggagaaaacgctgtacatccaagcgaataactgtgtggaagctaatgagtggatcgacatgctgtgcagggtgagcaggtgcaaccacaacaggctcagctccttccacccgtcagcatatctcaacggaaactggctctgctgccaggagaccagtgaaggcacaccaggctgcaagccatgcactgcaggcatccctgcagacatccagatagatattgatgaagacagagaaacagaaagaatttactccgtttttaccctcagtttacttaaactgcagaagatggaagaggcttgtgggtctatagctgtatatcaggggccacagaaagaacctggttattctaagttcaccatcgaggattctgtcgcaacctttaagacaattcagcaaataaaaagcaccatagagaaactagatgaacctcatgagaaatacaggaagaaaagatcgagtagtgcaaaatacggaagcaaggaaaatccaattgtgggaaaaatatcatagtgtttgatcaactgacggagaactggaaaatactcttatcatcaagtttttcaattcaccccatttgttccagtgtgtaagagcagacattggctttgaagacacctgctcttgcaatgtatttaatatttaatgattgaaattaactggggatcctgatactgatgtgtttattactaaagaatttgaaaaccaagatttccttcatagccatgcatccaaatccatgtctctgcaacttcctttcaacagaaaggatctttctaaggaacgttcccaagaagctttgtaataagggagcacttgctagcaagaagccatctctacttggagcactcctgtgtcactcactaccatcagtgcctgccctgtgctgccaacattgagcttccagagaa

SEQ ID NO: 1946 - protein, 847 aa, Rattus norvegicus
  ref <308>: DATABASE ACCESSION NUMBER: SWISS-Prot / BAA06398
  ref <309>: DATABASE ENTRY DATE: 2001-10-16
MAAAAPAAAALTEAPAVPGTAEPETGDEDSREVRVLQSLRGRIYEAKNLLPYLGPNKMRDCFCTINLDQEEVYRTQVVEKSLSPYFSEEFYFEIPRTFQYLSFYVYDKNVLQRDLRIGKVAIKKEDLCSHSGKETWFSLQPIDSNSEVQGKVHLELKLNELITENGTVCQQLVVHIKACHGLPLINGQSCDPYATVSLVGPSRNDQKKTKVKKKTSNPQFNEVFYFEVTRSSSYTRKSQFQVEEEDIEKLEIRIDLWNNENLVQDVFLGEIKVPVNVLRNDSSHQAWYLLQPRDNGNKSSKPDDLGSLLLTLCYTEDYVLPSEYYGPLKALLLKSPDVQPVSASAAYILGEICRDQKDAVLPLVRLLLHHNKLVPFITAVADLDLKDTQDANAIFRGNSLATQCLTEMMKIVGGHYLKVTLKPVLDEICESSKSCEIDPVKLKEGDNVESNKENLYYYVDKVFSAIVGSSVSCPTVMCDIFYSLRQMAAKRFPNNPHVQYSAVSSFVFLRFFAVAILSPHAFHLRPHYPDTQTVRTLTLISKTIQIIGNWGCQSRRKSRFKKSVMCEFLKMFQEERYFTDVKKFLDEISSTETKESSGTSEPVHLKEGEMYKRAQGRTRIGKKNFKKRWFCLTSKELTYHKQQGKDAIYTIPVKNILAVEKLEESSFNKKNMFQVIHTEKTLYIQANNCVEANEWIDMLCRVSRCNHNRLSSFHPSAYLNGNWLCCQETSEGTPGCKPCTAGIPADIQIDIDEDRETERIYSVFTLSLLKLQKMEEACGSIAVYQGPQKEPGYSKFTIEDSVATFKTIQQIKSTIEKLDEPHEKYRKKRSSSAKYGSKENPIVGKIS

SEQ ID NO: 1947 - DNA, 2553 bp, Homo sapiens
  ref <308>: DATABASE ACCESSION NUMBER: EMBL / D78155
  ref <309>: DATABASE ENTRY DATE: 2002-08-06
atggcggcggcggcgcctgctgctgcggcggcttcttccgaggcgccagcggcgagtgcgactgcagagcccgaggccggggaccaggacagtcgcgaggttcgagtgttgcagagcctgcggggcaagatctgtgaagcaaaaaatttattgccatatcttggaccccacaaaatgagagattgtttctgtaccataaatttggaccaggaagaagtttatcgtacccaagttgtggaaaaatctttaagcccatttttcagtgaagaattttactttgagattccaagaactttccagtatttgtctttctatgtttatgataagaatgttttacaaagagatctccgtataggaaaagtagccatcaaaaaagaagacttgtgtaatcacagtggcaaagaaacttggttttcattacagcctgttgactccaattcagaggttcagggtaaagttcaccttgaattaaaactgaatgaactgataacggagaatggaactgtatgccagcagcttgttgtacacatcaaggcatgccatgggttgcctctcataaatggccaaagctgtgacccttatgcaacagtttctctagtgggcccttctaggaatgaccaaaagaagacaaaagtaaagaagaaagcaagcaatccgcagtttaatgaaatcttttattttgaggtaaccagatccagtagctacaccagaaagtcccagttccaggtagaagaggaggacattgaaaagctagaaatcaggatcgacttgtggaacaatggaaacctagtccaagatgttttcctaggtgagattaaggttcctgtgaacgtattaagaactgattcctctcatcaagcctggtacttgctacagccaagagacaatggaaacaagtcatccaaaactgatgacctggggtctcttcgattaaatatatgttatacagaagactacgtgcttccttcagagtactatggtcctttgaaaactttgctgctaaaatcaccagatgttcaaccaatatctgcctcagctgcttacattttgagtgaaatatgtcgagataaaaatgatgctgttttgccccttgtacgactgctgctgcaccatgataaacttgttccttttgccactgctgtggctgaattagacttgaaggatacacaagatgcaaacacaatttttagaggaaattccctggctacccgatgtctggatgagatgatgaaaatagtgggagggcactacctgaaagtaacattaaaacctattcttgatgagatatgtgactcctcaaaatcctgtgaaatcgatcctattaaattgaaagagggagataatgtagaaaataataaggagaatctgcgctactatgtagacaagttattcaatacaattgtaaaatcaagtatgagctgccccactgtaatgtgtgatatcttttattctctaaggcagatggctactcagagatttcctaatgaccctcatgttcagtattctgcagtgagcagctttgtatttcttcgtttctttgctgtagcggtagtatcacctcatacttttcatttgcgacctcatcatccagatgcacagacaattagaacattaactctcatctcaaaaactatacaaactttgggaagctgggggagtctgtccaaaagcaagtcaagtttcaaagagacattcatgtgtgaatttttcaaaatgtttcaagaagaaggatatattatagcagttaaaaagttcttggatgaaatttcatctactgaaactaaagagtccagtggtacgagtgagcctgtgcacctgaaagaaggtgagatgtataaaagagctcaaggaagaactcggattggaaaaaagaattttaagaaacgatggttctgcttaacaagcagagagctcacctaccacaaacagccaggtagcaaagatgcaatctacacaatcccagtaaaaaacattcttgctgtggaaaaactggaagagagctctttcaacaagaaaaacatgttccaagtaatacatacggagaaaccactctatgtccaggcaaataactgtgtagaagctaatgaatggatagacgtactctgcagggtgagccgatgcaatcaaaacaggctcagtttttatcatccctctgtgtatctaaacggaaattggctctgctgtcaggagactggtgaaaacactctcggctgcaagccatgtactgcaggtgtccctgcagacatccaaatagatattgatgaagacagagaaacagaaagaatttattccctttttaccctcagtttacttaagctgcagaagatggaagaggcttgtggaactattgcagtctatcaaggaccacagaaagagcctgatgattattctaactttgtaatcgaggattctgtaacaacctttaagacaattcagcaaataaaaagcataattgagaagctggatgaacctcatgaaaaatataggaagaaaagatccagtagtgcaaaatatgggagcaaggaaaatccaattgttgggaaagcatcttag

SEQ ID NO: 1948 - protein, 849 aa, Homo sapiens
  ref <308>: DATABASE ACCESSION NUMBER: SWISS-Prot / Q15283
  ref <309>: DATABASE ENTRY DATE: 2001-10-16
MAAAAPAAAAASSEAPAASATAEPEAGDQDSREVRVLQSLRGKICEAKNLLPYLGPHKMRDCFCTINLDQEEVYRTQVVEKSLSPFFSEEFYFEIPRTFQYLSFYVYDKNVLQRDLRIGKVAIKKEDLCNHSGKETWFSLQPVDSNSEVQGKVHLELKLNELITENGTVCQQLVVHIKACHGLPLINGQSCDPYATVSLVGPSRNDQKKTKVKKKTSNPQFNEIFYFEVTRSSSYTRKSQFQVEEEDIEKLEIRIDLWNNGNLVQDVFLGEIKVPVNVLRTDSSHQAWYLLQPRDNGNKSSKTDDLGSLRLNICYTEDYVLPSEYYGPLKTLLLKSPDVQPISASAAYILSEICRDKNDAVLPLVRLLLHHDKLVPFATAVAELDLKDTQDANTIFRGNSLATRCLDEMMKIVGGHYLKVTLKPILDEICDSSKSCEIDPIKLKEGDNVENNKENLRYYVDKLFNTIVKSSMSCPTVMCDIFYSLRQMATQRFPNDPHVQYSAVSSFVFLRFFAVAVVSPHTFHLRPHHPDAQTIRTLTLISKTIQTLGSWGSLSKSKSSFKETFMCEFFKMFQEEGYIIAVKKFLDEISSTETKESSGTSEPVHLKEGEMYKRAQGRTRIGKKNFKKRWFCLTSRELTYHKQPGKDAIYTIPVKNILAVEKLEESSFNKKNMFQVIHTEKPLYVQANNCVEANEWIDVLCRVSRCNQNRLSFYHPSVYLNGNWLCCQETGENTLGCKPCTAGVPADIQIDIDEDRETERIYSLFTLSLLKLQKMEEACGTIAVYQGPQKEPDDYSNFVIEDSVTTFKTIQQIKSIIEKLDEPHEKYRKKRSSSAKYGSKENPIVGKAS

SEQ ID NO: 1949 - DNA, 1728 bp, Rattus norvegicus
  ref <308>: DATABASE ACCESSION NUMBER: EMBL / D30739
  ref <309>: DATABASE ENTRY DATE: 1999-01-21
agcgagaagctgagagagtcgagacgctatccgcttccatccgtcgtgcagaccctgccggagccgctgccgctatggatgatcgggaggatctggtgtaccaggcgaagctggcagagcaggccgagcgatacgacgaaatggtggaatcaatgaagaaagtcgcaggaatggacgtggagctgacagttgaagaacgaaaccttttatctgttgcatataaaaatgtgattggagccagaagagcatcctggagaataatcagcagcattgaacagaaggaagaaaacaagggaggagaggacaaattaaagatgattcgggagtaccggcaaatggttgaaactgagctcaagttaatctgttgtgacattctggatgtactggacaagcacctcattccagcagctaacactggcgagtccaaggttttctattataaaatgaaaggggactaccacaggtatctggctgagtttgccacaggaaacgacaggaaggaggcagcagagaacagccttgtggcttacaaagctgctagtgacattgcgatgacagaacttcctccaacgcaccccattcgtttaggtcttgctctcaacttttccgtattctactatgaaattcttaattcccccgaccgtgcctgcaggttggcaaaagcagcttttgatgacgcaattgcagaactggacacgctgagtgaagaaagctataaggactccacactcatcatgcagctgctacgtgataacctgacgctgtggacctcagacatgcagggcgatggtgaagagcagaataaagaagcgctgcaggatgtggaagatgagaatcagtgagacgtaataaagccaaccaagagaaaccatctctgactaccccaccccacccctgcccttggaagttccccattgtcactgagaaccaccaaatttgactttcacatttggtctcagaatttaggttcctgccctgttgtttttctttctttttcttttttttctcccctccccttttttaaaacaaacagttttcagaagttcttaaggaagagtgaatttctgtggattttactggtccagctttaggttctttacgacactaacaggactgcatagaggctttttcagcattactgtattgtctccggccacatgacgaagatcatcattagaaatggaaatgacatttgagagccattagacttctaggtgatgcatctaagaaagattaatcacacaatagaggcatatgcgctgtcatttttcctttttttaattgttaaattgaattttataccaatgtttaaacttaaattgggtgttagcttgaggtgttttgggggagtttgcggtaatggttttgctgtaacgtgtgtttggaactctgctgaagggctgctgaaaagcacggtgctggtaacagtccaacagtcgcggctgctcattcttgccgactcctccctctgacgcaggttagcattgaaggtggtatggaagcctgcatgcgtgttcaactcttcctctcttccctcctcctcggcctccctcatcccttcctccttcgctcgctcaacctcttttgttcagtagtgtaacttgaagctaatttgtactactggtatctgactggagccacagatacagatctgtattgttcttactgaaacacagcatggaattaacattaaacttaaataaaacaaacctaaattaaaaaatgccg

SEQ ID NO: 1950 - protein, 255 aa, Rattus norvegicus
  ref <308>: DATABASE ACCESSION NUMBER: SWISS-Prot / BAA06401
  ref <309>: DATABASE ENTRY DATE: 2002-06-15
MDDREDLVYQAKLAEQAERYDEMVESMKKVAGMDVELTVEERNLLSVAYKNVIGARRASWRIISSIEQKEENKGGEDKLKMIREYRQMVETELKLICCDILDVLDKHLIPAANTGESKVFYYKMKGDYHRYLAEFATGNDRKEAAENSLVAYKAASDIAMTELPPTHPIRLGLALNFSVFYYEILNSPDRACRLAKAAFDDAIAELDTLSEESYKDSTLIMQLLRDNLTLWTSDMQGDGEEQNKEALQDVEDENQ

SEQ ID NO: 1951 - DNA, 2834 bp, Homo sapiens
  ref <308>: DATABASE ACCESSION NUMBER: Refseq / NM_003406
  ref <309>: DATABASE ENTRY DATE: 2002-11-05
gcccactcccaccgccagctggaaccctggggactacgacgtccctcaaaccttgcttctaggagataaaaagaacatccagtcatggataaaaatgagctggttcagaaggccaaactggccgagcaggctgagcgatatgatgacatggcagcctgcatgaagtctgtaactgagcaaggagctgaattatccaatgaggagaggaatcttctctcagttgcttataaaaatgttgtaggagcccgtaggtcatcttggagggtcgtctcaagtattgaacaaaagacggaaggtgctgagaaaaaacagcagatggctcgagaatacagagagaaaattgagacggagctaagagatatctgcaatgatgtactgtctcttttggaaaagttcttgatccccaatgcttcacaagcagagagcaaagtcttctatttgaaaatgaaaggagattactaccgttacttggctgaggttgccgctggtgatgacaagaaagggattgtcgatcagtcacaacaagcataccaagaagcttttgaaatcagcaaaaaggaaatgcaaccaacacatcctatcagactgggtctggcccttaacttctctgtgttctattatgagattctgaactccccagagaaagcctgctctcttgcaaagacagcttttgatgaagccattgctgaacttgatacattaagtgaagagtcatacaaagacagcacgctaataatgcaattactgagagacaacttgacattgtggacatcggatacccaaggagacgaagctgaagcaggagaaggaggggaaaattaaccggccttccaacttttgtctgcctcattctaaaatttacacagtagaccatttgtcatccatgctgtcccacaaatagttttttgtttacgatttatgacaggtttatgttacttctatttgaatttctatatttcccatgtggtttttatgtttaatattaggggagtagagccagttaacatttagggagttatctgttttcatcttgaggtggccaatatggggatgtggaatttttatacaagttataagtgtttggcatagtacttttggtacattgtggcttcaaaagggccagtgtaaaactgcttccatgtctaagcaaagaaaactgcctacatactggtttgtcctggcggggaataaaagggatcattggttccagtcacaggtgtagtaattgtgggtactttaaggtttggagcacttacaaggctgtggtagaatcataccccatggataccacatattaaaccatgtatatctgtggaatactcaatgtgtacacctttgactacagctgcagaagtgttcctttagacaaagttgtgacccattttactctggataagggcagaaacggttcacattccattatttgtaaagttacctgctgttagctttcattatttttgctacactcattttatttgtatttaaatgttttaggcaacctaagaacaaatgtaaaagtaaagatgcaggaaaaatgaattgcttggtattcattacttcatgtatatcaagcacagcagtaaaacaaaaacccatgtatttaacttttttttaggatttttgcttttgtgattttttttttttttttttgatacttgcctaacatgcatgtgctgtaaaaatagttaacagggaaataacttgagatgatggctagctttgtttaatgtcttatgaaattttcatgaacaatccaagcataattgttaagaacacgtgtattaaattcatgtaagtggaataaaagttttatgaatggacttttcaactactttctctacagcttttcatgtaaattagtcttggttctgaaacttctctaaaggaaattgtacattttttgaaatttattccttattccctcttggcagctaatgggctcttaccaagtttaaacacaaaatttatcataacaaaaatactactaatataactactgtttccatgtcccatgatcccctctcttcctccccaccctgaaaaaaatgagttcctattttttctgggagagggggggattgattagaaaaaaatgtagtgtgttccatttaaaattttggcatatggcattttctaacttaggaagccacaatgttcttggcccatcatgacattgggtagcattaactgtaagttttgtgcttccaaatcactttttggtttttaagaatttcttgatactcttatagcctgccttcaattttgatcctttattctttctatttgtcaggtgcacaagattaccttcctgttttagccttctgtcttgtcaccaaccattcttacttggtggccatgtacttggaaaaaggccgcatgatctttctggctccactcagtgtctaaggcaccctgcttcctttgcttgcatcccacagactatttccctcatcctatttactgcagcaaatctctccttagttgatgagactgtgtttatctccctttaaaaccctacctatcctgaatggtctgtcattgtctgcctttaaaatccttcctctttcttcctcctctattctctaaataatgatggggctaagttatacccaaagctcactttacaaaatatttcctcagtactttgcagaaaacaccaaacaaaaatgccattttaaaaaaggtgtattttttcttttagaatgtaagctcctcaagagcagggacaatgttttctgtatgttctattgtgcctagtacactgtaaatgctcaataaatattgatgatgggaggcagtgagtcttgatgataagggtgagaaactgaaatccc

SEQ ID NO: 1952 - protein, 245 aa, Homo sapiens
  ref <308>: DATABASE ACCESSION NUMBER: SWISS-Prot / P29312
  ref <309>: DATABASE ENTRY DATE: 2002-06-15
MDKNELVQKAKLAEQAERYDDMAACMKSVTEQGAELSNEERNLLSVAYKNVVGARRSSWRVVSSIEQKTEGAEKKQQMAREYREKIETELRDICNDVLSLLEKFLIPNASQAESKVFYLKMKGDYYRYLAEVAAGDDKKGIVDQSQQAYQEAFEISKKEMQPTHPIRLGLALNFSVFYYEILNSPEKACSLAKTAFDEAIAELDTLSEESYKDSTLIMQLLRDNLTLWTSDTQGDEAEAGEGGEN

SEQ ID NO: 1953 - DNA, 900 bp, Rattus norvegicus
  ref <308>: DATABASE ACCESSION NUMBER: EMBL / D30804
  ref <309>: DATABASE ENTRY DATE: 1999-01-21
tggagcggcggcggcttgagctcgcgcgtccgcagtgatgagctacgaccgcgccatcaccgtcttctcgcccgacggccacctcttccaagtggagtacgcgcaggaggcggtcaagaagggctccaccgcggttggtgttcgaggaagggacattgttgttcttggtgtggaaaagaagtcggtggccaagctacaagatgaaagaacggtccggaaaatctgtgctctggacgataatgtctgcatggcctttgcagttgtagcctctgtctcaggtctcactgccgatgcaaggatagtcatcaacagagccagggtagagtgccagagccaccggctgaccgtgggggacccagtgactgtggagtacatcacccgctacattgccagtctgaagcagcgttacacacagagcaatgggcgcaggccatttggtatctctgccctaattgtgggtttcgacttcgatggcacccccagactctatcagactgacccctcaggcacataccatgcttggaaggccaatgccataggccggggtgccaagtcggtgcgtgaatttctggagaagaactacacagatgatgccattgaaacagacgatctgaccatcaaactggtgatcaaggcgctgctggaagtggtccagtcaggtggcaaaaacattgaacttgctgtcatgaggcgggatcagcccctcaagattctaagtcctgaagaaattgagaagtatgttgctgaaatcgagaaggagaaagaagaaaatgaaaagaagaaacaaaagaaagcatcatgagggcagcggtcagagcagctttgagcctccatccgagcaaacgggtgctgtgggccttgtggccatttgtcggagtccaataaactactacgtttttt

SEQ ID NO: 1954 - protein, 254 aa, Rattus norvegicus
  ref <308>: DATABASE ACCESSION NUMBER: SWISS-Prot / BAA06463
  ref <309>: DATABASE ENTRY DATE: 2002-06-15
MSYDRAITVFSPDGHLFQVEYAQEAVKKGSTAVGVRGRDIVVLGVEKKSVAKLQDERTVRKICALDDNVCMAFAVVASVSGLTADARIVINRARVECQSHRLTVGDPVTVEYITRYIASLKQRYTQSNGRRPFGISALIVGFDFDGTPRLYQTDPSGTYHAWKANAIGRGAKSVREFLEKNYTDDAIETDDLTIKLVIKALLEVVQSGGKNIELAVMRRDQPLKILSPEEIEKYVAEIEKEKEENEKKKQKKAS

SEQ ID NO: 1955 - DNA, 893 bp, Homo sapiens
  ref <308>: DATABASE ACCESSION NUMBER: Refseq / NM_002792
  ref <309>: DATABASE ENTRY DATE: 2002-11-05
ggcacgaggcggccgcccgccggcatgagctacgaccgcgccatcaccgtcttctcgcccgacggccacctcttccaagtggagtacgcgcaggaggccgtcaagaagggctcgaccgcggttggtgttcgaggaagagacattgttgttcttggtgtggagaagaagtcagtggccaaactgcaggatgaaagaacagtgcggaagatctgtgctttggatgacaacgtctgcatggcctttgcaggcctcaccgccgatgcaaggatagtcatcaacagggcccgggtggagtgccagagccaccggctgactgtagaggacccggtcactgtggagtacatcacccgctacatcgccagtctgaagcagcgttatacgcagagcaatgggcgcaggccgtttggcatctctgccctcatcgtgggtttcgactttgatggcactcctaggctctatcagactgacccctcgggcacataccatgcctggaaggccaatgccataggccggggtgccaagtcagtgcgcgagttcctggagaagaactatactgacgaagccattgaaacagatgatctgaccattaagctggtgatcaaggcactcctggaagtggttcagtcaggtggcaaaaacattgaacttgctgtcatgaggcgagatcaatccctcaagattttaaatcctgaagaaattgagaagtatgttgctgaaattgaaaaagaaaaagaagaaaacgaaaagaagaaacaaaagaaagcatcatgatgaataaaatgtctttgcttgtaatttttaaattcatatcaatcatggatgagtctcgatgtgtaggcctttccattccatttattcacactgagtgtcctacaataaacttccgtattttt

SEQ ID NO: 1956 - protein, 248 aa, Homo sapiens
  ref <308>: DATABASE ACCESSION NUMBER: SWISS-Prot / O14818
  ref <309>: DATABASE ENTRY DATE: 2002-06-15
MSYDRAITVFSPDGHLFQVEYAQEAVKKGSTAVGVRGRDIVVLGVEKKSVAKLQDERTVRKICALDDNVCMAFAGLTADARIVINRARVECQSHRLTVEDPVTVEYITRYIASLKQRYTQSNGRRPFGISALIVGFDFDGTPRLYQTDPSGTYHAWKANAIGRGAKSVREFLEKNYTDEAIETDDLTIKLVIKALLEVVQSGGKNIELAVMRRDQSLKILNPEEIEKYVAEIEKEKEENEKKKQKKAS

SEQ ID NO: 1957 - DNA, 900 bp, Rattus norvegicus; identical to SEQ ID NO: 1953
  ref <308>: DATABASE ACCESSION NUMBER: EMBL / D30804
  ref <309>: DATABASE ENTRY DATE: 1999-01-21

SEQ ID NO: 1958 - protein, 254 aa, Rattus norvegicus; identical to SEQ ID NO: 1954
  ref <308>: DATABASE ACCESSION NUMBER: SWISS-Prot / BAA06463
  ref <309>: DATABASE ENTRY DATE: 2002-06-15

SEQ ID NO: 1959 - DNA, 893 bp, Homo sapiens; identical to SEQ ID NO: 1955
  ref <308>: DATABASE ACCESSION NUMBER: Refseq / NM_002792
  ref <309>: DATABASE ENTRY DATE: 2002-11-05

SEQ ID NO: 1960 - protein, 248 aa, Homo sapiens; identical to SEQ ID NO: 1956
  ref <308>: DATABASE ACCESSION NUMBER: SWISS-Prot / O14818
  ref <309>: DATABASE ENTRY DATE: 2002-06-15

SEQ ID NO: 1961 - DNA, 900 bp, Rattus norvegicus; identical to SEQ ID NO: 1953
  ref <308>: DATABASE ACCESSION NUMBER: EMBL / D30804
  ref <309>: DATABASE ENTRY DATE: 1999-01-21

SEQ ID NO: 1962 - protein, 254 aa, Rattus norvegicus; identical to SEQ ID NO: 1954
  ref <308>: DATABASE ACCESSION NUMBER: SWISS-Prot / BAA06463
  ref <309>: DATABASE ENTRY DATE: 2002-06-15

SEQ ID NO: 1963 - DNA, 893 bp, Homo sapiens; identical to SEQ ID NO: 1955
  ref <308>: DATABASE ACCESSION NUMBER: Refseq / NM_002792
  ref <309>: DATABASE ENTRY DATE: 2002-11-05

SEQ ID NO: 1964 - protein, 248 aa, Homo sapiens; identical to SEQ ID NO: 1956
  ref <308>: DATABASE ACCESSION NUMBER: SWISS-Prot / O14818
  ref <309>: DATABASE ENTRY DATE: 2002-06-15

SEQ ID NO: 1965 - DNA, 900 bp, Rattus norvegicus; identical to SEQ ID NO: 1953
  ref <308>: DATABASE ACCESSION NUMBER: EMBL / D30804
  ref <309>: DATABASE ENTRY DATE: 1999-01-21

SEQ ID NO: 1966 - protein, 254 aa, Rattus norvegicus; identical to SEQ ID NO: 1954
  ref <308>: DATABASE ACCESSION NUMBER: SWISS-Prot / BAA06463
  ref <309>: DATABASE ENTRY DATE: 2002-06-15

SEQ ID NO: 1967 - DNA, 893 bp, Homo sapiens; identical to SEQ ID NO: 1955
  ref <308>: DATABASE ACCESSION NUMBER: Refseq / NM_002792
  ref <309>: DATABASE ENTRY DATE: 2002-11-05

SEQ ID NO: 1968 - protein, 248 aa, Homo sapiens; identical to SEQ ID NO: 1956
  ref <308>: DATABASE ACCESSION NUMBER: SWISS-Prot / O14818
  ref <309>: DATABASE ENTRY DATE: 2002-06-15

SEQ ID NO: 1969 - DNA, 3258 bp, Rattus norvegicus
  ref <308>: DATABASE ACCESSION NUMBER: EMBL / D31873
  ref <309>: DATABASE ENTRY DATE: 1999-01-21
gcagcggcaacgcggagccggtgttcttcaagcctggtgtgggagtgcagcggagcatcatcgccgaagccggagcggagcgctcggctccggccccgcgctccccgcctcccgccttctcgggccggcggcgggcgagctcgcgggcccggccccagctctccagtgccccgccggttgccggcggtccccgccccccgccgagtgcatgaggttgacgctactttgttgcacctggagggaagaacgtatgggagaggaaggaagcgagttgcctgtgtgtgcgagctgtagccagagtatctatgacggccagtacctccaggccctgaatgctgactggcatgcggattgcttcaggtgctgcgagtgtagcacctccctttcacaccagtactacgagaaggatggacagctcttctgcaagaaggactactgggcccgctatggcgagtcttgccacgggtgctccgaacacatcaccaaagggctggtcatggtgggcggggagctgaagtatcaccccgagtgcttcatctgccttgcctgtggaaacttcatcggtgatggggacacctacacactggtggagcactccaagctgtactgcgggcagtgctactaccagactgtggtaactccagtcatcgaacagatcctccctgactcacccggctcccacctgccccacacagtcaccctcgtgtctatcccagcctctgctcatggcaaacgaggcctgtctgtctccatcgacccccctcacggcccaccaggatgtggcacggagcattcgcacacggtccgagtccaaggagtggacccgggctgcatgagcccggatgtgaagaattccatccacatcggagacaggatcttggaaatcaacggcacgcccatccggaatgtgccgctggacgagatcgacttgctgatccaggagaccagccgcctgctccagctgaccctcgagcacgacccccatgactcactgggccatgggccagtgtcggatcccagccccctggcctccccggtacacactcccagcggacaggcaggcagctctgcccggcagaaacctgtcttgaggagctgcagtattgacacgtccccgggtgccggctcactagtctcaccagcctcccagcgcaaggacctgggtcgctccgaatccctccgagtggtttgtcgaccacaccgcatcttccggccgtctgacctcatccatggggaggtgttgggcaagggctgtttcggccaggccatcaaggtgacacatcgagaaacgggcgaggtgatggtgatgaaggaactcatccggtttgacgaggagacccagaggacattcctcaaggaggtgaaggtcatgcgatgcctggagcaccctaacgtgctcaagttcatcggcgtgctgtacaaggacaagcggctgaacttcatcaccgagtacatcaagggcggcaccctgcggggcatcatcaagagcatggacagccagtacccgtggagtcagagggtcagctttgccaaggacattgcatcagggatggcctacctccattcgatgaacatcatccaccgagacctcaactcccacaactgtctggtccgtgagaacaggaacgtggtggtggctgactttgggctggctcgactcatgatcgatgagaagggtcagtctgaagacttgcgtagccttaagaagccggaccgcaagaaacggtacacagtggtgggtaacccctactggatggcgccagagatgatcaatggtcgtagttacgatgaaaaggtggacgtgttttcctttggaattgtcctttgtgagattatcgggcgtgtgaatgcagaccctgactatctgccccgcactatggactttggcctcaatgtaaggggtttcctggaccgctactgtccaccaaactgtcccccaagtttcttccccatcactgtgcgctgctgtgacctggatcctgagaagaggccctcttttgtaaagctggaacaatggctagaaacacttcgcatgcacttggctggtcacctgccactgggcccacaactggaacaactggagcggggcttctgggagacctaccggcggggcgagagctcgctacccgcccaccccgaggtccctgactgagcccagtgggcccaccatcttcatccccgcctctggagaatagaccctcaccagattcctcagcagggggtggcctaggcatggagccctcagctggggcagtggtgaccatatccgtacccccagacctgccttttcccctcatgcagggtgccccccagcctctctctgcctctggcccccaagtcacaaggctgcacacacacgtggttggtcacatcgccctgccttacctcccattgtgtggagccaccccctcacttgtctttgcatgagctggagggttggggaagctgaacccattccatgcaatgcctgcagctgtctgcacagcgcacctgctggcagctcttcccagcaaggctgggccagaaggcagctttagaagtgagccctgtaaggccaagggagaggctatgtgcccgggaacccaagggcagtccaggatcccttggggaaaatctaggtagcatcaggtattgacagggatctaaatcccaaagcagagagagagagaggtccagtcccatgtggccaggcagtggccttcgctcttgcttcgtgtccatctcatttcctgatcaaagccactttagtaagaagtaggtaccagtcctcaggatgagccaggagccctcaggggagagggcggatgatgcctgggaacacagctgacagggagggtccagcccacaccacagaggctaggcagagggaatgaggtagccatccaccagcaccccagccctcccggttcatctcagcacccttcctgggcctctccccgtggctggagcagccccaccccctccctgggtgcatctgccctctgagttctttctgtgtgatctattttttaagaagagtttgttttgttgttttgttttaggtgggtgggggtgggagggccatctcttcactctgcttcagttgaacacctagggacgtattaaaactgtgaagctttctcagtgcactttgaacatggaagagaatctgaacccccgcgggaccaggactgaaagaggcaaggcctgcttgcctcggcccagtgaccgtgataggaatgaacccaaactcaataaaatcaattctgtgctcccccc

SEQ ID NO: 1970 - protein, 647 aa, Rattus norvegicus
  ref <308>: DATABASE ACCESSION NUMBER: SWISS-Prot / P53669
  ref <309>: DATABASE ENTRY DATE: 2002-06-15
MRLTLLCCTWREERMGEEGSELPVCASCSQSIYDGQYLQALNADWHADCFRCCECSTSLSHQYYEKDGQLFCKKDYWARYGESCHGCSEHITKGLVMVGGELKYHPECFICLACGNFIGDGDTYTLVEHSKLYCGQCYYQTVVTPVIEQILPDSPGSHLPHTVTLVSIPASAHGKRGLSVSIDPPHGPPGCGTEHSHTVRVQGVDPGCMSPDVKNSIHIGDRILEINGTPIRNVPLDEIDLLIQETSRLLQLTLEHDPHDSLGHGPVSDPSPLASPVHTPSGQAGSSARQKPVLRSCSIDTSPGAGSLVSPASQRKDLGRSESLRVVCRPHRIFRPSDLIHGEVLGKGCFGQAIKVTHRETGEVMVMKELIRFDEETQRTFLKEVKVMRCLEHPNVLKFIGVLYKDKRLNFITEYIKGGTLRGIIKSMDSQYPWSQRVSFAKDIASGMAYLHSMNIIHRDLNSHNCLVRENRNVVVADFGLARLMIDEKGQSEDLRSLKKPDRKKRYTVVGNPYWMAPEMINGRSYDEKVDVFSFGIVLCEIIGRVNADPDYLPRTMDFGLNVRGFLDRYCPPNCPPSFFPITVRCCDLDPEKRPSFVKLEQWLETLRMHLAGHLPLGPQLEQLERGFWETYRRGESSLPAHPEVPD

SEQ ID NO: 1971 - DNA, 3271 bp, Homo sapiens
  ref <308>: DATABASE ACCESSION NUMBER: Refseq / NM_016735
  ref <309>: DATABASE ENTRY DATE: 2001-02-03
gcgccgagccggtttccccgccggtgtccgagaggcgcccccggcccggcccggcccggcccgcgccctccgcccccgcctccccgggccggcggcggtgggcgagctcgcgggcccggccgcccccagccccagccccgccgggccccgccccccgtcgagtgcatgaggttgacgctactttgttgcacctggagggaagaacgtatgggagaggaaggaagcgagttgcccgtgtgtgcaagctgcggccagaggatctatgatggccagtacctccaggccctgaacgcggactggcacgcagactgcttcaggtgttgtgactgcagtgcctccctgtcgcaccagtactatgagaaggatgggcagctcttctgcaagaaggactactgggcccgctatggcgagtcctgccatgggtgctctgagcaaatcaccaagggactggttatggtggctggggagctgaagtaccaccccgagtgtttcatctgcctcacgtgtgggacctttatcggtgacggggacacctacacgctggtggagcactccaagctgtactgcgggcactgctactaccagactgtggtgacccccgtcatcgagcagatcctgcctgactcccctggctcccacctgccccacaccgtcaccctggtgtccatcccagcctcatctcatggcaagcgtggactttcagtctccattgaccccccgcacggcccaccgggctgtggcaccgagcactcacacaccgtccgcgtccagggagtggatccgggctgcatgagcccagatgtgaagaattccatccacgtcggagaccggatcttggaaatcaatggcacgcccatccgaaatgtgcccctggacgagattgacctgctgattcaggaaaccagccgcctgctccagctgaccctcgagcatgaccctcacgatacactgggccacgggctggggcctgagaccagccccctgagctctccggcttatactcccagcggggaggcgggcagctctgcccggcagaaacctgtcttcgcaaggacctgggtcgctctgagtccctccgcgtagtctgccggccacaccgcatcttccggccgtcggacctcatccacggggaggtgctgggcaagggctgcttcggccaggctatcaaggtgacacaccgtgagacaggtgaggtgatggtgatgaaggagctgatccggttcgacgaggagacccagaggacgttcctcaaggaggtgaaggtcatgcgatgcctggaacaccccaacgtgctcaagttcatcggggtgctctacaaggacaagaggctcaacttcatcactgagtacatcaagggcggcacgctccggggcatcatcaagagcatggacagccagtacccatggagccagagagtgagctttgccaaggacatcgcatcagggatggcctacctccactccatgaacatcatccaccgagacctcaactcccacaactgcctggtccgcgagaacaagaatgtggtggtggctgacttcgggctggcgcgtctcatggtggacgagaagactcagcctgagggcctgcggagcctcaagaagccagaccgcaagaagcgctacaccgtggtgggcaacccctactggatggcacctgagatgatcaacggccgcagctatgatgagaaggtggatgtgttctcctttgggatcgtcctgtgcgagatcatcgggcgggtgaacgcagaccctgactacctgccccgcaccatggactttggcctcaacgtgcgaggattcctggaccgctactgccccccaaactgccccccgagcttcttccccatcaccgtgcgctgttgcgatctggaccccgagaagaggccatcctttgtgaagctggaacactggctggagaccctccgcatgcacctggccggccacctgccactgggcccacagctggagcagctggacagaggtttctgggagacctaccggcgcggcgagagcggactgcctgcccaccctgaggtccccgactgagccagggccactcagctgcccctgtccccacctctggagaatccacccccaccagattcctccgcgggaggtggccctcagctgggacagtggggacccaggcttctcctcagagccaggccctgacttgccttctcccaccccgtggaccgcttcccctgccttctctctgccgtggcccagagccggcccagctgcacacacacaccatgctctcgccctgctgtaacctctgtcttggcagggctgtcccctcttgcttctccttgcatgagctggagggcctgtgtgagttacgcccctttccacacgccgctgccccagcaaccctgttcacgctccacctgtctggtccatagctccctggaggctgggccaggaggcagcctccgaaccatgccccatataacgcttgggtgcgtgggagggcgcacatcagggcagaggccaagttccaggtgtctgtgttcccaggaaccaaatggggagtctggggcccgttttccccccagggggtgtctaggtagcaacaggtatcgaggactctccaaacccccaaagcagagagagggctgatcccatggggcggaggtccccagtggctgagcaaacagccccttctctcgctttgggtcttttttttgtttctttcttaaagccactttagtgagaagcaggtaccaagcctcagggtgaagggggtcccttgagggagcgtggagctgcggtgccctggccggcgatggggaggagccggctccggcagtgagaggataggcacagtggaccgggcaggtgtccaccagcagctcagcccctgcagtcatctcagagccccttcccgggcctctcccccaaggctccctgcccctcctcatgcccctctgtcctctgcgttttttctgtgtaatctattttttaagaagagtttgtattattttttcatacggctgcagcagcagctgccaggggcttgggattttatttttgtggcgggcgggggtgggagggccattttgtcactttgcctcagttgagcatctaggaagtattaaaactgtgaagctttctcagtgcactttgaacctggaaaacaatcccaacaggcccgtgggaccatgacttagggaggtgggacccacccacccccatccaggaaccgtgacgtccaaggaaccaaacccagacgcagaacaataaaataaattccgtactccccaccc

SEQ ID NO: 1972 - protein, 647 aa, Homo sapiens [sequence omitted]

SEQ ID NO: 1973 - DNA, 3258 bp, Rattus norvegicus; identical to SEQ ID NO: 1969
  ref <308>: DATABASE ACCESSION NUMBER: EMBL / D31873
  ref <309>: DATABASE ENTRY DATE: 1999-01-21

SEQ ID NO: 1974 - protein, 647 aa, Rattus norvegicus; identical to SEQ ID NO: 1970
  ref <308>: DATABASE ACCESSION NUMBER: SWISS-Prot / P53669
  ref <309>: DATABASE ENTRY DATE: 2002-06-15

SEQ ID NO: 1975 - DNA, 3271 bp, Homo sapiens; identical to SEQ ID NO: 1971
  ref <308>: DATABASE ACCESSION NUMBER: Refseq / NM_016735
  ref <309>: DATABASE ENTRY DATE: 2001-02-03

SEQ ID NO: 1976 - protein, 647 aa, Homo sapiens [sequence omitted]

SEQ ID NO: 1977 - DNA, 3258 bp, Rattus norvegicus; identical to SEQ ID NO: 1969
  ref <308>: DATABASE ACCESSION NUMBER: EMBL / D31873
  ref <309>: DATABASE ENTRY DATE: 1999-01-21

SEQ ID NO: 1978 - protein, 647 aa, Rattus norvegicus; identical to SEQ ID NO: 1970
  ref <308>: DATABASE ACCESSION NUMBER: SWISS-Prot / P53669
  ref <309>: DATABASE ENTRY DATE: 2002-06-15

SEQ ID NO: 1979 - DNA, 3271 bp, Homo sapiens; identical to SEQ ID NO: 1971
  ref <308>: DATABASE ACCESSION NUMBER: Refseq / NM_016735
  ref <309>: DATABASE ENTRY DATE: 2001-02-03

SEQ ID NO: 1980 - protein, 647 aa, Homo sapiens [sequence omitted]

SEQ ID NO: 1981 - DNA, 3258 bp, Rattus norvegicus; identical to SEQ ID NO: 1969
  ref <308>: DATABASE ACCESSION NUMBER: EMBL / D31873
  ref <309>: DATABASE ENTRY DATE: 1999-01-21

SEQ ID NO: 1982 - protein, 647 aa, Rattus norvegicus; identical to SEQ ID NO: 1970
  ref <308>: DATABASE ACCESSION NUMBER: SWISS-Prot / P53669
  ref <309>: DATABASE ENTRY DATE: 2002-06-15

SEQ ID NO: 1983 - DNA, 3271 bp, Homo sapiens; identical to SEQ ID NO: 1971
  ref <308>: DATABASE ACCESSION NUMBER: Refseq / NM_016735
  ref <309>: DATABASE ENTRY DATE: 2001-02-03

SEQ ID NO: 1984 - protein, 647 aa, Homo sapiens [sequence omitted]

SEQ ID NO: 1985 - DNA, 3258 bp, Rattus norvegicus; identical to SEQ ID NO: 1969
  ref <308>: DATABASE ACCESSION NUMBER: EMBL / D31873
  ref <309>: DATABASE ENTRY DATE: 1999-01-21

SEQ ID NO: 1986 - protein, 647 aa, Rattus norvegicus; identical to SEQ ID NO: 1970
  ref <308>: DATABASE ACCESSION NUMBER: SWISS-Prot / P53669
  ref <309>: DATABASE ENTRY DATE: 2002-06-15

SEQ ID NO: 1987 - DNA, 3271 bp, Homo sapiens; identical to SEQ ID NO: 1971
  ref <308>: DATABASE ACCESSION NUMBER: Refseq / NM_016735
  ref <309>: DATABASE ENTRY DATE: 2001-02-03

SEQ ID NO: 1988 - protein, 647 aa, Homo sapiens [sequence omitted]

SEQ ID NO: 1989 - DNA, 3258 bp, Rattus norvegicus; identical to SEQ ID NO: 1969
  ref <308>: DATABASE ACCESSION NUMBER: EMBL / D31873
  ref <309>: DATABASE ENTRY DATE: 1999-01-21

SEQ ID NO: 1990 - protein, 647 aa, Rattus norvegicus; identical to SEQ ID NO: 1970
  ref <308>: DATABASE ACCESSION NUMBER: SWISS-Prot / P53669
  ref <309>: DATABASE ENTRY DATE: 2002-06-15

SEQ ID NO: 1991 - DNA, 3271 bp, Homo sapiens; identical to SEQ ID NO: 1971
  ref <308>: DATABASE ACCESSION NUMBER: Refseq / NM_016735
  ref <309>: DATABASE ENTRY DATE: 2001-02-03

SEQ ID NO: 1992 - protein, 647 aa, Homo sapiens [sequence omitted]

SEQ ID NO: 1993 - DNA, 3455 bp, Rattus norvegicus
  ref <308>: DATABASE ACCESSION NUMBER: EMBL / D31874
  ref <309>: DATABASE ENTRY DATE: 1999-01-21
cgggcgcggacctgaggtgctgctgccgggtggtccttcctgtgttgtccgcgccctggaccatggcggcgctggcgggtgaagaggcctggaggtgtcggggctgtggcaactatgttcccctgagccagaggctgtacaggacagccaacgaggcctggcatagctcctgcttccggtgttccgagtgccaggagtccctcaccaactggtactatgagaaggacgggaagctctactgccacaaggactactgggccaagtttggagaattctgccacgggtgctccctgctgatgacagggccagccatggtggctggggagtttaagtaccacccagagtgctttgcctgcatgagttgcaaggtgatcatcgaggatggggatgcgtacgccctggtgcagcatgctacactctactgcgggaagtgccacaatgaggtggtgctggcacccatgtttgaaagactgtctacggagtctgtccaggaccagctgccctactctgtcacgctcatctccatgcctgccaccaccgagtgcagacgtggcttctctgtgtctgtggaaagcgcctcctctaactatgccaccaccgtgcaagtgaaagaggtcaaccggatgcacatcagccccaacaaccgaaatgccatccaccccggggaccgcatcttggagatcaatgggacccctgtccgcactctccgagtagaagaggtggaggatgcgattaaccagacgagccagacacttcaactgctgattgaacatgaccctgtcccccagcgcctggaccagttacggctagacacccggctttctccccacatgcagagtagtggacatactctcatgctcagcaccttggacgccaaggaaaatcaggagggaacactgaggagacgttctctgaggcgcagtaacagcatctccaagtctcctggccccagctcccccaaggagccgctgctcctgagccgagacatcagtcgctcagagtcccttcgctgctccagcagctactcacagcagatcttccggccctgtgacctgatccacggggaggtcctggggaagggcttcttcggacaggccatcaaggtgactcacaaagccacaggcaaagtgatggtcatgaaggagttaattcgctgtgatgaggaaacccagaagactttcctgactgaggtgaaagtgatgcgaagcctggaccaccctaacgtgcttaagttcatcggggtcctgtacaaggacaagaagctgaatctgctgacagagtacattgaggggggcaccctgaaggactttctgcgcaatgtggacccgtttccctggcaacagaaggtcaggtttgccaaaggcatcgcttccggaatggcttatttacactccatgtgcatcatccaccgagatctgaactcgcacaactgtctcatcaaattggacaagacggtggtggtagcagacttcgggctgtcacgtctcatagtggaagagaggaaaaggcctccagtagagaaggccgccaccaagaaacgcaccttacgcaagagtgatcgcaagaagcgctacactgtggtgggaaacccctactggatggcccctgagatgctgaatggcaagagctacgatgagactgtggatgtcttctcttttgggattgttctctgtgagatcattgggcaggtatatgctgatcccgactgccttccccgcacactggacttcggcctcaacgtaaagcttttctgggagaagtttgtcccaacagactgtcccccagccttcttccccctggctgctatctgctgcaaactggagcctgagagcagaccggcattctcaaagctggaggactcattcgaggcgctctccctgttcttgggagagttggccatcccactgccagcagagctggaagagctggaccacactgtgagcatggagtatggcctaacccgggactcgccaccctagccctggtccatccccctgcagggggacattccacagccagcattgccccctctgcgccctgtcctcgctgtgagcgagcaagcgggactgcctaggcttcctgtggattgacggcttgcttagaagcagaacaagccatccctacctccccaggaggcacttgggtgcagggaagcaattctccacaggtttgggcctagtttctgtctgtaaatccaacactcacctgaaagctgtgaagaggataaaagcctggattctagaccaagagtctgttactggggaccgcccgggacctctggactgagatgccgggagcctgtagctttacactaacctacacggcctgggcccgccgggccggatgagtggactggcctgagggcctctggttcagcaaggtgcaggacttgaagcgatagtatgagtttcagaaacggggccgtcaaaacgtgtgaaatgacagagcggtttctccttccatcctagccatgccctttggagcaggttttgaagagtcttagtagtggtaaaacctacaggatccaaaaaaaaaggactggtttctgctcagcagcccagggaccacatcagtgtgtggggaatttccacttcagcaccctgtctcaacaagcagtctcaaaaacaccaaagaaggtggggctggaaagaaagcggccctgccgtctaaaagccccacacccaggctggtgggctcagtcagaaacttaaggtgttgcctaacaatagatgggttctggatgccagtgtggtttgcctcagactttgggcctaagcagggagaagggggtcccattaatttctttgcacccttgtggcagctactgcataccctctaggatgtctggtccaggcagcaacttgggacaggcattggtggctgctgagtcccaaactgagatatgaagagagctccctgagctggaccttgtagagtctacctctgttgtgctggtccagcttacttcctgagacacactcgagggccgtgggcatgggaaactctaggggcactttccacccctggctaccaggtgtccagggactccgtagctcaccaaggttcgccatctcctaagtgggagctcacatcatatttaacacattgggaatgggtttggttataaatacgtgtgagggtttgtgctggtggggggatccggggagagtggctgctcttattagcttttatctgtggggtgatatgtgaaatattttgtacatagacaagatgaattatgggatgggaagtctttggccactttacttgctgtgtagactgtacttgtgtgtggagtttgcaaacgtgccgcagagggaatcctgaactcccgacatcagtgtggttcagcgtcctgcggcgaattatgcacgcgctgtccccagcgagtgtgggagtggtgggcctgcactgggccatgaggcagactaaataaattaagcagttaacagagc

SEQ ID NO: 1994 - protein, 638 aa, Rattus norvegicus
  ref <308>: DATABASE ACCESSION NUMBER: SWISS-Prot / P53670
  ref <309>: DATABASE ENTRY DATE: 2002-06-15
MAALAGEEAWRCRGCGNYVPLSQRLYRTANEAWHSSCFRCSECQESLTNWYYEKDGKLYCHKDYWAKFGEFCHGCSLLMTGPAMVAGEFKYHPECFACMSCKVIIEDGDAYALVQHATLYCGKCHNEVVLAPMFERLSTESVQDQLPYSVTLISMPATTECRRGFSVSVESASSNYATTVQVKEVNRMHISPNNRNAIHPGDRILEINGTPVRTLRVEEVEDAINQTSQTLQLLIEHDPVPQRLDQLRLDTRLSPHMQSSGHTLMLSTLDAKENQEGTLRRRSLRRSNSISKSPGPSSPKEPLLLSRDISRSESLRCSSSYSQQIFRPCDLIHGEVLGKGFFGQAIKVTHKATGKVMVMKELIRCDEETQKTFLTEVKVMRSLDHPNVLKFIGVLYKDKKLNLLTEYIEGGTLKDFLRNVDPFPWQQKVRFAKGIASGMAYLHSMCIIHRDLNSHNCLIKLDKTVVVADFGLSRLIVEERKRPPVEKAATKKRTLRKSDRKKRYTVVGNPYWMAPEMLNGKSYDETVDVFSFGIVLCEIIGQVYADPDCLPRTLDFGLNVKLFWEKFVPTDCPPAFFPLAAICCKLEPESRPAFSKLEDSFEALSLFLGELAIPLPAELEELDHTVSMEYGLTRDSPP

SEQ ID NO: 1995 - DNA, 2805 bp, Homo sapiens
  ref <308>: DATABASE ACCESSION NUMBER: EMBL / BC013051
  ref <309>: DATABASE ENTRY DATE: 2001-08-30
gggaggagccatcccagccatgagcccctgtgggaatctgctgggggccaagtggcctggagtcctcaggctcccgcagctgctccggagggagaggtgagctcagggcagcctgcctgcagccagaggtgccgggagccccgggcctgtcatggtggccatctacagccggcctgaggcagtcacagacggatttgcagctgagcctgtctatctggtgtgggaagaagatggggagttacttgtcagtcccggcttacttcacctccagagacctgtttcggtgttcagaatgccaggattccctcaccaactggtactatgagaaggatgggaagctctactgccccaaggactactgggggaagtttggggagttctgtcatgggtgctccctgctgatgacagggccttttatggtggctggggagttcaagtaccacccagagtgctttgcctgtatgagctgcaaggtgatcattgaggatggggatgcatatgcactggtgcagcatgccaccctctactgtgggaagtgccacaatgaggtggtgctggcacccatgtttgagagactctccacagagtctgttcaggagcagctgccctactctgtcacgctcatctccatgccggccaccactgaaggcaggcggggcttctccgtgtccgtggagagtgcctgctccaactacgccaccactgtgcaagtgaaagaggtcaaccggatgcacatcagtcccaacaatcgaaacgccatccaccctggggaccgcatcctggagatcaatgggacccccgtccgcacacttcgagtggaggaggtggaggatgcaattagccagacgagccagacacttcagctgttgattgaacatgaccccgtctcccaacgcctggaccagctgcggctggaggcccggctcgctcctcacatgcagaatgccggacacccccacgccctcagcaccctggacaccaaggagaatctggaggggacactgaggagacgttccctaaggcgcagtaacagtatctccaagtcccctggccccagctccccaaaggagcccctgctgttcagccgtgacatcagccgctcagaatcccttcgttgttccagcagctattcacagcagatcttccggccctgtgacctaatccatggggaggtcctggggaagggcttctttgggcaggctatcaaggtgacacacaaagccacgggcaaagtgatggtcatgaaagagttaattcgatgtgatgaggagacccagaaaacttttctgactgaggtgaaagtgatgcgcagcctggaccaccccaatgtgctcaagttcattggtgtgctgtacaaggataagaagctgaacctcctgacagagtacattgaggggggcacactgaaggactttctgcgcagtatggatccgttcccctggcagcagaaggtcaggtttgccaaaggaatcgcctccggaatggcctatttgcactctatgtgcatcatccaccgggatctgaactcgcacaactgcctcatcaagttggacaagactgtggtggtggcagactttgggctgtcacggctcatagtggaagagaggaaaagggcccccatggagaaggccaccaccaagaaacgcaccttgcgcaagaacgaccgcaagaagcgctacacggtggtgggaaacccctactggatggcccctgagatgctgaacggaaagagctatgatgagacggtggatatcttctcctttgggatcgttctctgtgagatcattgggcaggtgtatgcagatcctgactgccttccccgaacactggactttggcctcaacgtgaagcttttctgggagaagtttgttcccacagattgtcccccggccttcttcccgctggccgccatctgctgcagactggagcctgagagcagagccccccccggggccgcaggagagggcccgggctgcgcggatgatgagggcccagtgaggcgccaagggaaggtcaccatcaagtatgaccccaaggagctacggaagcacctcaacctagaggagtggatcctggagcagctcacgcgcctctacgactgccaggaagaggagatctcagaactagagattgacgtggatgagctcctggacatggagagtgacgatgcctgggcttccagggtcaaggagctgctggttgactgttacaaacccacagaggccttcatctctggcctgctggacaagatccgggccatgcagaagctgagcacaccccagaagaagtgagggtccccgacccaggcgaacggtggctcccataggacaatcgctaccccccgacctcgtagcaacagcaataccgggggaccctgcggccaggcctggttccatgagcagggctcctcgtgcccctggcccaggggtctcttcccctgccccctcagttttccacttttggatttttttattgttattaaactgatgggactttgtgtttttatattgactctgcggcacgggccctttaataaagcgaggtagggtacgcctttggtgcagctcaaaaaaaaaaaaaaaaatgatttccagcggtccacattagagttgaaattttctggtgggagaatctataccttgttcctttataggccaaggaccgcagtccttcagtaacaccagtgtaaaagcttgaggagaaattgtgaagctacacagtatttgttttctaatacctcttgtcattctaaatatctttaatttattaaaaaatatatatatacagtaaaaaaaaaaaaaaaaa

SEQ ID NO: 1996 - protein, 638 aa, Homo sapiens
  ref <308>: DATABASE ACCESSION NUMBER: SWISS-Prot / P53671
  ref <309>: DATABASE ENTRY DATE: 2002-06-15
MSALAGEDVWRCPGCGDHIAPSQIWYRTVNETWHGSCFRCSECQDSLTNWYYEKDGKLYCPKDYWGKFGEFCHGCSLLMTGPFMVAGEFKYHPECFACMSCKVIIEDGDAYALVQHATLYCGKCHNEVVLAPMFERLSTESVQEQLPYSVTLISMPATTEGRRGFSVSVESACSNYATTVQVKEVNRMHISPNNRNAIHPGDRILEINGTPVRTLRVEEVEDAISQTSQTLQLLIEHDPVSQRLDQLRLEARLAPHMQNAGHPHALSTLDTKENLEGTLRRRSLRRSNSISKSPGPSSPKEPLLFSRDISRSESLRCSSSYSQQIFRPCDLIHGEVLGKGFFGQAIKVTHKATGKVMVMKELIRCDEETQKTFLTEVKVMRSLDHPNVLKFIGVLYKDKKLNLLTEYIEGGTLKDFLRSMDPFPWQQKVRFAKGIASGMAYLHSMCIIHRDLNSHNCLIKLDKTVVVADFGLSRLIVEERKRAPMEKATTKKRTLRKNDRKKRYTVVGNPYWMAPEMLNGKSYDETVDIFSFGIVLCEIIGQVYADPDCLPRTLDFGLNVKLFWEKFVPTDCPPAFFPLAAICCRLEPESRPAFSKLEDSFEALSLYLGELGIPLPAELEELDHTVSMQYGLTRDSPP

SEQ ID NO: 1997 - DNA, 4758 bp, Rattus norvegicus
  ref <308>: DATABASE ACCESSION NUMBER: EMBL / D32249
  ref <309>: DATABASE ENTRY DATE: 2000-04-14
tggcgggtggaggatcgagcgctgttctcgctctggagccgctgcacatctcggaatcatttgcagcttattcactgtgtaaggaaaaaccaaattacatccataattctattgaactggaagcatagacgctgccatatatgtcacagtatacagaaaaagaaccatcagtaatggatcaagactccagcaaggctgcgtggcctagagcagcaggaggataccagacgattacaggcaggaggtacggaaggagacatgcgtatgtcagttttaagccatgtatgaccaggcatgaacggagcttgggtcgggctggcgatgactatgaagttctggaactggatgacgttgccaaggaaaacaccgcaggttccagttcattggatcaagtccatccttctttacccagtgaaactacagttgaaaaaagtgaaacagaaattcctacttgtggtccagcactgaatcaaagcacggagagcaacccatccgttgccacagtgtgtcatagtgaggaagtcagggagaccttagacagcagtacgaatcttcagaatcacgctgagagagagtgtacgccagcagtttgtaatgcctcaagtgtccagaatggaattgtgttggttcatactgactcttatgatccagacagcaagcatgatgagaatgactctcttcaactttgtgcccaagctgtggaaggtggtagacgtcagaaggtattaggcaatgcagtctttgagctggaaaatggagaggtagagagatatgctgatctgtgtccctcagttccctctctcagtggtgaaataagggaggagtctgaagagctaggttcagcactcttagagaaaaattctgctggcgatgcggaggctgtccatcaggatgggcaggaatttcagaggtcttctgaagacggcattgttagaaagaggcgacaagatgataccgatcagggaagacagacagaaaattcaactgaagatgcagactgtgttccaggccatgttgaacaaaatactagtgagagagccaatcaccatggaagttctcctgaacaggtagtgaggcccaaagttagaaaagtgatcagttcaagccaggtggaccaagagagcggttttaataggcacgaggctaagcaaagaagtgttcagaggtggagagaggctctggaagttgaggaatgcagttcagatgaccctataatcaagtgtgacgattatgatggagaccatgactgcatgttcctaaccccatcctactcaagagttacgccaagggaagcagaacgtcaccgtgcgacagcagaaaatggagccacagcttcaggaaggcaagaggctcgggaaaatgccttttggaatgcctgtggagagtattaccagctctttgacaaagacgaagacagttcagagtgcagtgatggggaatggtctgcttctctgcctcaccgattttctggcacagaaaaagaccagtcctcaagcgatgaaagctgggaaactctgccaggaaaagatgagaatgaacctgagctacagagtgatagtagtggccctgaggaagaaaaccaagaattgtctcttcaggagggagaacagacgtccttggaggagggggagattccctggttacagtacaatgaggtcaatgagagcagcagcgatgaagggaacgagcctgccaatgagtttgcacaaccagaagctttcatgttggatgggaacaacaacctggaggacgactcgagcgtgagtgaagacctggatgtggactggagcctatttgatggttttgcggatggacttggtgttgctgaagctatttcctacgtggatcctcagttcctcacctacatggcactagaagaacgcttagcccaggctatggagactgcactggcacacttagagtctcttgctgtagacgttgaggtggctaacccacctgccagtaaggaaagcatcgacggacttccagaaacccttgtcctagaagatcacaccgctattggtcaggagcagtgctgtcccatctgctgcagtgagtacattaaggatgacatcgcaacagagctgccctgccatcacttctttcataagccttgtgtctccatttggctacagaagtccggaacgtgccctgtgtgccgccgccacttcccacctgcagtgattgacgcatctgcagctgcttcctctgaaccagaccttgatgcctcgcctgcaaacgacaatgctgaggaagccccgtaagccgtcacggggaaatgagatcgaaattctatcacagtaaatctgcaaattccttctaaatctgatgtgcaaataattatatataaatatatttaaaatgctctatatagtatatgccgtagtttagaaagagaatattaacctttctaaactgaatttaggtttgcagaagatactaaacattttcaagctgaatgttgaagcagtgcatccattttctttagttgaacatggtgtccattgtaacgtcagtagtcatctctgtggcatacgtttctgttttgtctgaagtgctgccactaagagatcagaattaagctctcctttccacatcagatgtgaaaggagagcttaattctgatctctgtggcatacgtttctgttttgtctgaagtgctgccactaagagatcagaattaagctctcctttccacatcagatgtgaaaactgtgatcacaacagtagtacagtttggtttcattgaaaataaactgaattctaaagcatgctttttcactggtccctttgcttttgctacttcgagacctcttggtttatataacactgaggttaagattaaagcttttcagaatgccaggcaaagactagagttttgacccgaacacacacacaaaataaaaaaataaaaaataaattacatcttagatgtaaacttcctgaaactgtcatgtaataaactattcagtgaacgttggatgtttaaaggctagtaaagcatgtgaattatctgatgtgcttcatgctcggcacagtctcatgagcttggcctatgaaacactgtctaagccctcatgcagtctgcttctacttgttaaacactgaaggtccagaccagtcttggcatctgattaagaaattggatgtagttagctaaggtagtttgggttctactttaggagatctgaagatttgcacatggccatgtctgttacagcatcaccccagattagaaaggcacagcttttaggtggtcacacgagtaggcaagtctgtgcagacgctggtgtgataggtagcttacaggtgagccctgacatcagcacagggacaacggctcagcaggcccagcactggagcccatccgcgtgcacatctacctgccctgctcatccagttcgggaatatttctatagcttcccaaatcagcttcatctgatttgtgtaatatatctgagtatttatagtctttcttttttctccagtcttaaaaataaatgaattttcactgttggcacatttgaggcttaaatataagaaacctaacacttgcattctgatttttgcatatattgtaaatgtggctggtatttacagcgaatcctgtgtgtccttttatgggtaaaacaaaagtgaacattgcatgcaagtaatgtggtgaatttgtaatttaggggttttctggggcttctgtgactgtggatgcttaaattcaggccttaatgttgctctagctagcatgtttccttctaatgtacatagtcagcctgtatccactaatctctgcttgtcttctcctccgtggtcttcacaccgtatccactgatggtcagttagtgtcagaggtcacccaggttagcatcagttcccatgtgtgccgtgcggattgtgagccgtgtggttgcttggttggttttcttttatgtactttgattagctgtggcacttactgagtaaacttacgttgctgcagactgctgtgtaacaagccacgttttgtgtttagtcagtattacacacgggaccttgttttattcttctagatagcagctgtcccaaagaaaatatttcttctttgcctattaagatttagctattatctgccagttgttaaggggtttgattccaaactcaaccagagttgaacgtaagaaagctgctgtactcttgctgtccatctgttacgtcctccgttgttggctcctgactacgtacccacggctgctgaaggagacttgttttaatttgttttaaaaaggaaaatgaagttttaggactttgatggtggggaagctgacaagttcagaccccagtctgtcatttgctcttagcttggatccttttgaaaagttaagaatatatgaaggtaaattagaaaaagtaaaaatattgataaaatgtcatttatcttatgtctattttatgttgttatttggcctattaattttaattttttgaacattttcttatttcttgtaatatgaatgccgatatttaaagtttgactcacttgggtttcttttgtgtttcttagttgttatctctaagcctaactaacttttaagattatttgtgatatggatttatataagctgttaaatatatatgagctgttaaaatggaatgcaaggttttccaaagaccaggtctaactgtaatgattggtttattgttctacaatcccagcccggcattttccgtgtaaatcataaacaataaacaggatatactcagtgttcatttctaaaaaaaaaa

SEQ ID NO: 1998 - protein, 707 aa, Rattus norvegicus
  ref <308>: DATABASE ACCESSION NUMBER: SWISS-Prot / BAA06979
  ref <309>: DATABASE ENTRY DATE: 2003-02-01
MSQYTEKEPSVMDQDSSKAAWPRAAGGYQTITGRRYGRRHAYVSFKPCMTRHERSLGRAGDDYEVLELDDVAKENTAGSSSLDQVHPSLPSETTVEKSETEIPTCGPALNQSTESNPSVATVCHSEEVRETLDSSTNLQNHAERECTPAVCNASSVQNGIVLVHTDSYDPDSKHDENDSLQLCAQAVEGGRRQKVLGNAVFELENGEVERYADLCPSVPSLSGEIREESEELGSALLEKNSAGDAEAVHQDGQEFQRSSEDGIVRKRRQDDTDQGRQTENSTEDADCVPGHVEQNTSERANHHGSSPEQVVRPKVRKVISSSQVDQESGFNRHEAKQRSVQRWREALEVEECSSDDPIIKCDDYDGDHDCMFLTPSYSRVTPREAERHRATAENGATASGRQEARENAFWNACGEYYQLFDKDEDSSECSDGEWSASLPHRFSGTEKDQSSSDESWETLPGKDENEPELQSDSSGPEEENQELSLQEGEQTSLEEGEIPWLQYNEVNESSSDEGNEPANEFAQPEAFMLDGNNNLEDDSSVSEDLDVDWSLFDGFADGLGVAEAISYVDPQFLTYMALEERLAQAMETALAHLESLAVDVEVANPPASKESIDGLPETLVLEDHTAIGQEQCCPICCSEYIKDDIATELPCHHFFHKPCVSIWLQKSGTCPVCRRHFPPAVIDASAAASSEPDLDASPANDNAEEAP

SEQ ID NO: 1999 - DNA, 4765 bp, Homo sapiens
  ref <308>: DATABASE ACCESSION NUMBER: EMBL / AB007898
  ref <309>: DATABASE ENTRY DATE: 1999-01-11
gttctcgctccggagccgctgcacatttcggaatcttctgcggcttgtccatagtgtgaataaaaactaaatcacatctataattctactgaactggtcatacagacgctgccatatatgtcacagtacactgaaaaggagccagcagcaatggaccaagaatctggtaaggctgtctggcccaaaccagcaggagggtatcagacaattacaggcaggagatatggaagaagacatgcttatgtcagttttaaaccatgtatgaccagacatgaaagaagcttaggtcgggctggtgatgactatgaagtgttggaactagatgatgttccaaaggaaaattcctcaggttccagtcctttggatcaagttgattcttctttacccagtgaacctatatttgaaaaaagtgaaacagaaattcccacttgtggttcagcattgaatcaaaccactgagagcagtcaatcctttgttgcagtacatcacagtgaggaaggcagggataccttaggaagcagtacaaatcttcataatcactctgagggagagtatattccaggagcttgtagtgcttcaagtgtccaaaatggaattgcattggttcatacagactcttatgatccagatggcaaacatggagaagataatgaccatcttcaactttctgcagaagtcgtggaaggtagtagataccaggaatcattaggcaatacagtatttgagttggaaaacagagaggcagaggcatacactggtctttcaccaccagttccctcatttaactgtgaagtaagagatgagtttgaagagttagattctgtaccattagtgaaaagttctgctggtgatactgagtttgtccatcagaatagccaggaaattcagaggtcttctcaagatgaaatggttagtacgaaacaacaaaataatactagccaggaaagacagacagaacattcacctgaagatgcagcctgtggtccagggcatatttgtagtgaacgaaataccaatgatagggaaaagaaccatggaagttctcctgaacaggtagtgaggccaaaagttagaaaactgataagttcaagccaggtggaccaagaaacaggttttaataggcatgaggcgaaacaaagaagtgttcaaagatggagagaggctttggaagttgaggaaagtggctcagatgacctcttaataaaatgtgaagaatatgatggagagcatgactgtatgttcttggatccaccatactcaagagttattacacaaagggaaacagaaaataaccaaatgacatcagaaagtggagccacagcgggaaggcaagaagtggataacaccttttggaatggctgtggagattattaccaactctatgacaaagatgaagatagttctgaatgcagtgatggggaatggtctgcttctttgcctcatcgattttctggtacagaaaaagatcaatcctcaagtgatgaaagctgggagactctgccaggaaaagatgagaatgaacctgagctacaaagtgatagcagtggccctgaagaagaaaaccaagaattatctcttcaggaaggggaacagacatccttggaagagggagaaattccttggttacagtacaatgaagtcaatgaaagcagcagtgatgagggaaatgaacctgccaatgaatttgcacagccagctttcatgttggatggtaacaataacctggaggatgactccagtgtgagtgaagacttagatgtggattggagcctatttgatggctttgcagatggactaggagttgctgaagctatttcatatgtggatcctcagttccttacctacatggcactagaagaacgcttagcccaggctatggagactgctctggcccatttagagtctcttgcagtggatgttgaggtggccaatccaccagctagtaaggaaagcattgatggtcttccagagacccttgttcttgaagatcacactgctattggtcaggaacaatgctgtccaatctgttgcagtgagtatattaaggatgatatagcaacagagttgccctgtcaccatttctttcacaaaccttgtgtctcaatttggctacaaaagtcgggaacatgccctgtgtgccgccgtcatttcccacctgcggttattgaagcatctgcagctccttcctctgagcctgatcctgatgccccaccttcaaatgacagtattgcagaagcaccctaaaccttgacagttgaaatgagatcagtgtatcaaagtaaatctgcaaattccttctaaatttcatgtgcaaataattatatataaatatatttaaaaatgctatatatagtatatgccatagtttagaaagaatattaacctttctaaactaaatttaggtttgcagaaagtattaaacatttttaagctgaatgttgagacagtgcatccattttctttagttgaatatgtttgtattaattgtaaagccaagcttatcagttgactctctccagaataaataatcatctgtgtggcatacgttattggctttgtctgtaatactgccactaagtgattataattaagctgtcctgtttgcatcaaatgtaaagactgtgttcacaaccgtagtaaaatttggtttcattggaaatgaaacaaattctaaagtatgctttttcactagtccctttgattttgctatatcataacctcttggttcatatgctgagaaatttttcagaaagtccatttttgtttaaaattagaacttttcagaatgccaaatgaaggctaaaattttggccagaacattacaaaagttttaaatcgtagacgtaactccccctgaaataaagttaggtagtaaaatccttaatgaaaccagtggatgtgcttaacgtaaggttagtaaagcatacaaagaatctagtgtgctcagggcttggtacaatgagctgaattagatggccttatgaaactctttctaacctcttacccaacctgtttctccttggttaaaattatacttgaaggcccagaacactcatggcacatttgtttaatattgcttatagttagtttaaggtaattttgcttctacagtattttggaaggtctgaaaacttgcacagggtcatctttgtaattatataaccccaaactaagatgcacaatgtctccttcaggtgatcacacacagtggacgagtatgtgcaaacatggacataatagttcacttacaaatgtgatttgatgttaacactagagaatgatgactgtagaacatttgagcaagtaaaatagtaaagcacatagtgagtgtatgtccgtctaactggtacattgataatttagtttgggcacataaaaggaatatttatatggcttcccaaatgcagagttacatcttattcgtgtatttctctgagtatttatatcccgtctccttttttcattcttaaaaataaatgaattttcactgttggcacatatgaggcttaaatataaggaacataacacttgcattctaatttttgcatatattgtaaatgtgtctggtatttacagcaaaatactgtgtatccttttatgggtaaaacaaaagtgaacattgcatgcatgtaatgtgatgaatttgtaatttaggagttctttggggcttctgtgacttgggaaatgcttacattcaggccttaatgttgcattagctagcatgttttccctctgatgtatatagtcactgttgtataaactaatctttgcttgttttctactctgtgatctttccatatcatatttcattaatgatcagttagtgtcaaggagtcaaaacagattaaaattaatttcatgtgtatatggtggaaatttgtggctagtgtgatttttgtttgtttccttttaagtactgttgatcagttgtgacacttactggttaaacttacgttgctaaagatttctctataataagccacacattatatttagactatattaagggaccttggttttcttctagatagcagctgtcccaaagaaaatatttcttctttgtctgttaagatttagctattatctgccagttgttaagaggttttggttccaaactcaaccagcaatgttgagagctgaacttaagatagctgttgtactttttgctttccatctgttactgtccttcattcttggctccctactatctataaacagctgctgtgaagaagaaaagttgaataagagttggcttaaattttaaaaaagaaaaagaaaattgaggttttaggattttcatggtaacaagctctggtataagctaaggctggcaagttcagatactaaaatattatttgatcatatcttggatccttttgaaaaagttaagactatatgaaggtaaattagaaataagtatgaatattaataaaatagcatttatcttatttctctattttatgttgtgacttaacctaattttatttttttaacattttcttatttcttataatatgaatgctgatatttaaaggtagatctatgtggtattctttgtgtttcttaattgtttaactcttaagattatttgtgatctggatttatgtatttgttagatacatacgaattgttaaaatggaatgcaagtttttcaaaagcccaggtctaaatgtaatggttggtttattgttctataaccccagcccatcattttctgtgtaaatcataaacaataaacagaatatactcggtggtcatttctaat

SEQ ID NO: 2000 - protein, 708 aa, Homo sapiens [sequence omitted]

SEQ ID NO: 2001 - DNA, 4758 bp, Rattus norvegicus; identical to SEQ ID NO: 1997
  ref <308>: DATABASE ACCESSION NUMBER: EMBL / D32249
  ref <309>: DATABASE ENTRY DATE: 2000-04-14

SEQ ID NO: 2002 - protein, 707 aa, Rattus norvegicus; identical to SEQ ID NO: 1998
  ref <308>: DATABASE ACCESSION NUMBER: SWISS-Prot / BAA06979
  ref <309>: DATABASE ENTRY DATE: 2003-02-01

SEQ ID NO: 2003 - DNA, 4765 bp, Homo sapiens; identical to SEQ ID NO: 1999
  ref <308>: DATABASE ACCESSION NUMBER: EMBL / AB007898
  ref <309>: DATABASE ENTRY DATE: 1999-01-11

SEQ ID NO: 2004 - protein, 708 aa, Homo sapiens [sequence omitted]

SEQ ID NO: 2005 - DNA, 4758 bp, Rattus norvegicus; identical to SEQ ID NO: 1997
  ref <308>: DATABASE ACCESSION NUMBER: EMBL / D32249
  ref <309>: DATABASE ENTRY DATE: 2000-04-14

SEQ ID NO: 2006 - protein, 707 aa, Rattus norvegicus; identical to SEQ ID NO: 1998
  ref <308>: DATABASE ACCESSION NUMBER: SWISS-Prot / BAA06979
  ref <309>: DATABASE ENTRY DATE: 2003-02-01

SEQ ID NO: 2007 - DNA, 4765 bp, Homo sapiens; identical to SEQ ID NO: 1999
  ref <308>: DATABASE ACCESSION NUMBER: EMBL / AB007898
  ref <309>: DATABASE ENTRY DATE: 1999-01-11

SEQ ID NO: 2008 - protein, 708 aa, Homo sapiens [sequence omitted]

SEQ ID NO: 2009 - DNA, 3726 bp, Rattus norvegicus
  ref <308>: DATABASE ACCESSION NUMBER: EMBL / D37880
  ref <309>: DATABASE ENTRY DATE: 2000-02-01
ccggcatggtgcggcgtcgccgccgatggcgctgaggcggagcatggggcggccggggctccggccgctgctgctggcggggctggcctctctgctgctcccagggtccgcggccgcaggcctgaagctcatgggagccccagtgaagatgacagtgtctcaggggcagccagtgaagcttaactgcagtgtggaagggatggatgaccctgacatacactggatgaaggatggcgctgtggtccagaatgcaagccaggtgtccatctcaataagcgaacagaactggattggcttactcagcctaaagtcagcggagcggtctgatgccggcctgtactggtgccaggtgaaggatggggaggaaaccaagatctctcagtcagtatggctcactgttgaaggtgtgccattcttcacggtggaaccaaaagatctggcggtgccacccaatgtcccttttcaactgtcttgtgaggctgtgggtccaccagaacccgtaaccattttctggtggagaggacccactaaggttgggggacctgcttcctctccctctgttttaaatgtaacaggagtgacccagcgcacagagttttcttgtgaagctcataacataaaaggcctggccacttcccgaccagccattattcgccttcaagcaccgcctgcagctcctttcaacatcacagtaacaacgatctccagcagcaacgctagtgtggcctgggtgccgggtgctgatggcttagctctgctgcactcctgtactgtacaggtggcacatgccccaggagaatgggaggcccttgctgtcgtggttcccgtgccaccctttacttgcttgcttcggaacttggcccctgccaccaactacagccttagggttcgctgtgccaacgccttgggcccttctccctatggcgactgggtgccctttcagacaaagggcctagcgccagccagagcccctcagaatttccacgccattcgtactgactcaggccttatcctggaatgggaagaagtgattcctgaggaccctggggaaggccccctgggaccttataagctgtcctgggtccaagaaaatggaacccaggatgagctgatggtggaaggaactacggccaatctgactgactgggatccccagaaggacctggttttgcgtgtgtgtgcctccaatgcaattggtgatgggccctggagtcaaccactggtggtgtcttctcatgaccatgcagggaggcagggccctcctcacagccgtacatcctgggtgcctgtggtcctgggtgtgctcaccgccctgatcacagctgctgccttggccctcatcctgcttcggaagagacgcaaggagacgcggttcgggcaagcctttgacagtgtcatggcccgaggggagccagctgtacacttccgggcagcccggtctttcaatcgagaaaggcctgaacgcattgaagctacattggatagcctgggcatcagcgatgaattgaaggagaagctggaggacgtcctcatcccagagcagcagttcaccctcggccggatgttgggcaaaggagagtttggatcagtgcgggaagcccagctgaagcaggaagatggctcctttgtgaaagtggcagtgaagatgctgaaagctgacatcattgcctcaagcgacatagaagagttcctgagagaagcagcttgcatgaaggagtttgaccatccacacgtggccaagcttgttggagtgagcctccggagcagggctaaaggtcgtctccccattcccatggtcatcctgcccttcatgaagcacggagacttgcatgcctttctgctcgcctcccgaattggggagaacccttttaacctgcccctccagaccctcgtccggttcatggtggacattgcctgtggcatggagtacctgagctcccggaacttcatccaccgagacctagcagctcggaattgcatgctggcagaggacatgacagtgtgtgtggctgactttggactctcccggaaaatttatagcggggactattatcgtcagggctgtgcctccaaactgcctgtcaagtggctggccctggagagcttggctgacaacttgtatactgtacacagcgatgtgtgggccttcggggtgaccatgtgggagatcatgactcgtgggcagacgccatatgctggcatcgaaaatgctgagatttacaactacctcatcagcgggaaccgcctgaagcagcctccggagtgcatggaggaagtgtatgatctcatgtaccagtgctggagtgccgacccaaagcagcgcccaagcttcacatgcctgcgaatggaactggagaacattctgggccacctatctgttctgtccaccagccaggaccccttgtacatcaacattgagagagctgggcagcctgctgagaatggcagtcccgagctgccctgtggagagcagtctagcagcgaggcgggggatggcagtggcatgggggcaataggtggcatccccagtgactgtcggtacatcttcagccctggagggttggccgagtcaccagggcagctggagcagcagccagaaagccccctcaacgagaaccagaggcttttgttgttgcagcaagggctactgcctcacagtagctgttaacctgcaggcagaggacagctggggccccctggctctgccggccattgcgctggcttactaggccccgtctgatcacagcccaggcagcaaggtatggaggctcctgtggtagtcctcccaagctgtgctgggacctggactgaccaaattgcccaatcccagttcttcctgcagccgctctggccagcctggcatcagttcaggccttggcttagaggaggtgagccagatctggttgcctgaatgcaggcagctggcaggaggggagggtggctgtgtttccatgggtaccatgggtgtggatggcagtaagggagggtagcagcagccctgtgggcccctaccctcctggctgagctgctcctactttagtgcatgcttggagccgcctgcagcctggagctcagcactgcccaccacacctgagtttaaatgccaggtttgcccctctacgtcacaaagagatgtccttgtattgttcccttttaggtgacgattaggaagggattggcacacttaggtccttaagccccatgacaggaaatggtgggatattctcaggtccgaatcctcatcaccttcctgattccccaccctgccatggcctggaactgactgggtggctgagggatgcacgaggacaaagactaccgagatccgactcctaaaggcagggtctgagtctgccagatggagggggtgctaagaggttggcccaggagtcaggcatttcaggacccctctaagcttctacagtctgtctgagcatgctaccaagcccccaaacatcccagaactaacaggcagttttgtctgagcccagcccttccacatggtgacccttaggtctaccatcctctctgaatggatatcacttgtcccaagtcttaagagagagatacacctgatggctgatgtgggtaagaaaagttcctggaaccagggctggggtctaggcaccgcactgcaaacctcctggaatgcagaggcaggctcttgggctgttaggaacatttccaagctattaagttgctgtttcaaaacaataaaattgaaac

SEQ ID NO: 2010 - protein, 880 aa, Rattus norvegicus
  ref <308>: DATABASE ACCESSION NUMBER: SWISS-Prot / P55146
  ref <309>: DATABASE ENTRY DATE: 2002-06-15
MALRRSMGRPGLRPLLLAGLASLLLPGSAAAGLKLMGAPVKMTVSQGQPVKLNCSVEGMDDPDIHWMKDGAVVQNASQVSISISEQNWIGLLSLKSAERSDAGLYWCQVKDGEETKISQSVWLTVEGVPFFTVEPKDLAVPPNVPFQLSCEAVGPPEPVTIFWWRGPTKVGGPASSPSVLNVTGVTQRTEFSCEAHNIKGLATSRPAIIRLQAPPAAPFNITVTTISSSNASVAWVPGADGLALLHSCTVQVAHAPGEWEALAVVVPVPPFTCLLRNLAPATNYSLRVRCANALGPSPYGDWVPFQTKGLAPARAPQNFHAIRTDSGLILEWEEVIPEDPGEGPLGPYKLSWVQENGTQDELMVEGTTANLTDWDPQKDLVLRVCASNAIGDGPWSQPLVVSSHDHAGRQGPPHSRTSWVPVVLGVLTALITAAALALILLRKRRKETRFGQAFDSVMARGEPAVHFRAARSFNRERPERIEATLDSLGISDELKEKLEDVLIPEQQFTLGRMLGKGEFGSVREAQLKQEDGSFVKVAVKMLKADIIASSDIEEFLREAACMKEFDHPHVAKLVGVSLRSRAKGRLPIPMVILPFMKHGDLHAFLLASRIGENPFNLPLQTLVRFMVDIACGMEYLSSRNFIHRDLAARNCMLAEDMTVCVADFGLSRKIYSGDYYRQGCASKLPVKWLALESLADNLYTVHSDVWAFGVTMWEIMTRGQTPYAGIENAEIYNYLISGNRLKQPPECMEEVYDLMYQCWSADPKQRPSFTCLRMELENILGHLSVLSTSQDPLYINIERAGQPAENGSPELPCGEQSSSEAGDGSGMGAIGGIPSDCRYIFSPGGLAESPGQLEQQPESPLNENQRLLLLQQGLLPHSSC

SEQ ID NO: 2011 - DNA, 3031 bp, Homo sapiens
  ref <308>: DATABASE ACCESSION NUMBER: EMBL / U02566
  ref <309>: DATABASE ENTRY DATE: 1999-06-30
cctctccatctgttttaaatgtaacaggggtgacccagagcaccatgttttcctgtgaagctcacaacctaaaaggcctggcctcttctcgcacagccactgttcaccttcaagcactgcctgcagcccccttcaacatcaccgtgacaaagctttccagcagcaacgctagtgtggcctggatgccaggtgctgatggccgagctctgctacagtcctgtacagttcaggtgacacaggccccaggaggctgggaagtcctggctgttgtggtccctgtgcccccctttacctgcctgctccgggacctggtgcctgccaccaactacagcctcagggtgcgctgtgccaatgccttggggccctctccctatgctgactgggtgccctttcagaccaagggtctagccccagccagcgctccccaaaacctccatgccatccgcacagattcaggcctcatcttggagtgggaagaagtgatccccgaggcccctttggaaggccccctgggaccctacaaactgtcctgggttcaagacaatggaacccaggatgagctgacagtggaggggaccagggccaatttgacaggctgggatccccaaaaggacctgatcgtacgtgtgtgcgtctccaatgcagttggctgtggaccctggagtcagccactggtggtctcttctcatgaccgtgcaggccagcagggccctcctcacagccgcacatcctgggtacctgtggtccttggtgtgctaacggccctggtgacggctgctgccctggccctcatcctgcttcgaaagagacggaaagagacgcggtttgggcaagcctttgacagtgtcatggcccggggagagccagccgttcacttccgggcagcccggtccttcaatcgagaaaggcccgagcgcatcgaggccacattggacagcttgggcatcagcgatgaactaaaggaaaaactggaggatgtgctcatcccagagcagcagttcaccctgggccggatgttgggcaaaggagagtttggttcagtgcgggaggcccagctgaagcaagaggatggctcctttgtgaaagtggctgtgaagatgctgaaagctgacatcattgcctcaagcgacattgaagagttcctcagggaagcagcttgcatgaaggagtttgaccatccacacgtggccaaacttgttggggtaagcctccggagcagggctaaaggccgtctccccatccccatggtcatcttgcccttcatgaagcatggggacctgcatgccttcctgctcgcctcccggattggggagaacccctttaacctacccctccagaccctgatccggttcatggtggacacttgcggcatggagtacctgagctctcggaacttcatccaccgagacctggctgctcggaattgcatgctggcagaggacatgacagtgtgtgtggctgacttcggactctcccggaagatctacagtggggactactatcgtcaaggctgtgcctccaaactgcctgtcaagtggctggccctggagagcctggccgacaacctgtatactgtgcagagtgacgtgtgggcgttcggggtgaccatgtgggagatcatgacacgtgggcagacgccatatgctggcatcgaaaacgctgagatttacaactacctcattggcgggaacctgaaacagcctccggagtgtatggaggacgtgtatgatctcatgtaccagtgctggagtgctgaccccaagcagcgcccgagctttacttgtctgcgaatggaactggagaacatcttgggccagctgtctgtgctatctgccagccaggaccccttatacatcaacatcgagagagctgaggagcccactgcgggaggcagcctggagctacctggcagggatcagccctacagtggggctggggatggcagtggcatgggggcagtgggtggcactcccagtgactgtcggtacatactcacccccggagggctggctgagcagccagggcaggcagagcaccagccagagagtcccctcaatgagacacagaggcttttgctgctgcagcaagggctactgcacacagtagctgttagcccacaggagagggcatcggggccatttgcggctctggtggccactgagctggctgactaagccccgtctgaccccagcccagacagcaaggtgtggaggctcctgtggtagtcctcccaagctgtgctgggaagcccggactgaccaaatcacccaatcccagttcttcctgcaaccactctgtgccagcctggcatcagtttaggccttggcttcattggaagtgggccagtcctggttgtctgaacccaggcagctggcaggagtggggtggttatgtttctaggttacatggtgtggatggcagtgtgggagggcaggtcagctctgtggcctacctctcctgctgagctgcccctgctgcttaagtgcatgcattgagctgcctccagcctggtggcccagctattaccacacttggggtttaaatattccaggtgtgcccctccaagtcacaaagagatgtccttgtaatattcccttttaggtgagggttggtaaggggttggtatctcaggtctgaatcttcaaccatctttctgattccgcaccctgcctacgccaggagaagttgaggggagcatgcttccctgcagctgaccgggtcacacaaaggcatgctggagtacccagcctatcaggtgcccctcttccaaaggcagcgtgccgagccagcaagaggaaggggtgctgtgaggcttgcccaggagcaagtgaggccggagaggagttcaggaacccttctccatacccacaatctgagcacgctaccaaatctcaaaatatcctaagactaacaaaggcagctgtgtctgagcccaacccttctaaacggtgacctttagtgccaacttcccctctaactggacagcctcttctgtcccaagtctccagagagaaatcaggcctgatgaggg

SEQ ID NO: 2012 - protein, 890 aa, Homo sapiens
  ref <308>: DATABASE ACCESSION NUMBER: SWISS-Prot / Q06418
  ref <309>: DATABASE ENTRY DATE: 2002-06-15
MALRRSMGRPGLPPLPLPPPPRLGLLLAALASLLLPESAAAGLKLMGAPVKLTVSQGQPVKLNCSVEGMEEPDIQWVKDGAVVQNLDQLYIPVSEQHWIGFLSLKSVERSDAGRYWCQVEDGGETEISQPVWLTVEGVPFFTVEPKDLAVPPNAPFQLSCEAVGPPEPVTIVWWRGTTKIGGPAPSPSVLNVTGVTQSTMFSCEAHNLKGLASSRTATVHLQALPAAPFNITVTKLSSSNASVAWMPGADGRALLQSCTVQVTQAPGGWEVLAVVVPVPPFTCLLRDLVPATNYSLRVRCANALGPSPYADWVPFQTKGLAPASAPQNLHAIRTDSGLILEWEEVIPEAPLEGPLGPYKLSWVQDNGTQDELTVEGTRANLTGWDPQKDLIVRVCVSNAVGCGPWSQPLVVSSHDRAGQQGPPHSRTSWVPVVLGVLTALVTAAALALILLRKRRKETRFGQAFDSVMARGEPAVHFRAARSFNRERPERIEATLDSLGISDELKEKLEDVLIPEQQFTLGRMLGKGEFGSVREAQLKQEDGSFVKVAVKMLKADIIASSDIEEFLREAACMKEFDHPHVAKLVGVSLRSRAKGRLPIPMVILPFMKHGDLHAFLLASRIGENPFNLPLQTLIRFMVDIACGMEYLSSRNFIHRDLAARNCMLAEDMTVCVADFGLSRKIYSGDYYRQGCASKLPVKWLALESLADNLYTVQSDVWAFGVTMWEIMTRGQTPYAGIENAEIYNYLIGGNRLKQPPECMEDVYDLMYQCWSADPKQRPSFTCLRMELENILGQLSVLSASQDPLYINIERAEEPTAGGSLELPGRDQPYSGAGDGSGMGAVGGTPSDCRYILTPGGLAEQPGQAEHQPESPLNETQRLLLLQQGLLPHSSC

SEQ ID NO: 2013 - DNA, 3477 bp, Rattus norvegicus
  ref <308>: DATABASE ACCESSION NUMBER: EMBL / D38222
  ref <309>: DATABASE ENTRY DATE: 1999-01-21
cgagagctcagagccgggaaggatgaggcgcccgcggcggcccggaggtcccgcgggctgcgggggctccgagggttccgggggccttcggctgctggtctgcctgctgttgttgagcggcccgccccgggggctgcagcgccatcagtgcccacggctgtctctttgaccgcagactttgttcgcatctggaagtctgtattcaggatggcttgtttggacagtgccaggcaggagtggggcaggcacggcccctgttacaagtcacttccccagttctccagcgcttacaaggtgtgctccggcaactcatgtcccaaggcttgttcctggcatgatgacctcacccagtatgtgatctcccaggagatggaacgaatccccaggcttcgtcccccagaacctcatccaagggacagatctggatcggtgcccaggagagcaggcccagcaggggaattgctttctcagggcaatcccactggctcctctcctgctgtccaggggctctctcggcctccaggggatgggaatggagctggggtgggctccccactgtcctctctgcaggctgagctgttaccccctctcttggagcatctgctaatgcccccgcagcctccacacccgtctctgacctatgaacctgcattgctacaaccttacttgttccagcagtttggttcccgagatggctcccggggctcagagagcgcctctggggtagttggccatctggccaaggctgaagatcctgtactcttcagcagaagcctctccaaggccattttggggactcactctggacactcctttggtgaccttacaggtccctcacctgctcagcttttccaggattcagggctgctctacatggcccaagagttgccagtgcctggcagagcccgggcgccaaggttgccagaggaagggggcagcagccgggcagaggactcttcagagggccatgaggaggaagtactagggggtcatggggagaagtcccctccccaagcagtacaagcagatgtaagtctgcagagattggctgctgtgctggcaggctacggagtagagctgcgtcagctgaccccggaacagctttctaccctcttaaccctgctgcagttactgcccaagggcacaggaagacatcttggaggggctgtgaacggaggagccgatgtcaagaaaacaatagaagaacaaatgcagagaggggacacagcagacgctcggccccccacacccttgcttcctggacaccccactgccagctccacctccatcaaagttcggcaggtgctgagccctggtttccctgaacctcccaagacatccagtcctctgggcatctcggctgtcctgctggagaagaaaagtcccttgggccagagccagcccacagtggtgggacagccttcagctcgaccgtccgctgaggagtatggctatatagtcactgatcagaaacccctgagtctggtggctggagtgaagttgctggagatcctggctgaacatgtgcacatgacttcaggcagcttcatcaacatcagtgtggtaggaccagctgtcaccttccgaatccggcacaatgagcagaacttgtctttggcagatgtgacccagcaagctgggctggtgaagtctgaactggaagcgcagacagggctccagattttgcagacaggggtgggacagagggaggaatccgccgcagtccttccccgacaagcccatcggatatctcccatgcgctcattgctgcttactctggtggccctggcaggtgtcgctgggctactagtagctttggcggtggccctgtgtatgcgccatcattcgaaacaacgggataaggagcgcctggccgcgctggggccggagggggcccacggtgacactacttttgaataccaggacctgtgtcgccagcacatggccacaaagtcgctgtttaaccgggcagagggtcagccagagccttctcgggtgagcagtgtgtcctcccagttcagtgacgcggcccaggccagccccagttcccacagcagcacaccgtcctggtgcgaggagcctgcccaggccaacatggacatctccacaggacacatgattctggcatacatggaggatcacctccggaaccgggaccggttggccaaggagtggcaggccctgtgcgcctaccaagcggagccaaacacctgtgccaccgcacaaggtgaaggcaacatcaagaagaaccgccatcctgacttcttaccctatgaccatgcccgaatcaagctgaaagtggagagcagcccctctcggagtgattacatcaacgccagtcccatcatcgagcatgaccctcggatgccggcctacatagccacacagggacccctgtcccacaccatcgcagacttctggcagatggtgtgggagagtggctgcactgtcatcgttatgctgacccctttggtggaggatggtgtcaaacagtgtgaccgctactggccggatgaagggtcctccctctaccacgtctatgaggtgaacctggtgtctgagcacatctggtgcgaggacttcctggtgcggagcttctacctgaagaacgtgcagacccaggagacgcgcacgctcactcagttccacttcctcagctggccggcagagggcactccggcctccacccggccgctgctggacttccgcaggaaagtgaacaagtgctacagaggccgctcctgtcccatcatagtgcactgcagtgatggtgcagggaggacaggcacctacatccttattgacatggtactgaatcgcatggcgaaaggagtgaaggagattgatatcgctgccaccctggagcatgtccgtgaccagcgacctggccttgtccgttctaaggaccagtttgagtttgcgctgacagccgtggcggaggaggtgaatgccatcctcaaggccctgccccagtgagccccctgggtacctcagtgggcatcctggcctctgctccttctgcctgtgtgtgagcatttgtgcacccactcttcagcccctacccatctgccaccttggtccgtccgacttgggcatgatagccctttccaacccagtgtggaaggaagtcgggagggaaggggcaggtccaccctgctttattcacgctagaaccaagatctcctgtgggaaacagacagcaggcaaggggaggagtggacaccagcagcaagtgtgcccgagccccatccttcctgagtctctgtctccctctgtgtgtgtacctccccactcccaccagcctatcgtgtatagacaaagcagaatgagaaggccccagctccccccagtcctgctaccactggcctgccaccttgaccctgctcaaccttctccctctagcacaagcaaacatttctagaaaaatctacttttgtatcaatgtgaataaagttagtgtgttgtctgtgcagctgc

SEQ ID NO: 2014 - protein, 923 aa, Rattus norvegicus
  misc_feature (1)..(923): Xaa=Unknown amino acid
MACLDSARQEWGRHGPCYKSLPQFSSAYKVCSGNSCPKACSWHDDLTQYVISQEMERIPRLRPPEPHPRDRSGSVPRRAGPAGELLSQGNPTGSSPAVQGLSRPPGDGNGAGVGSPLSSLQAELLPPLLEHLLMPPQPPHPSLTYEPALLQPYLFQQFGSRDGSRGSESASGVVGHLAKAEDPVLFSRSLSKAILGTHSGHSFGDLTGPSPAQLFQDSGLLYMAQELPVPGRARAPRLPEEGGSSRAEDSSEGHEEEVLGGHGEKSPPQAVQADVSLQRLAAVLAGYGVELRQLTPEQLSTLLTLLQLLPKGTGRHLGGAVNGGADVKKTIEEQMQRGDTADARPPTPLLPGHPTASSTSIKVRQVLSPGFPEPPKTSSPLGISAVLLEKKSPLGQSQPTVVGQPSARPSAEEYGYIVTDQKPLSLVAGVKLLEILAEHVHMTSGSFINISVVGPAVTFRIRHNEQNLSLADVTQQAGLVKSELEAQTGLQILQTGVGQREESAAVLPRQAHRISPMRSLLLTLVALAGVAGLLVALAVALCMRHHSKQRDKERLAALGPEGAHGDTTFEYQDLCRQHMATKSLFNRAEGQPEPSRVSSVSSQFSDAAQASPSSHSSTPSWCEEPAQANMDISTGHMILAYMEDHLRNRDRLAKEWQALCAYQAEPNTCATAQGEGNIKKNRHPDFLPYDHARIKLKVESSPSRSDYINASPIIEHDPRMPAYIATQGPLSHTIADFWQMVWESGCTVIVMLTPLVEDGVKQCDRYWPDEGSSLYHVYEVNLVSEHIWCEDFLVRSFYLKNVQTQETRTLTQFHFLSWPAEGTPASTRPLLDFRRKVNKCYRGRSCPIIVHCSDGAGRTGTYILIDMVLNRMAKGVKEIDIAATLEHVRDQRPGLVRSKDQFEFALTAVAEEVNAILKALPQX

SEQ ID NO: 2015 - DNA, 3613 bp, Homo sapiens
  ref <308>: DATABASE ACCESSION NUMBER: EMBL / L18983
  ref <309>: DATABASE ENTRY DATE: 1999-07-02
cagcccctctggcaggctcccgccagcgtcgctgcggctccggcccgggagcgagcgcccggagctcggaaagatgcggcgcccgcggcggcctgggggtctcgggggatccgggggtctccggctgctcctctgcctcctgctgctgagcagccgcccggggggctgcagcgccgttagtgcccacggctgtctatttgaccgcaggctctgctctcacctggaagtctgtattcaggatggcttgtttgggcagtgccaggtgggagtggggcaggcccggccccttttgcaagtcacctccccagttctccaacgcttacaaggtgtgctccgacaactcatgtcccaaggattgtcctggcacgatgacctcacccagtatgtgatctctcaggagatggagcgcatccccaggcttcgccccccagagccccgtccaagggacaggtctggcttggcacccaagagacctggtcctgctggagagctgcttttacaggacatccccactggctccgcccctgctgcccagcatcggcttccacaaccaccagtgggcaaaggtggagctggggccagctcctctctgtcccctctgcaggctgagctgctcccgcctctcttggagcacctgctgctgcccccacagcctccccacccttcactgagttacgaacctgccttgctgcagccctacctgttccaccagtttggctcccgtgatggctccagggtctcagagggctccccagggatggtcagtgtcggccccctgcccaaggctgaagcccctgccctcttcagcagaactgcctccaagggcatatttggggaccaccctggccactcctacggggaccttccagggccttcacctgcccagctttttcaagactctgggctgctctatctggcccaggagttgccagcacccagcagggccagggtgccaaggctgccagagcaagggagcagcagccgggcagaggactccccagagggctatgagaaggaaggactaggggatcgtggagagaagcctgcttccccagctgtgcagccagatgcggctctgcagaggctggccgctgtgctggcgggctatggggtagagctgcgtcagctgacccctgagcagctctccacactcctgaccctgctgcagctactgcccaagggtgcaggaagaaatccgggaggggttgtaaatgttggagctgatatcaagaaaacaatggaggggccggtggagggcagagacacagcagagcttccagcccgcacatcccccatgcctggacaccccactgccagccctacctccagtgaagtccagcaggtgccaagccctgtctcctctgagcctcccaaagctgccagaccccctgtgacacctgtcctgctagagaagaaaagcccactgggccagagccagcccacggtggcaggacagccctcagcccgcccagcagcagaggaatatggctacatcgtcactgatcagaagcccctgagcctggctgcaggagtgaagctgctggagatcctggctgagcatgtgcacatgtcctcaggcagcttcatcaacatcagtgtggtgggaccagccctcaccttccgcatccggcacaatgagcagaacctgtctttggctgatgtgacccaacaagcagggctggtgaagtctgaactggaagcacagacagggctccaaatcttgcagacaggagtgggacagagggaggaggcagctgcagtccttccccaaactgcgcacagcacctcacccatgcgctcagtgctgctcactctggtggccctggcaggtgtggctgggctgctggtggctctggctgtggctctgtgtgtgcggcagcatgcgcggcagcaagacaaggagcgcctggcagccctggggcctgagggggcccatggtgacactacctttgagtaccaggacctgtgccgccagcacatggccacgaagtccttgttcaaccgggcagagggtccaccggagccttcacgggtgagcagtgtgtcctcccagttcagcgacgcagcccaggccagccccagctcccacagcagcaccccgtcctggtgcgaggagccggcccaagccaacatggacatctccacgggacacatgattctggcatacatggaggatcacctgcggaaccgggaccgccttgccaaggagtggcaggccctctgtgcctaccaagcagagccaaacacctgtgccaccgcgcagggggagggcaacatcaaaaagaaccggcatcctgacttcctgccctatgaccatgcccgcataaaactgaaggtggagagcagcccttctcggagcgattacatcaacgccagccccattattgagcatgaccctcggatgccagcctacatagccacgcagggcccgctgtcccataccatcgcagacttctggcagatggtgtgggagagcggctgcaccgtcatcgtcatgctgaccccgctggtggaggatggtgtcaagcagtgtgaccgctactggccagatgagggtgcctccctctaccacgtatatgaggtgaacctggtgtcggagcacatctggtgcgaggactttctggtgcggagcttctacctgaagaacgtgcagacccaggagacgcgcacgctcacgcagttccacttcctcagctggccggcagagggcacaccggcctccacgcggcccctgctggacttccgcaggaaggtgaacaagtgctaccggggccgctcctgccccatcatcgtgcactgcagtgatggtgcggggaggaccggcacctacatcctcatcgacatggtcctgaaccgcatggcaaaaggagtgaaggagattgacatcgctgccaccctggagcatgtccgtgaccagcggcctggccttgtccgctctaaggaccagtttgaatttgccctgacagccgtggcggaggaagtgaatgccatcctcaaggccctgccccagtgagaccctggggccccttggcgggcagcccagcctctgtccctctttgcctgtgtgagcatctctgtgtacccactcctcactgccccaccagccacctcttgggcatgctcagcccttcctagaagagtcaggaagggaaagccagaaggggcacgcctgcccagcctcgcatgccagagcctggggcatcccagagcccagggcatcccatgggggtgctgcagccaggaggagaggaaaggacatgggtagcaattctacccagagccttctcctgcctacattccctggcctggctctcctgtagctctcctggggttctgggagttccctgaacatctgtgtgtgtccccctatgctccagtatggaagaatggggtggagggtcgccacacccggctccccctgcttctcagccccgggcctgcctctgactcacacttgggcgctctgccctccctggcctcacgcccagcctggtcccaccaccctcccaccatgcgctgctcaacctctctccttctggcgcaagagaacatttctagaaaaaactacttttgtaccagtgtgaataaagttagtgtgttgtctgtgcagctg

SEQ ID NO: 2016 - protein, 979 aa, Homo sapiens
  ref <308>: DATABASE ACCESSION NUMBER: SWISS-Prot / Q16849
  ref <309>: DATABASE ENTRY DATE: 2002-06-15
MRRPRRPGGLGGSGGLRLLLCLLLLSSRPGGCSAVSAHGCLFDRRLCSHLEVCIQDGLFGQCQVGVGQARPLLQVTSPVLQRLQGVLRQLMSQGLSWHDDLTQYVISQEMERIPRLRPPEPRPRDRSGLAPKRPGPAGELLLQDIPTGSAPAAQHRLPQPPVGKGGAGASSSLSPLQAELLPPLLEHLLLPPQPPHPSLSYEPALLQPYLFHQFGSRDGSRVSEGSPGMVSVGPLPKAEAPALFSRTASKGIFGDHPGHSYGDLPGPSPAQLFQDSGLLYLAQELPAPSRARVPRLPEQGSSSRAEDSPEGYEKEGLGDRGEKPASPAVQPDAALQRLAAVLAGYGVELRQLTPEQLSTLLTLLQLLPKGAGRNPGGVVNVGADIKKTMEGPVEGRDTAELPARTSPMPGHPTASPTSSEVQQVPSPVSSEPPKAARPPVTPVLLEKKSPLGQSQPTVAGQPSARPAAEEYGYIVTDQKPLSLAAGVKLLEILAEHVHMSSGSFINISVVGPALTFRIRHNEQNLSLADVTQQAGLVKSELEAQTGLQILQTGVGQREEAAAVLPQTAHSTSPMRSVLLTLVALAGVAGLLVALAVALCVRQHARQQDKERLAALGPEGAHGDTTFEYQDLCRQHMATKSLFNRAEGPPEPSRVSSVSSQFSDAAQASPSSHSSTPSWCEEPAQANMDISTGHMILAYMEDHLRNRDRLAKEWQALCAYQAEPNTCATAQGEGNIKKNRHPDFLPYDHARIKLKVESSPSRSDYINASPIIEHDPRMPAYIATQGPLSHTIADFWQMVWESGCTVIVMLTPLVEDGVKQCDRYWPDEGASLYHVYEVNLVSEHIWCEDFLVRSFYLKNVQTQETRTLTQFHFLSWPAEGTPASTRPLLDFRRKVNKCYRGRSCPIIVHCSDGAGRTGTYILIDMVLNRMAKGVKEIDIAATLEHVRDQRPGLVRSKDQFEFALTAVAEEVNAILKALPQ

SEQ ID NO: 2017 - DNA, 1097 bp, Rattus norvegicus
  ref <308>: DATABASE ACCESSION NUMBER: EMBL / D38455
  ref <309>: DATABASE ENTRY DATE: 2000-02-01
ggagagaggagccgagacagccaagatgctgaagctgctgctgctgctggcactgtcccccctggctagtctggtgcacgcggccccttgcccagtcaagcagcgagtgggcattgtgggaggacgagaggcttctgaaagtaagtggccctggcaggtgagcctgagatttaaattcagcttctggatgcatttctgtggcggctccctcattcacccacagtgggtgctcactgcggcacactgtgtgggactgcacatcaaaagcccagagctcttccgtgtacagcttcgtgagcagtatctatactatgcggaccagctactgactgtgaaccggaccgttgtgcacccccactactacacagtcgaggatggggcagacattgccctgctggagcttgagatccctgtgaatgtctccacccatatccaccccatatccctgccccctgcctcggagaccttcccctcggggacttcttgctgggtaacaggctggggcgacattgatagtgacgagcctctcctgccaccttatcctctgaagcaagtgaaggtccccattgtggaaaacagcctgtgtgatcggaagtaccacactggcctctacacaggagatgatgttcccattgtccaggatggcatgctgtgtgctggaaataccaggagcgactcctgccagggagactcagggggcccactggtctgcaaagtgaagggtacctggctgcaagcaggagtggtcagctggggtgagggctgcgcagaggccaatcgtcctggcatttacacccgggtgacgtactacctggactggattcaccgctatgtccctcagcgttcctgagacccatccagggtcagggaagaaccaggcacctgctgtctttaactcactgcttcctggccagatggaaccctggccttctttgtactctgtctcccctgtctaccgggtgtccctctgagcccccactttgttccaccttgagtccctcgccactcctgtcccctctgcctcccaccacaacacagctgcactgtgcggctccctcttttctgtggctcattaaagtatgtgaaaattttgctcc

SEQ ID NO: 2018 - protein, 274 aa, Rattus norvegicus
  ref <308>: DATABASE ACCESSION NUMBER: SWISS-Prot / P50343
  ref <309>: DATABASE ENTRY DATE: 2001-10-16
MLKLLLLLALSPLASLVHAAPCPVKQRVGIVGGREASESKWPWQVSLRFKFSFWMHFCGGSLIHPQWVLTAAHCVGLHIKSPELFRVQLREQYLYYADQLLTVNRTVVHPHYYTVEDGADIALLELEIPVNVSTHIHPISLPPASETFPSGTSCWVTGWGDIDSDEPLLPPYPLKQVKVPIVENSLCDRKYHTGLYTGDDVPIVQDGMLCAGNTRSDSCQGDSGGPLVCKVKGTWLQAGVVSWGEGCAEANRPGIYTRVTYYLDWIHRYVPQRS

SEQ ID NO: 2019 - DNA, 1142 bp, Homo sapiens
  ref <308>: DATABASE ACCESSION NUMBER: Refseq / XM_018104
  ref <309>: DATABASE ENTRY DATE: 2002-08-01
gatgctgaatctgctgctgctggcgctgcccgtcctggcgagccgcgcctacgcggcccctgccccaggccaggccctgcagcgagtgggcatcgttgggggtcaggaggcccccaggagcaagtggccctggcaggtgagcctgagagtccgcgaccgatactggatgcacttctgcgggggctccctcatccacccccagtgggtgctgaccgcagcgcactgcgtgggaccggacgtcaaggatctggccgccctcagggtgcaactgcgggagcagcacctctactaccaggaccagctgctgccggtcagcaggatcatcgtgcacccacagttctacaccgcccagatcggagcggacatcgccctgctggagctggaggagccggtgaacgtctccagccacgtccacacggtcaccctgccccctgcctcagagaccttccccccggggatgccgtgctgggtcactggctggggcgatgtggacaatgatgagcgcctcccaccgccatttcctctgaagcaggtgaaggtccccataatggaaaaccacatttgtgacgcaaaataccaccttggcgcctacacgggagacgacgtccgcatcgtccgtgacgacatgctgtgtgccgggaacacccggagggactcatgccagggcgactccggagggcccctggtgtgcaaggtgaatggcacctggctgcaggcgggcgtggtcagctggggcgagggctgtgcccagcccaaccggcctggcatctacacccgtgtcacctactacttggactggatccaccactatgtccccaaaaagccgtgagtcaggcctggggtgtccacctgggtcactggagagccagcccctcctgtccaaaacaccactgcttcctacccaggtggcgactgccccccacaccttccctgccccgtcctgagtgccccttcctgtcctaagccccctgctctcttctgagccccttcccctgtcctgaggacccttccccatcctgagcccccttccctgtcctaagcctgacgcctgcaccgggccctccggccctcccctgcccaggcagctggtggtgggcgctaatcctcctgagtgctggacctcattaaagtgcatggaaatc

SEQ ID NO: 2020 - protein, 275 aa, Homo sapiens
  ref <308>: DATABASE ACCESSION NUMBER: Refseq / XP_018104
  ref <309>: DATABASE ENTRY DATE: 2002-08-01
MLNLLLLALPVLASRAYAAPAPGQALQRVGIVGGQEAPRSKWPWQVSLRVRDRYWMHFCGGSLIHPQWVLTAAHCVGPDVKDLAALRVQLREQHLYYQDQLLPVSRIIVHPQFYTAQIGADIALLELEEPVNVSSHVHTVTLPPASETFPPGMPCWVTGWGDVDNDERLPPPFPLKQVKVPIMENHICDAKYHLGAYTGDDVRIVRDDMLCAGNTRRDSCQGDSGGPLVCKVNGTWLQAGVVSWGEGCAQPNRPGIYTRVTYYLDWIHHYVPKKP

SEQ ID NO: 2021 - DNA, 3214 bp, Rattus norvegicus
  ref <308>: DATABASE ACCESSION NUMBER: EMBL / D38492
  ref <309>: DATABASE ENTRY DATE: 1998-05-29
ccgccaaaggggcaatttgaagcagatattataccgagaccggcagatgattcaacacatacggtctttcatagttgtcaactgccataaagctcccattccttctggaaactgacccatctattcaacagaagatgaaaaccccattgctggtcagtcatctcctgctaatctccttaacatcctgtctaggagagtttacatggcacagaagatatggtcatggagtttctgaggaggataaaggatttggacccatttttgaagagcaaccaatcaataccatttacccagaagagtcactggaaggcaaagtgtcgctcaactgccgggcacgggcaagcccatttccggtttacaagtggagaatgaataacggggacgttgacctgacgaacgatcgatacagcatggtcggagggaaccttgttatcaataaccctgacaaacagaaagacgcaggaatatactactgcttggcgtccaacaactacgggatggtcagaagcaccgaggccaccctgagctttgggtatcttgacccctttcctcctgaggatcgtcctgaagtgaaggtgaaggaagggaagggcatggtgcttctctgcgaccctccctaccacttcccagacgatcttagctaccgctggcttctgaatgaatttcccgtctttatcacaatggataagcgaagattcgtgtctcagaccaacggtaatctctacatcgcgaacgttgagtcttctgatagaggcaactattcctgcttcgtgtccagcccttctattacaaagagcgtgttcagcaaatttatacccctcattccgatacctgagcgaacaacgaagccatatcctgctgacattgtagtgcagttcaaggacatatacaccatgatgggccaaaatgtgaccttagagtgcttcgctcttggaaaccctgttcctgatattcggtggcggaaggtgctagaacccatgcctaccacagctgagatcagcacctcaggggctgtcctcaagatcttcaacatccagctagaagatgaagggctctacgagtgcgaggctgagaacattaggggaaaggacaagcaccaggcaagaatttatgttcaagcatttcctgaatgggtagagcatatcaatgacactgaagtggacataggcagtgacctctactggccttgtgtggccacagggaagcccatccctaccatcaggtggctgaaaaatgggtacgcgtatcacaaaggggaactgaggctgtatgacgtgacttttgaaaacgccgggatgtaccagtgcatagcagaaaacgcgtatgggaccatttatgcaaatgctgaactcaagatcctggctttagctccaacttttgaaatgaatcccatgaagaagaagatcctggctgcgaaaggaggaagggttatcattgagtgcaaacccaaggctgcaccaaaacccaagttttcatggagcaaagggacagagtggcttgtcaacagcagcagaatactcatatgggaagatggtagcttggaaatcaataatattacaagaaatgatggaggaatctatacatgctttgcagaaaacaacagagggaaagctaatagcaccgggactctggtgatcacaaatcccacacgaatcattttggccccaatcaatgctgatatcactgttggagaaaacgctaccatgcagtgtgctgcctcctttgatccttccttggatctcacgttcgtctggtctttcaatggctacgtgattgactttaacaaggaaattacaaatattcattaccagaggaattttatgctcgacgccaatggggaactgctcatccgaaacgcgcagctgaaacacgcaggacggtacacgtgcacagcgcagacaatcgtggacaattcttcagcttcagctgaccttgtcgtacgaggccccccaggccctccaggtggcctgagaatagaagacatcagagctacctctgtggcactgacttggagccgtggttcagacaatcacagccctatctctaaatacactatccagaccaagacgattctctcagatgactggaaagacgcaaagacggatcccccaatcattgaaggaaacatggagtcagcaaaagcagtcgatttgatcccatggatggagtacgaatttcgagtggtagcaaccaatactttggggactggagagcccagcataccctcaaacaggatcaaaaccgatggcgctgcaccaaatgtggctccctcagacgtaggtggtgggggcggaaccaacagagagctgacaataacgtgggcgcctttgtccagagaataccattatggtaacaattttggttacatagtggcattcaagccattcgatggagaagagtggaagaaagtgaccgttaccaatccggatactggccgctacgtccacaaggacgaaaccatgaccccttccaccgcgtttcaagtcaaagtgaaggcattcaacaataaaggagacgggccctacagcctcatagctgtcatcaactcagcacaagacgctcccagtgaagcccccacagaagtaggggtcaaagtgctatcgtcctctgagatctctgtccattggaagcacgttctagagaagattgtggaaagctatcaaattcggtactgggccggtcacgacaaagaagcagcggcgcacagagttcaagtcaccagccaggagtactcagccaggctggagaaccttctgccggacactcagtacttcatagaggtgggagcctgtaacagcgcggggtgcggaccttccagcgacgtgatcgagaccttcaccagaaaagcccctcccagccaaccaccaaggatcatcagttccgtgaggtctggctcccgatacataatcacgtgggatcatgtcgtggcactatccaatgaatctacagtgacaggctacaagatactctatagacctgacggccaacatgacggtaagctgttctccacgcacaagcactccatagaagtccccatccccagagacggagagtacgtagtcgaagttcgagcacacagtgatggaggagatggggtagtgtcccaagtcaaaatttcaggtgtgtccacgctgtcatcgggtctcctcagcttgctcctgccctcccttggctttcttgtcttctattcggaattctgaacgttgtgacattt

SEQ ID NO: 2022 - protein, 1021 aa, Rattus norvegicus
  ref <308>: DATABASE ACCESSION NUMBER: SWISS-Prot / Q63198
  ref <309>: DATABASE ENTRY DATE: 2002-06-15
MKTPLLVSHLLLISLTSCLGEFTWHRRYGHGVSEEDKGFGPIFEEQPINTIYPEESLEGKVSLNCRARASPFPVYKWRMNNGDVDLTNDRYSMVGGNLVINNPDKQKDAGIYYCLASNNYGMVRSTEATLSFGYLDPFPPEDRPEVKVKEGKGMVLLCDPPYHFPDDLSYRWLLNEFPVFITMDKRRFVSQTNGNLYIANVESSDRGNYSCFVSSPSITKSVFSKFIPLIPIPERTTKPYPADIVVQFKDIYTMMGQNVTLECFALGNPVPDIRWRKVLEPMPTTAEISTSGAVLKIFNIQLEDEGLYECEAENIRGKDKHQARIYVQAFPEWVEHINDTEVDIGSDLYWPCVATGKPIPTIRWLKNGYAYHKGELRLYDVTFENAGMYQCIAENAYGTIYANAELKILALAPTFEMNPMKKKILAAKGGRVIIECKPKAAPKPKFSWSKGTEWLVNSSRILIWEDGSLEINNITRNDGGIYTCFAENNRGKANSTGTLVITNPTRIILAPINADITVGENATMQCAASFDPSLDLTFVWSFNGYVIDFNKEITNIHYQRNFMLDANGELLIRNAQLKHAGRYTCTAQTIVDNSSASADLVVRGPPGPPGGLRIEDIRATSVALTWSRGSDNHSPISKYTIQTKTILSDDWKDAKTDPPIIEGNMESAKAVDLIPWMEYEFRVVATNTLGTGEPSIPSNRIKTDGAAPNVAPSDVGGGGGTNRELTITWAPLSREYHYGNNFGYIVAFKPFDGEEWKKVTVTNPDTGRYVHKDETMTPSTAFQVKVKAFNNKGDGPYSLIAVINSAQDAPSEAPTEVGVKVLSSSEISVHWKHVLEKIVESYQIRYWAGHDKEAAAHRVQVTSQEYSARLENLLPDTQYFIEVGACNSAGCGPSSDVIETFTRKAPPSQPPRIISSVRSGSRYIITWDHVVALSNESTVTGYKILYRPDGQHDGKLFSTHKHSIEVPIPRDGEYVVEVRAHSDGGDGVVSQVKISGVSTLSSGLLSLLLPSLGFLVFYSEF

SEQ ID NO: 2023 - DNA, 8582 bp, Rattus norvegicus
  ref <308>: DATABASE ACCESSION NUMBER: EMBL / D38629
  ref <309>: DATABASE ENTRY DATE: 2002-06-03
agtagtgaatttcaaaatcctttttaaccttataggtccaagggtagccaaggatggcagcagcctcatatgatcagttgttaaagcaagttgaggccctgaagatggagaactcaaatcttcgacaagagctcgaagataattccaatcaccttacagaactggaaactgaggcatctaacatgaaggaagtacttaagcagctgcagggaagtattgaagatgagactatgacttccggacagattgatttactagagcgccttaaagaatttaacttagatagcaatttccccggagtgaaactacgctcgaaaatgtccctccgatcctatggaagtcgggaaggatctgtatcaagccgttcaggagaatgcagtcctgtccccatggggtcattcccaagaagagcatttgtaaatggaagcagagaaagcactggatacttagaagagcttgagaaagagagatcattactccttgctgatcttgacaaagaagaaaaggaaaaggactggtattatgctcagcttcagaacctcacgaaaagaatagatagcctgcccttgactgagaacttttccttacagacagacatgacaagacggcagctggagtatgaagcacggcagatcagggccgcaatggaggagcagcttggcacctgccaggacatggagaaacgagcacagcgaagaatagccaggattcagcaaatagagaaggacattcttcgtgtacggcagctcttacagtcccaagcggctgaagcagagaggtcatctcagagcaagcatgaaactgcctcccatgaagctgagcggcagcttgaaggtcaaggagtggcagaaagcaacttggcaacttctggtagtggccagagttcagctgcacgtgtggatcatgaaacagccggtgttttgagttctagcggcacacactctgctcctcgaaggctgacgagtcacctgggaacgaaggtggaaatggtgtattcattgttgtccatgcttggtactcatgataaggacgatatgtcacgaactttgctagctatgtctagctcccaagacagctgtatatccatgcgacagtctggatgtcttcctctcctcatccagcttttacatggcaatgacaaagactctgtgttgttgggaaattcccggggcagtaaagaggctcgggccagggccagtgcagccctccacaacatcattcactcacagcctgatgacaagagaggcaggcgtgaaatccgggtccttcatcttttggaacagatacgagcttactgcgaaacctgttgggagtggcaggaagcccatgaacaaggcatggaccaggacaaaaatccaatgccagctcctgttgagcatcagatctgccctgcggtgtgtgttctgatgaaactctcatttgatgaggagcacagacatgcgatgaatgagcttggggggctgcaggctattgcagagttactgcaggtggactgtgagatgcacgggctcactgatgaccactacagtgtcactctacgacggtacgctggaatggccttgacaaacctgacctttggagatgttgccaacaaggctacgctgtgttctatgaaaggctgcatgagggcactcgtggcccagttaaaatccgaaagtgaagacttacagcaggttattgcaagtgttttgcggaatttgtcttggcgagcagatgtaaatagcaaaaagacgttgagagaagttggaagtgtgaaagcgttgatggaatgtgctttggaagttaaaaaggaatcaactctcaaaagcgtcttgagtgccttatggaatctgtccgcacactgcactgagaataaggctgacatatgtgctgtggacggggcactggcatttctggttggcaccctcacttaccggagccagacaaatacgttagccatcattgaaagtggaggtgggatattacggaatgtgtccagcttgatagctaccaacgaagaccacagacaaatcctaagagagaacaactgcctacaaactttattacagcacttgaaatctcacagcttgacaatagtcagtaatgcatgtggaactctgtggaatctctcagcgagaaatcctaaagaccaggaggctctgtgggacatgggggcggtgagcatgctcaagaacctcattcattccaagcacaaaatgatcgctatggggagcgcagcagctttaaggaatctcatggcaaacagacctgcaaagtataaggatgccaacatcatgtctcctggctcaagtttgccatcccttcacgttaggaaacaaaaagctctagaagcagaattagacgctcagcatttatcagaaacctttgacaatattgacaatttaagtcccaaggcatctcatcgcagtaagcagagacacaagcagaatctttatggtgactatgtctttgacgccagtcgacatgatgacaataggtcagacaactttaacactggaaacatgactgttctttcaccatacttaaataccacagtattgcccagctcttcttcatcaaggggaagtttagacagttctcgttctgagaaagacagaagtttggagagagaacgaggtattggcctcagcacttaccattcagcaacagaaaatccgggaacctcttccaaacggggtttgcagctctctgccactgcagcccagatagccaaagtgatggaagaagtgtccgccctccacacctcccaggacgacagaagccccgcctctgccgctgagctccactgtgtggcggaggagaggactgcagcacgaagaagctctgcgtcccacacacatccaaacacacacaacttcgctaagtcggaaagctcaaacaggacatgctccatgccttatgccaaggtggaatataagagatcttcaaatgacagcttaaacagtgtcactagtagtgatggctatggtaaaaggggccagatgaagccctcggttgagtcctactcagaagatgatgaaggtaagttttgcagttatgggcagtatcctgccgacctagcccataagatacacagtgcaaatcatatggatgataatggtggggagctggacacaccaataaactacagcctcaagtactcagatgagcagctgaactcaggaaggcagagcccctcacaaaatgaaaggtgggcaagacccaagcatgtgatagaagatgaaataaagcaaaacgagcaaaggcaatcaagaagccagaacaccaattttcccgtctactctgagaacactgatgacaaacacctcaagttccaacagcattttgggcaacaagagtgcgtttccccatataggtccaggggaaccaatggttcagaaacaaatcgaatgggttctagtcatgcagttaatcaaaatgtgaaccagtctttgtgtcaggaagacgactatgaagatgacaagcctaccaactacagtgaacgttattctgaggaagaacagcatgaagaagaagagagaccgacaaattacagcataaagtataatgaagagaaacaccatgtggatcagcctattgattatagtctaaaatatgccactgacatatcttcatcccagaagccatcattttcattctcaaagactccatcagtacagggcactaaaactgaacataactctccaagcagtgaggctgcatctgcaccttcatctaacgccaaaaggcagagtcagctgcatccaagttcagcacaaagaaatggtcagactccaaaagggactgcctgcaaagtcccctccatcaaccaagagacaatgcagacttactgtgtagaagacaccccaatatgtttctcaaggtgtagttccttatcatcgctatcatcagctgaggatgaaataggctgtgatcagacaacacaggaggcagactctgcgaatactctgcaaatagcagagataaaagagaatgatgtgacgcggtcagctcaagaccctgcgagtgacgtcccagccgtgtcccagagtactagaaccaagcccagcagactccaggcttccggcttagcttcagaatccgccaggcataaagctgttgagttttcttcaggagccaagtctccctccaaaagcggtgctcagacacccaaaagtcccccagaacactatgtccaggagacgccccttgtattcagcaggtgtacttctgtcagctccctggacagttttgagagtcgctccatcgccagctctgttcagagtgagccatgtagtggaatggtgagtgggattgtcagccccagtgaccttccagacagcccagggcagaccatgccaccaagcagaagcaagacccctccccctccccctcccccacagccagtgcagaccaagagagaggtgccaaaaactaaggtgcctgctgccgagcagagagagggtgggcctaagcagacggccgtgagtgcggctgtgcagagggtgcaggtcctcccggatgccgacactctgttacactttgccacagagagtactccagatgggttttcttgttcctctagcctaagtgctctgagtctggatgagccctttatacagaaagatgtggaattaagaataatgcctccagttcaggaaaacgacaatgggaatgaaactgaaccagaacagcctgaagaatctaatgaaaaccaggataaagaggtagaaaagcctgactctgaaaaagacttattagatgattccgatgatgatgatattgaaatattagaagaatgtattatttcagccatgccaacaaagtcatcacgcaaagccaaaaagctagcccagactgcttcaaaattacctcctcctgtggcaaggaaaccgagtcagctgcctgtgtacaaacttctgccgtcacagagcaggctgcaggcacaaaaacatgtcagctttacaccaggggacgatgtgccccgagtgtactgtgtggaagggacgcctataaacttctccacagcaacatctctgagtgatctcacaatagaatcccctccgaatgagctggctgctggagatggggttagagcaagtgtacagtcaggtgagtttgaaaaacgagataccattcctacagagggcagaagtacagatgaggctcagagaggaaaagtctcctctatagctataccagacctggatggtagcaaagcagaggaaggagatattcttgcagaatgcatcaattctgccctgcccaaaggaagaagccacaagcctttccgagtgaaaaagataatggaccaagtccaacaggcatccatgacttcatccggaactaacaaaaatcaaatagacactaagaaaaagaagcctacttcaccagtaaagcccatgccacaaaatactgaatacagaactcgtgtgagaaagaatacagactcaaaagttaacgtaaatactgaagaaactttctcagacaataaagactcaaagaaacagagcttaaaaaacaaccccaaggacttgaatgacaagctaccggacaatgaggacagggtccggggaggctttactttcgattcaccgcatcattacgcacccattgaagggactccttactgcttctcacgaaatgactctttgagttctctagattttgatgatgacgatgttgacctctccagggaaaaggctgagttaagaaagggcaaagaaagtaaggactccgaagccaaagttacctgccacacagaaccaagctcaagccaacagtcggctaggaaggcacaggctagtacaaaacatccagtgaacagagggccgtctaaaccactgctgcaggaacaacccactttcccccagtcctctaaagacgtaccagacagaggggcagcaactgacgaaaaactgcagaattttgctattgaaaatacaccggtttgcttttctcgaaattcttctctgagctcccttagtgacgttgaccaagaaaacaacaataacgaagaaactggaccagtcagagacgctgagcctgccaacgcgcaaggacagccaggcaagcctcaggcatctgggtatgcgcccaagtcctttcatgtggaagacacccctgtgtgcttctccagaaacagctctctcagctctctgagcattgattctgaggacgacctgttgcgagagtgcataagctctgctatgccaaaaaagaggaggccttccagactcaagggtgagggtgagtggcagagtcctaggaaagtgggcagcgtgttagccgaagatctgacactcgacttgaaagatatacagaggccagagtcagaacacggtttatcccccgattcagaaaatttcgactggaaagctattcaggaaggtgcaaactccatagtaagtagtctgcaccaagctgccgccgccgccgcgtgtctgtccagacaagcgtcgtcggactcagactccatcctgtccctgaagtcgggcgtctccctggggtcgccttttcaccttacacctgaccaagaggagaagccattcacaagtcataaaggcccaagaattctcaaacctggggagaaaagcacattagaagcaaaaaaaatagaatccgaaaacaaaggaatcaaaggtggaaaaaaggtttataaaagcttgattacaggaaagattcgatctaattcagaaatctccagccaaatgaaacaaccccttcagacaaacatgccttcaatctcaagaggcaggacaatgattcacatcccgggagttcggaacagctcctcaagtacaagccctgtctctaaaaaaggcccacccctcaagactccagcctctaaaagccccagtgaaggtcctgtagctaccacttctcctcgtggaactaagccagcagtgaagtcagagctgagccctattaccaggcaaacttcccacattagtgggtcaaataaggggccctctaggtcagggtctagagactccactccctcgagacccacacagcagccattaagtaggccgatgcagtcgccagggcggaactcgatctcccccggtagaaatggaataagcactcctaacaaactctctcagctgcccagaacatcgtctcccagtactgcttcgaccaagtcctcggggtcggggaaaatgtcctacacatccccaggccggcagctgagccagcaaaacctcagcaaacaaacaggcttgtccaagaacgccagcagcatccccagaagtgagtcagcatccaaaggactgaatcagatgaataacagcaatgggtctaataaaaaggtagaactttctagaatgtcttcaactaagtcaagtggaagtgaatcagacaggtcagaaagacctgcattagtacgccagtccactttcatcaaagaagccccaagcccaaccctaaggaggaaactggaggaatctgcctcatttgaatccctttctccatcttctagaccagattctcccaccaggtcccaggcacagaccccagttttaagcccttcccttcccgatatgtctctgtccacacatccatctgttcaggcaggtggatggcgcaagctcccacctaacctcagccccactatagagtacagtgacggaaggccctcaaagcggcatgatatcgcacgctcccattctgaaagtccgtccagactaccagtcaaccgagcgggaacctggaagcgtgaacacagcaaacattcctcatcccttcctcgagtgagcacttggagaagaactggaagctcatcttctattctttctgcttcttcagagtccagtgaaaaagcaaaaagtgaggatgaaaagcatgtgaactctgtgccaggacccagacaaatgaaagaaaaccaggtacccacaaaaggaacatggaggaaaataaaggaaagtgaaatttctcccacaaacacggtttctcagaccacttcctcaggtgctgccagtggtgctgaatcaaagactctgatctatcagatggcacctgctgtttctagaacagaggacgtttgggtgagaattgaggactgccccattaacaaccctagatctggaagatctcccacaggtaacacccccccagtgattgacagcatttcagaaaagggaaatccaagcattaaagattcaaaagacacccaaggaaaacaaagtgtgggcagtggcagtcctgtgcaaaccgtgggtctagaaaaccgcctgaactcctttattcaggtagaggccccggaacagaaaggaactgagactaaagcaggacagggtagccctgcccctgtagcagagactggtgagacctgcatggcagagcgcacccctttcagttcaagtagctccagcaagcacagttctcccagtgggacggtcgctgccagagtgacgccttttaattacaacccaagccctaggaaaagcagcgcagacagcacttcagcccggccatctcagatccccactccggtgggcagcagcacaaagaagagagactcgaagactgacagcactgaatctagtggagcccagagtcctaaacgccattctgggtcttacctcgtgacgtctgtttaa

SEQ ID NO: 2024 - protein, 2842 aa, Rattus norvegicus
  ref <308>: DATABASE ACCESSION NUMBER: SWISS-Prot / P70478
  ref <309>: DATABASE ENTRY DATE: 2001-10-16
MAAASYDQLLKQVEALKMENSNLRQELEDNSNHLTELETEASNMKEVLKQLQGSIEDETMTSGQIDLLERLKEFNLDSNFPGVKLRSKMSLRSYGSREGSVSSRSGECSPVPMGSFPRRAFVNGSRESTGYLEELEKERSLLLADLDKEEKEKDWYYAQLQNLTKRIDSLPLTENFSLQTDMTRRQLEYEARQIRAAMEEQLGTCQDMEKRAQRRIARIQQIEKDILRVRQLLQSQAAEAERSSQSKHETASHEAERQLEGQGVAESNLATSGSGQSSAARVDHETAGVLSSSGTHSAPRRLTSHLGTKVEMVYSLLSMLGTHDKDDMSRTLLAMSSSQDSCISMRQSGCLPLLIQLLHGNDKDSVLLGNSRGSKEARARASAALHNIIHSQPDDKRGRREIRVLHLLEQIRAYCETCWEWQEAHEQGMDQDKNPMPAPVEHQICPAVCVLMKLSFDEEHRHAMNELGGLQAIAELLQVDCEMHGLTDDHYSVTLRRYAGMALTNLTFGDVANKATLCSMKGCMRALVAQLKSESEDLQQVIASVLRNLSWRADVNSKKTLREVGSVKALMECALEVKKESTLKSVLSALWNLSAHCTENKADICAVDGALAFLVGTLTYRSQTNTLAIIESGGGILRNVSSLIATNEDHRQILRENNCLQTLLQHLKSHSLTIVSNACGTLWNLSARNPKDQEALWDMGAVSMLKNLIHSKHKMIAMGSAAALRNLMANRPAKYKDANIMSPGSSLPSLHVRKQKALEAELDAQHLSETFDNIDNLSPKASHRSKQRHKQNLYGDYVFDASRHDDNRSDNFNTGNMTVLSPYLNTTVLPSSSSSRGSLDSSRSEKDRSLERERGIGLSTYHSATENPGTSSKRGLQLSATAAQIAKVMEEVSALHTSQDDRSPASAAELHCVAEERTAARRSSASHTHPNTHNFAKSESSNRTCSMPYAKVEYKRSSNDSLNSVTSSDGYGKRGQMKPSVESYSEDDEGKFCSYGQYPADLAHKIHSANHMDDNGGELDTPINYSLKYSDEQLNSGRQSPSQNERWARPKHVIEDEIKQNEQRQSRSQNTNFPVYSENTDDKHLKFQQHFGQQECVSPYRSRGTNGSETNRMGSSHAVNQNVNQSLCQEDDYEDDKPTNYSERYSEEEQHEEEERPTNYSIKYNEEKHHVDQPIDYSLKYATDISSSQKPSFSFSKTPSVQGTKTEHNSPSSEAASAPSSNAKRQSQLHPSSAQRNGQTPKGTACKVPSINQETMQTYCVEDTPICFSRCSSLSSLSSAEDEIGCDQTTQEADSANTLQIAEIKENDVTRSAQDPASDVPAVSQSTRTKPSRLQASGLASESARHKAVEFSSGAKSPSKSGAQTPKSPPEHYVQETPLVFSRCTSVSSLDSFESRSIASSVQSEPCSGMVSGIVSPSDLPDSPGQTMPPSRSKTPPPPPPPQPVQTKREVPKTKVPAAEQREGGPKQTAVSAAVQRVQVLPDADTLLHFATESTPDGFSCSSSLSALSLDEPFIQKDVELRIMPPVQENDNGNETEPEQPEESNENQDKEVEKPDSEKDLLDDSDDDDIEILEECIISAMPTKSSRKAKKLAQTASKLPPPVARKPSQLPVYKLLPSQSRLQAQKHVSFTPGDDVPRVYCVEGTPINFSTATSLSDLTIESPPNELAAGDGVRASVQSGEFEKRDTIPTEGRSTDEAQRGKVSSIAIPDLDGSKAEEGDILAECINSALPKGRSHKPFRVKKIMDQVQQASMTSSGTNKNQIDTKKKKPTSPVKPMPQNTEYRTRVRKNTDSKVNVNTEETFSDNKDSKKQSLKNNPKDLNDKLPDNEDRVRGGFTFDSPHHYAPIEGTPYCFSRNDSLSSLDFDDDDVDLSREKAELRKGKESKDSEAKVTCHTEPSSSQQSARKAQASTKHPVNRGPSKPLLQEQPTFPQSSKDVPDRGAATDEKLQNFAIENTPVCFSRNSSLSSLSDVDQENNNNEETGPVRDAEPANAQGQPGKPQASGYAPKSFHVEDTPVCFSRNSSLSSLSIDSEDDLLRECISSAMPKKRRPSRLKGEGEWQSPRKVGSVLAEDLTLDLKDIQRPESEHGLSPDSENFDWKAIQEGANSIVSSLHQAAAAAACLSRQASSDSDSILSLKSGVSLGSPFHLTPDQEEKPFTSHKGPRILKPGEKSTLEAKKIESENKGIKGGKKVYKSLITGKIRSNSEISSQMKQPLQTNMPSISRGRTMIHIPGVRNSSSSTSPVSKKGPPLKTPASKSPSEGPVATTSPRGTKPAVKSELSPITRQTSHISGSNKGPSRSGSRDSTPSRPTQQPLSRPMQSPGRNSISPGRNGISTPNKLSQLPRTSSPSTASTKSSGSGKMSYTSPGRQLSQQNLSKQTGLSKNASSIPRSESASKGLNQMNNSNGSNKKVELSRMSSTKSSGSESDRSERPALVRQSTFIKEAPSPTLRRKLEESASFESLSPSSRPDSPTRSQAQTPVLSPSLPDMSLSTHPSVQAGGWRKLPPNLSPTIEYSDGRPSKRHDIARSHSESPSRLPVNRAGTWKREHSKHSSSLPRVSTWRRTGSSSSILSASSESSEKAKSEDEKHVNSVPGPRQMKENQVPTKGTWRKIKESEISPTNTVSQTTSSGAASGAESKTLIYQMAPAVSRTEDVWVRIEDCPINNPRSGRSPTGNTPPVIDSISEKGNPSIKDSKDTQGKQSVGSGSPVQTVGLENRLNSFIQVEAPEQKGTETKAGQGSPAPVAETGETCMAERTPFSSSSSSKHSSPSGTVAARVTPFNYNPSPRKSSADSTSARPSQIPTPVGSSTKKRDSKTDSTESSGAQSPKRHSGSYLVTSV

SEQ ID NO: 2025 - DNA, 1272 bp, Rattus norvegicus
  ref <308>: DATABASE ACCESSION NUMBER: EMBL / D42116
  ref <309>: DATABASE ENTRY DATE: 1997-10-04
cctcattggttcctcctctgctatgtgcataatctctgatcagagcgttgcctgggatgccgaggcacctatttgtgaatcaattccttgtgagatacccccaagcattcccaatggagatttcttcagtcctaacagagaagattttcattatggaatggtagttacctaccagtgcaacactgatgcgagagggaagaagctctttaacctggtgggtgagccctccatacactgtaccagcatcgatggtcaagttggagtctggagtggccctcctcctcagtgcattgaactcaacaaatgtactcctccccatgttgaaaatgcagtcatagtgtctaaaaacaaaagcttgttttccttaagggatatggtggagtttagatgtcaggatggctttatgatgaaaggagacagcagtgtgtattgtcgatccctaaacagatgggagcctcagttaccaagctgcttcaaggtgaaatcctgtggtgctttcctgggtgagcttcctaatgggcatgtattcgttccacaaaatcttcaactcggggccaaagtgacctttgtttgtaatacagggtatcaattaaaaggcaattcttctagtcattgtgttcttgatggagtggaaagcatttggaatagcagcgttcctgtgtgtgaacaagtgatatgtaaactccctcaggatatgagtggattccagaaagggttgcaaatgaaaaaagattattactatggagataatgtagccttggaatgtgaggatgggtatactctagaaggcagttctcagagccagtgccagtccgatgccagctgggatcctcctctgcccaaatgtgtctctcaagtgatatgtaaactccctcaggatatgagtggattccagaaagggttgcaaatgaaaaaagattattactatggagataatgtagccttggaatgtgaggatgggtatactctagaaggcagttctcagagccagtgccagtccgatgccagctgggatcctcctctgcccaaatgtgtctctcaagtgatatgtaaactccctcaggatatgagtggattccagaaagggttgcaaatgaaaaaagattattactatggagataatgtagccttggaatgtgaggatgggtatactctagaaggcagttctcagagccagtgccagtccgatgccagctgggatcctcctctgcccaaatgtgtctctcgctcaaacagtggtctaatagctggaattttcattgggataatcgt

SEQ ID NO: 2026 - protein, 559 aa, Rattus norvegicus
  ref <308>: DATABASE ACCESSION NUMBER: SWISS-Prot / BAA22548
  ref <309>: DATABASE ENTRY DATE: 2001-06-01
MEASSPLDPVGRLVAFCRGGVHLAVLLLFLSPSTLGQCPAPPLFPYAKPINPTDESTFPVGTSLKYECRPGYIKRQFSITCEVNSVWTSPQDVCIRKQCETPLDPQNGIVHVNTDIRFGSSITYTCNEGYRLIGSSSAMCIISDQSVAWDAEAPICESIPCEIPPSIPNGDFFSPNREDFHYGMVVTYQCNTDARGKKLFNLVGEPSIHCTSIDGQVGVWSGPPPQCIELNKCTPPHVENAVIVSKNKSLFSLRDMVEFRCQDGFMMKGDSSVYCRSLNRWEPQLPSCFKVKSCGAFLGELPNGHVFVPQNLQLGAKVTFVCNTGYQLKGNSSSHCVLDGVESIWNSSVPVCEQVICKLPQDMSGFQKGLQMKKDYYYGDNVALECEDGYTLEGSSQSQCQSDASWDPPLPKCVSQVICKLPQDMSGFQKGLQMKKDYYYGDNVALECEDGYTLEGSSQSQCQSDASWDPPLPKCVSRSNSGLIAGIFIGIIVLILFIIFSYWMIMKFKKRNSTNEKCKEVGIYLNSKEDSCVQPQSLLTSQENNSTSSPARNSLTQEV

SEQ ID NO: 2027 - DNA, 5420 bp, Homo sapiens
  ref <308>: DATABASE ACCESSION NUMBER: EMBL / X05309
  ref <309>: DATABASE ENTRY DATE: 1995-05-17
ccaagttgaaaacccaaaccaatgcatctgactttcccattgggacatctttaaagtacgaatgccgtcctgagtactacgggaggccattctctatcacatgtctagataacctggtctggtcaagtcccaaagatgtctgtaaacgtaaatcatgtaaaactcctccagatccagtgaatggcatggtgcatgtgatcacagacatccaggttggatccagaatcaactattcttgtactacagggcaccgactcattggtcactcatctgctgaatgtatcctctcgggcaatgctgcccattggagcacgaagccgccaatttgtcaacgaattccttgtgggctaccccccaccatcgccaatggagatttcattagcaccaacagagagaattttcactatggatcagtggtgacctaccgctgcaatcctggaagcggagggagaaaggtgtttgagcttgtgggtgagccctccatatactgcaccagcaatgacgatcaagtgggcatctggagcggcccggcccctcagtgcattatacctaacaaatgcacgcctccaaatgtggaaaatggaatattggtatctgacaacagaagcttattttccttaaatgaagttgtggagtttaggtgtcagcctggctttgtcatgaaaggaccccgccgtgtgaagtgccaggccctgaacaaatgggagccggagctaccaagctgctccagggtatgtcagccacctccagatgtcctgcatgctgagcgtacccaaagggacaaggacaacttttcacccgggcaggaagtgttctacagctgtgagcccggctatgacctcagaggggctgcgtctatgcgctgcacaccccagggagactggagccctgcagcccccacatgtgaagtgaaatcctgtgatgacttcatgggccaacttcttaatggccgtgtgctatttccagtaaatctccagcttggagcaaaagtggattttgtttgtgatgaaggatttcaattaaaaggcagctctgctagttattgtgtcttggctggaatggaaagcctttggaatagcagtgttccagtgtgtgaacaaatcttttgtccaagtcctccagttattcctaatgggagacacacaggaaaacctctggaagtctttccctttggaaaagcagtaaattacacatgcgacccccacccagacagagggacgagcttcgacctcattggagagagcaccatccgctgcacaagtgaccctcaagggaatggggtttggagcagccctgcccctcgctgtggaattctgggtcactgtcaagccccagatcattttctgtttgccaagttgaaaacccaaaccaatgcatctgactttcccattgggacatctttaaagtacgaatgccgtcctgagtactacgggaggccattctctatcacatgtctagataacctggtctggtcaagtcccaaagatgtctgtaaacgtaaatcatgtaaaactcctccagatccagtgaatggcatggtgcatgtgatcacagacatccaggttggatccagaatcaactattcttgtactacagggcaccgactcattggtcactcatctgctgaatgtatcctctcaggcaatactgcccattggagcacgaagccgccaatttgtcaacgaattccttgtgggctacccccaaccatcgccaatggagatttcattagcaccaacagagagaattttcactatggatcagtggtgacctaccgctgcaatcttggaagcagagggagaaaggtgtttgagcttgtgggtgagccctccatatactgcaccagcaatgacgatcaagtgggcatctggagcggccccgcccctcagtgcattatacctaacaaatgcacgcctccaaatgtggaaaatggaatattggtatctgacaacagaagcttattttccttaaatgaagttgtggagtttaggtgtcagcctggctttgtcatgaaaggaccccgccgtgtgaagtgccaggccctgaacaaatgggagccagagttaccaagctgctccagggtgtgtcagccgcctccagaaatcctgcatggtgagcataccccaagccatcaggacaacttttcacctgggcaggaagtgttctacagctgtgagcctggctatgacctcagaggggctgcgtctctgcactgcacaccccagggagactggagccctgaagccccgagatgtgcagtgaaatcctgtgatgacttcttgggtcaactccctcatggccgtgtgctatttccacttaatctccagcttggggcaaaggtgtcctttgtctgtgatgaagggtttcgcttaaagggcagttccgttagtcattgtgtcttggttggaatgagaagcctttggaataacagtgttcctgtgtgtgaacatatcttttgtccaaatcctccagctatccttaatgggagacacacaggaactccctctggagatattccctatggaaaagaaatatcttacacatgtgacccccacccagacagagggatgaccttcaacctcattggggagagcaccatccgctgcacaagtgaccctcatgggaatggggtttggagcagccctgcccctcgctgtgaactttctgttcgtgctggtcactgtaaaaccccagagcagtttccatttgccagtcctacgatcccaattaatgactttgagtttccagtcgggacatctttgaattatgaatgccgtcctgggtattttgggaaaatgttctctatctcctgcctagaaaacttggtctggtcaagtgttgaagacaactgtagacgaaaatcatgtggacctccaccagaacccttcaatggaatggtgcatataaacacagatacacagtttggatcaacagttaattattcttgtaatgaagggtttcgactcattggttccccatctactacttgtctcgtctcaggcaataatgtcacatgggataagaaggcacctatttgtgagatcatatcttgtgagccacctccaaccatatccaatggagacttctacagcaacaatagaacatcttttcacaatggaacggtggtaacttaccagtgccacactggaccagatggagaacagctgtttgagcttgtgggagaacggtcaatatattgcaccagcaaagatgatcaagttggtgtttggagcagccctccccctcggtgtatttctactaataaatgcacagctccagaagttgaaaatgcaattagagtaccaggaaacaggagtttcttttccctcactgagatcatcagatttagatgtcagcccgggtttgtcatggtagggtcccacactgtgcagtgccagaccaatggcagatgggggcccaagctgccacactgctccagggtgtgtcagccgcctccagaaatcctgcatggtgagcataccctaagccatcaggacaacttttcacctgggcaggaagtgttctacagctgtgagcccagctatgacctcagaggggctgcgtctctgcactgcacgccccagggagactggagccctgaagcccctagatgtacagtgaaatcctgtgatgacttcctgggccaactccctcatggccgtgtgctacttccacttaatctccagcttggggcaaaggtgtcctttgtttgcgatgaagggttccgattaaaaggcaggtctgctagtcattgtgtcttggctggaatgaaagccctttggaatagcagtgttccagtgtgtgaacaaatcttttgtccaaatcctccagctatccttaatgggagacacacaggaactccctttggagatattccctatggaaaagaaatatcttacgcatgcgacacccacccagacagagggatgaccttcaacctcattggggagagctccatccgctgcacaagtgaccctcaagggaatggggtttggagcagccctgcccctcgctgtgaactttctgttcctgctgcctgcccacatccacccaagatccaaaacgggcattacattggaggacacgtatctctatatcttcctgggatgacaatcagctacacttgtgaccccggctacctgttagtgggaaagggcttcattttctgtacagaccagggaatctggagccaattggatcattattgcaaagaagtaaattgtagcttcccactgtttatgaatggaatctcgaaggagttagaaatgaaaaaagtatatcactatggagattatgtgactttgaagtgtgaagatgggtatactctggaaggcagtccctggagccagtgccaggcggatgacagatgggaccctcctctggccaaatgtacctctcgtgcacatgatgctctcatagttggcactttatctggtacgatcttctttattttactcatcattttcctctcttggataattctaaagcacagaaaaggcaataatgcacatgaaaaccctaaagaagtggctatccatttacattctcaaggaggcagcagcgttcatccccgaactctgcaaacaaatgaagaaaatagcagggtccttccttgacaaagtactatacagctgaagaacatctcgaatacaattttggtgggaaaggagccaattgatttcaacagaatcagatctgagcttcataaagtctttgaagtgacttcacagagacgcagacatgtgcacttgaagatgctgccccttccctggtacctagcaaagctcctgcctctttgtgtgcgtcactgtgaaacccccacccttctgcctcgtgctaaacgcacacagtatctagtcaggggaaaagactgcatttaggagatagaaaatagtttggattacttaaaggaataaggtgttgcctggaatttctggtttgtaaggtggtcactgttcttttttaaaatatttgtaatatggaatgggctcagtaagaagagcttggaaaatgcagaaagttatgaaaaataagtcacttataattatgctacctactgataaccactcctaatattttgattcattttctgcctatcttctttcacatatgtgtttttttacatacgtacttttccccccttagtttgtttccttttattttatagagcagaaccctagtcttttaaacagtttagagtgaaatatatgctatatcagtttttactttctctagggagaaaaattaatttactagaaaggcatgaaatgatcatgggaagagtggttaagactactgaagagaaatatttggaaaataagatttcgatatcttctttttttttgagatggagtctggctctgtctcccaggctggagtgcagtggcgtaatctcggctcactgcaacgtccgcctcccg

SEQ ID NO: 2028 - protein, 2039 aa, Homo sapiens
  ref <308>: DATABASE ACCESSION NUMBER: SWISS-Prot / P17927
  ref <309>: DATABASE ENTRY DATE: 2002-06-15
MGASSPRSPEPVGPPAPGLPFCCGGSLLAVVVLLALPVAWGQCNAPEWLPFARPTNLTDEFEFPIGTYLNYECRPGYSGRPFSIICLKNSVWTGAKDRCRRKSCRNPPDPVNGMVHVIKGIQFGSQIKYSCTKGYRLIGSSSATCIISGDTVIWDNETPICDRIPCGLPPTITNGDFISTNRENFHYGSVVTYRCNPGSGGRKVFELVGEPSIYCTSNDDQVGIWSGPAPQCIIPNKCTPPNVENGILVSDNRSLFSLNEVVEFRCQPGFVMKGPRRVKCQALNKWEPELPSCSRVCQPPPDVLHAERTQRDKDNFSPGQEVFYSCEPGYDLRGAASMRCTPQGDWSPAAPTCEVKSCDDFMGQLLNGRVLFPVNLQLGAKVDFVCDEGFQLKGSSASYCVLAGMESLWNSSVPVCEQIFCPSPPVIPNGRHTGKPLEVFPFGKAVNYTCDPHPDRGTSFDLIGESTIRCTSDPQGNGVWSSPAPRCGILGHCQAPDHFLFAKLKTQTNASDFPIGTSLKYECRPEYYGRPFSITCLDNLVWSSPKDVCKRKSCKTPPDPVNGMVHVITDIQVGSRINYSCTTGHRLIGHSSAECILSGNAAHWSTKPPICQRIPCGLPPTIANGDFISTNRENFHYGSVVTYRCNPGSGGRKVFELVGEPSIYCTSNDDQVGIWSGPAPQCIIPNKCTPPNVENGILVSDNRSLFSLNEVVEFRCQPGFVMKGPRRVKCQALNKWEPELPSCSRVCQPPPDVLHAERTQRDKDNFSPGQEVFYSCEPGYDLRGAASMRCTPQGDWSPAAPTCEVKSCDDFMGQLLNGRVLFPVNLQLGAKVDFVCDEGFQLKGSSASYCVLAGMESLWNSSVPVCEQIFCPSPPVIPNGRHTGKPLEVFPFGKAVNYTCDPHPDRGTSFDLIGESTIRCTSDPQGNGVWSSPAPRCGILGHCQAPDHFLFAKLKTQTNASDFPIGTSLKYECRPEYYGRPFSITCLDNLVWSSPKDVCKRKSCKTPPDPVNGMVHVITDIQVGSRINYSCTTGHRLIGHSSAECILSGNTAHWSTKPPICQRIPCGLPPTIANGDFISTNRENFHYGSVVTYRCNLGSRGRKVFELVGEPSIYCTSNDDQVGIWSGPAPQCIIPNKCTPPNVENGILVSDNRSLFSLNEVVEFRCQPGFVMKGPRRVKCQALNKWEPELPSCSRVCQPPPEILHGEHTPSHQDNFSPGQEVFYSCEPGYDLRGAASLHCTPQGDWSPEAPRCAVKSCDDFLGQLPHGRVLFPLNLQLGAKVSFVCDEGFRLKGSSVSHCVLVGMRSLWNNSVPVCEHIFCPNPPAILNGRHTGTPSGDIPYGKEISYTCDPHPDRGMTFNLIGESTIRCTSDPHGNGVWSSPAPRCELSVRAGHCKTPEQFPFASPTIPINDFEFPVGTSLNYECRPGYFGKMFSISCLENLVWSSVEDNCRRKSCGPPPEPFNGMVHINTDTQFGSTVNYSCNEGFRLIGSPSTTCLVSGNNVTWDKKAPICEIISCEPPPTISNGDFYSNNRTSFHNGTVVTYQCHTGPDGEQLFELVGERSIYCTSKDDQVGVWSSPPPRCISTNKCTAPEVENAIRVPGNRSFFSLTEIIRFRCQPGFVMVGSHTVQCQTNGRWGPKLPHCSRVCQPPPEILHGEHTLSHQDNFSPGQEVFYSCEPSYDLRGAASLHCTPQGDWSPEAPRCTVKSCDDFLGQLPHGRVLLPLNLQLGAKVSFVCDEGFRLKGRSASHCVLAGMKALWNSSVPVCEQIFCPNPPAILNGRHTGTPFGDIPYGKEISYACDTHPDRGMTFNLIGESSIRCTSDPQGNGVWSSPAPRCELSVPAACPHPPKIQNGHYIGGHVSLYLPGMTISYTCDPGYLLVGKGFIFCTDQGIWSQLDHYCKEVNCSFPLFMNGISKELEMKKVYHYGDYVTLKCEDGYTLEGSPWSQCQADDRWDPPLAKCTSRAHDALIVGTLSGTIFFILLIIFLSWIILKHRKGNNAHENPKEVAIHLHSQGGSSVHPRTLQTNEENSRVLP

SEQ ID NO: 2029 - DNA, 1272 bp, Rattus norvegicus; identical to SEQ ID NO: 2025
  ref <308>: DATABASE ACCESSION NUMBER: EMBL / D42116
  ref <309>: DATABASE ENTRY DATE: 1997-10-04

SEQ ID NO: 2030 - protein, 559 aa, Rattus norvegicus; identical to SEQ ID NO: 2026
  ref <308>: DATABASE ACCESSION NUMBER: SWISS-Prot / BAA22548
  ref <309>: DATABASE ENTRY DATE: 2001-06-01

SEQ ID NO: 2031 - DNA, 5420 bp, Homo sapiens; identical to SEQ ID NO: 2027
  ref <308>: DATABASE ACCESSION NUMBER: EMBL / X05309
  ref <309>: DATABASE ENTRY DATE: 1995-05-17

SEQ ID NO: 2032 - protein, 2039 aa, Homo sapiens; identical to SEQ ID NO: 2028
  ref <308>: DATABASE ACCESSION NUMBER: SWISS-Prot / P17927
  ref <309>: DATABASE ENTRY DATE: 2002-06-15

SEQ ID NO: 2033 - DNA, 560 bp, Rattus norvegicus
  ref <308>: DATABASE ACCESSION NUMBER: EMBL / D42137
  ref <309>: DATABASE ENTRY DATE: 2002-10-07
gctgtggcttttgtgagtcatggagttgacagagcatgtttgggttccagggcgacacatctggagactataagaaggccctgctgctcctctgtggaggcgaggatgactgaggagctgcctggagtgccctgggcccgcctgctgcccaccatcagcttccttcagcaccacgcctacttacgttcaatgcctgcctgcctgccacgctgccttactcacacgagtgtgtgctaatgaccaaagctgtctcgaatgaaagcagtgttctgctgttctgtctgacagaccttcccacgtctctcagtctagtatctctaagttgcgttttctatcctcttctaaagcttcatttatattaagttaataaccatattaccttgaacggaaccttagccatgaaattgtgaactcttggaagtgctgtcaatcaagcttagtgctctagctgacctgaaaaattaagatggtcgtaatatcagaaacgttgccgacaaataaacattctcgtccctccaaatcctgtgtaggctcgtgtttagaacgcttatttaacaatg

SEQ ID NO: 2034 - protein, 318 aa, Rattus norvegicus
  ref <308>: DATABASE ACCESSION NUMBER: SWISS-Prot / BAA07708
  ref <309>: DATABASE ENTRY DATE: 2002-06-15
ALRGTVTDFSGFDGRADAEVLRKAMKGLGTDEDSILNLLTARSNAQRQQIAEEFKTLFGRDLVNDMKSELTGKFEKLIVALMKPSRLYDAYELKHALKGAGTDEKVLTEIIASRTPEELRAIKQAYEEEYGSNLEDDVVGDTSGYYQRMLVVLLQANRDPDTAIDDAQVELDAQALFQAGELKWGTDEEKFITILGTRSVSHLRRVFDKYMTISGFQIEETIDRETSGNLENLLLAVVKSIRSIPAYLAETLYYAMKGAGTDDHTLIRVIVSRSEIDLFNIRKEFRKNFATSLYSMIKGDTSGDYKKALLLLCGGEDD

SEQ ID NO: 2035 - DNA, 1630 bp, Homo sapiens; identical to SEQ ID NO: 892
  ref <308>: DATABASE ACCESSION NUMBER: Refseq / NM_001154
  ref <309>: DATABASE ENTRY DATE: 2000-10-31

SEQ ID NO: 2036 - protein, 319 aa, Homo sapiens; identical to SEQ ID NO: 893
  ref <308>: DATABASE ACCESSION NUMBER: SWISS-Prot / P08758
  ref <309>: DATABASE ENTRY DATE: 2002-06-15

SEQ ID NO: 2037 - DNA, 1080 bp, Rattus norvegicus
  ref <308>: DATABASE ACCESSION NUMBER: EMBL / D44481
  ref <309>: DATABASE ENTRY DATE: 1999-01-21
gtgccggcggcggcccagcgtgaaggcgcggaggcggccatggcaggcaacttcgactcggaggagcggagtagctggtactggggccgcttgagccggcaggaggcggtggcgctattgcagggccagcggcacggggttttcctggtgcgggactcgagcaccagccccggggactatgtgctcagcgtctccgaaaactcgcgcgtctcccactacatcatcaacagcagcggcccgcgccctccagtgcctccgtcgcccgctcagcctccgccgggagtgagtccctccaggctccgaataggagatcaagaatttgattcattgcctgctttactggaattctacaaaatacactatttggacactacaacactgatagaaccagtttccagatcaaggcagggtagtggagtgattctcaggcaggaggaggcagagtatgtgcgggccctctttgactttaatgggaatgatgaagaagatcttccctttaagaaaggagacatcctgagaatccgggataagcctgaagagcagtggtggaatgcagaggacagcgaaggaaagagggggatgattcctgtcccttacgtggagaagtatagacccgcctccgcctcagtatcggctctgattggaggtaaccaggagggttcccacccacagccactgggtgggccggagcctgggccctatgcccaacccagcgtcaacactccgctccctaacctccagaatgggcccatttatgccagggttatccagaagcgagtccctaatgcctacgacaagacagccttggctttggaggtcggtgagctggtaaaggttacgaagattaatgtgagtggtcagtgggaaggggagtgtaatggcaaacgaggtcacttcccattcacacatgtccgtctgctggatcaacagaatcccgaggaggacttcagctgagtatagttccacactttgctgacagatgagaacaatctgtttccacccccaattgccgtctatacaattttcttacaggtgtcaaagcagtctagtttatataagcatcctgttgcctgtgatctt

SEQ ID NO: 2038 - protein, 304 aa, Rattus norvegicus
  ref <308>: DATABASE ACCESSION NUMBER: SWISS-Prot / BAA07924
  ref <309>: DATABASE ENTRY DATE: 2002-06-15
MAGNFDSEERSSWYWGRLSRQEAVALLQGQRHGVFLVRDSSTSPGDYVLSVSENSRVSHYIINSSGPRPPVPPSPAQPPPGVSPSRLRIGDQEFDSLPALLEFYKIHYLDTTTLIEPVSRSRQGSGVILRQEEAEYVRALFDFNGNDEEDLPFKKGDILRIRDKPEEQWWNAEDSEGKRGMIPVPYVEKYRPASASVSALIGGNQEGSHPQPLGGPEPGPYAQPSVNTPLPNLQNGPIYARVIQKRVPNAYDKTALALEVGELVKVTKINVSGQWEGECNGKRGHFPFTHVRLLDQQNPEEDFS

SEQ ID NO: 2039 - DNA, 2431 bp, Homo sapiens
  ref <308>: DATABASE ACCESSION NUMBER: EMBL / BC008506
  ref <309>: DATABASE ENTRY DATE: 2001-07-13
cccgcggctgccgccgccatttcgggcgctgctgtgaagctgaaaccggagccggtccgctgggcggcgggcgccgggggccggaggggcgcgcgcggcggcggcaccccagcgtttaggcgcggaggcagccatggcgggcaacttcgactcggaggagcggagtagctggtactgggggcggttgagtcggcaggaggcggtggcgctgctgcagggccagcggcacggggtgttcctggtgcgggactcgagcaccagccccggggactatgtgctcagcgtctcagagaactcgcgcgtctcccactacatcatcaacagcagcggcccgcgcccgccggtgccaccgtcgcccgcccagcctccgcccggggtgagcccctccagactccgaataggagatcaagagtttgattcattgcctgctttactggaattctacaaaatacactatttggacactacaacgttgatagaaccagtttccagatccaggcagggtagtggagtgattctcaggcaggaggaggcggagtatgtgcgagccctctttgactttaatgggaatgatgaggaagatcttccctttaagaaaggagacatcttgagaatccgggacaagcctgaagagcagtggtggaatgcggaggacagcgaaggcaagagagggatgattccagtcccttacgtcgagaagtatagacctgcctccgcctcagtatcggctctgattggaggtaaccaggagggttcccacccacagccactgggtgggccggagcctgggccctatgcccaacccagcgtcaacactccgctccctaacctccagaatgggcccatatatgccagggttatccagaagcgagtccccaatgcctacgacaagacagccttggctttggaggtcggtgagctggtaaaggttacgaagattaatgtgagtggtcagtgggaaggggagtgtaatggcaaacgaggtcacttcccattcacacatgtccgtctgctggatcaacagaatcccgatgaggacttcagctgagtatagttcaacagttttgctgacagatgggaacaatcttttttttttttttccaactgccatctatacaattttcttacagatgtcaaaagcagtctagtttatataagcattctgttacctgtgatattttttagactgaactgctccattcctagtcttaattaccatattcagggtacgaactggagggcttgtgtgttagcttctgaattggcaattggaggcggtagtggtcgtgcctgtgtgtatcagaagggataggtatcttgcctcctttctctcaggcagtgcaaatcaccctgtggaaaaccgatggacaggaaggagtgttacacactgcttaccctgatttattcagtggttttgttttcattctggaaccatactatcaaatggcgacagactgttccgttccacccccgtgaagtaatcatgcaccgtgtgaatagtatcaagcaggattgctttcattgtatggagcatgaccagcgtgtgactcattctgacatttcagatcctaagaattctaagaacactactagaagcatttgttccctcctagtcaatgcttcatactttttcttgggattcttttagcccttgacattcttgtcccccaaacctgtaagtaggtgaattcctaagataagtgtgtattttcattccaggtgaaaagcaggatgtaccgagcactttattcagtgcatagctttaagccagtgttggattcactaagtggacagccagtctcccagctctctgccttccccaaaagggtcgtagtaggtcacccttctacagcagctaactagagtcctaactaatgggatccagcagggccatttctccagagggccagtatcctattaggagactcttggaattcttaggttctactcaagagtggaaggaccaatcacctctgatattctgtggaaggttttggggtcaaattctgccctctgcattctgtgcaacttgtataaaagtcaagttagtattacatgaatttggggtagggttagtgctttgaaaaaatgttgaaccggctgggcgcggtggctcacgtctgtaatcccagcactttgggaggccgaggcgggtggatcatgaggtcaggagttcgagaccagcctggccaacatagtgaaaccccatctctgctaaagatataaaaaattagcccggcgtggtggtgcacgcctgtaatcccagctactcgggaggctgaggcaggagaattgcttcaacctgggaggtggaggctgcagtgagccgagatcgcaccactgcgttccagcctgagcgacagggcaagactcagtctcaaaaaaaaaaaaaaaaaaaaaaaaaaaaaaaaaaaaaaaaaaaaaaaaaaaa

SEQ ID NO: 2040 - protein, 304 aa, Homo sapiens
  ref <308>: DATABASE ACCESSION NUMBER: SWISS-Prot / P46108
  ref <309>: DATABASE ENTRY DATE: 2002-06-15
MAGNFDSEERSSWYWGRLSRQEAVALLQGQRHGVFLVRDSSTSPGDYVLSVSENSRVSHYIINSSGPRPPVPPSPAQPPPGVSPSRLRIGDQEFDSLPALLEFYKIHYWDTTTLIEPVSRSRQGSGVILRQEEAEYVRALFDFNGNDEEDLPFKKGDILRIRDKPEEQWWNAEDSEGKRGMIPVPYVEKYRPASASVSALIGGNQEGSHPQPLGPPEPGPYAQPSVNTPLPNLQNGPIYARVIQKRVPNAYDKTALALEVGELVKVTKINVSGQWEGGCNGKRGHFPFTHVRLLDQQNPDEDFS

SEQ ID NO: 2041 - DNA, 921 bp, Rattus norvegicus
  ref <308>: DATABASE ACCESSION NUMBER: EMBL / D45249
  ref <309>: DATABASE ENTRY DATE: 1999-01-21
ctcgcgtgcggcgttcagccccggctctggccatggctacactgagggtccatcctgaagcccaagccaaggtcgatgtgtttcgtgaggacctgtgtagtaagacagagaacctgcttgggagctattttcccaagaagatctcagagttggatgccttcttaaaggagccagctctcaacgaagccaacctgagcaatctgaaggctccattggacatcccagtccctgatcccgtcaaggagaaagagaaggaggagcggaagaagcaacaggagaaggaagagaaggacgaaaagaagaaaggggacgaagacgacaaaggtcctccctgtggtccagtgaactgcaatgagaagattgtggtcctcctgcaacgcctaaagcccgagatcaaggatgtcattgagcaactcaacctggttactacctggttgcagctacagatacctcggatagaggatgggaataattttggcgtggctgtccaggcaaaggtgtttgagctgatgaccagccttcataccaagctggaaggcttccaaacgcagatctctaagtacttctccgagaggggtgatgccgtggccaaagcagccaagcagcctcatgtgggtgattatcggcagctggtgcatgagctggacgaggcggaataccaggagatccggctgatggtcatggagatccgtaacgcttatgctgtgttatatgacatcatcctgaagaactttgagaagctcaagaagccccgtggagagacaaaggggatgatctattgagccccctctctcgttctatgatgggtataacagaaaccttcctactcttgactaggaactctagactgcacccagtcttcttcctgctggggtctcctccctcactctgccttccaaacacaataaatacatagttgcc

SEQ ID NO: 2042 - protein, 249 aa, Rattus norvegicus
  ref <308>: DATABASE ACCESSION NUMBER: SWISS-Prot / BAA08206
  ref <309>: DATABASE ENTRY DATE: 2001-10-16
MATLRVHPEAQAKVDVFREDLCSKTENLLGSYFPKKISELDAFLKEPALNEANLSNLKAPLDIPVPDPVKEKEKEERKKQQEKEEKDEKKKGDEDDKGPPCGPVNCNEKIVVLLQRLKPEIKDVIEQLNLVTTWLQLQIPRIEDGNNFGVAVQAKVFELMTSLHTKLEGFQTQISKYFSERGDAVAKAAKQPHVGDYRQLVHELDEAEYQEIRLMVMEIRNAYAVLYDIILKNFEKLKKPRGETKGMIY

SEQ ID NO: 2043 - DNA, 985 bp, Homo sapiens
  ref <308>: DATABASE ACCESSION NUMBER: Refseq / NM_006263
  ref <309>: DATABASE ENTRY DATE: 2000-11-01
gcggagctgggtgcgagcgccctaccgctttcgctttcccttcgcggtgcccactccactccttgtgcggcgctaggccccccgtcccggtcatggccatgctcagggtccagcccgaggcccaagccaaggtggatgtgtttcgtgaagacctctgtaccaagacagagaacctgctcgggagctatttccccaagaagatttctgagctggatgcatttttaaaggagccagctctcaatgaagccaacttgagcaatctgaaggccccattggacatcccagtgcctgatccagtcaaggagaaagagaaagaggagcggaagaaacagcaggagaaggaagacaaggatgaaaagaagaagggggaggatgaagacaaaggtcctccctgtggcccagtgaactgcaatgaaaagatcgtggtccttctgcagcgcttgaagcctgagatcaaggatgtcattgagcagctcaacctggtcaccacctggttgcagctgcagatacctcggattgaggatggtaacaattttggagtggctgtccaggagaaggtgtttgagctgatgaccagcctccacaccaagctagaaggcttccacactcaaatctctaagtatttctctgagcgtggtgatgcagtgactaaagcagccaagcagccccatgtgggtgattatcggcagctggtgcacgagctggatgaggcagagtaccgggacatccggctgatggtcatggagatccgcaatgcttatgctgtgttatatgacatcatcctgaagaacttcgagaagctcaagaagcccaggggagaaacaaagggaatgatctattgagagccctctctcccattctgtgatgagtacagcagagaccttcctgctttttactggggactccagattttccccaaacttgcttctgttgagatttttccctcaccttgcctctcaggcacaataaatatagttataccact

SEQ ID NO: 2044 - protein, 249 aa, Homo sapiens
  ref <308>: DATABASE ACCESSION NUMBER: SWISS-Prot / Q06323
  ref <309>: DATABASE ENTRY DATE: 2001-10-16
MAMLRVQPEAQAKVDVFREDLCTKTENLLGSYFPKKISELDAFLKEPALNEANLSNLKAPLDIPVPDPVKEKEKEERKKQQEKEDKDEKKKGEDEDKGPPCGPVNCNEKIVVLLQRLKPEIKDVIEQLNLVTTWLQLQIPRIEDGNNFGVAVQEKVFELMTSLHTKLEGFHTQISKYFSERGDAVTKAAKQPHVGDYRQLVHELDEAEYRDIRLMVMEIRNAYAVLYDIILKNFEKLKKPRGETKGMIY

SEQ ID NO: 2045 - DNA, 921 bp, Rattus norvegicus; identical to SEQ ID NO: 2041
  ref <308>: DATABASE ACCESSION NUMBER: EMBL / D45249
  ref <309>: DATABASE ENTRY DATE: 1999-01-21

SEQ ID NO: 2046 - protein, 249 aa, Rattus norvegicus; identical to SEQ ID NO: 2042
  ref <308>: DATABASE ACCESSION NUMBER: SWISS-Prot / BAA08206
  ref <309>: DATABASE ENTRY DATE: 2001-10-16

SEQ ID NO: 2047 - DNA, 985 bp, Homo sapiens; identical to SEQ ID NO: 2043
  ref <308>: DATABASE ACCESSION NUMBER: Refseq / NM_006263
  ref <309>: DATABASE ENTRY DATE: 2000-11-01

SEQ ID NO: 2048 - protein, 249 aa, Homo sapiens; identical to SEQ ID NO: 2044
  ref <308>: DATABASE ACCESSION NUMBER: SWISS-Prot / Q06323
  ref <309>: DATABASE ENTRY DATE: 2001-10-16

SEQ ID NO: 2049 - DNA, 2669 bp, Rattus norvegicus
  ref <308>: DATABASE ACCESSION NUMBER: EMBL / D45252
  ref <309>: DATABASE ENTRY DATE: 2000-04-14
ggcagtgcgctaggctgtcagtcaggtaaagggctggccggccggtggtccagagctgtgctgtcatgaccgagggcacgtgtctgcggcgtcgtgggggaccctataaaactgagcccgccaccgatctcacccgctggcggctccataatgagttgggtcggcagagatggacttattatcaagcggaggaggaccctggtcgagaacagacggggctagaggcccactctttgggactggacacaacaagttatttcaagaacttacctaaagctcaaacagcccatgagggggccctgaacggagtaaccttttatgccaagctgcaggctgaggatggacactgggctggtgattatggtggtccactcttcctcttgccaggtctcctgattacgtgtcacatagcacacatccccctgccggctggatacagagaggaaatggtacggtacttgcgctcagtgcagcttcccgatggcggctggggcttgcacattgaggacaagtccacggtgtttgggactgccctgagctatgtgtctctcagaatcctgggtattggacctgatgatcctgaccttgtgcgtgctcggaacattcttcacaaaaaaggtggtgcagtgggcatcccttcctgggggaagttctggctggctgtcctgaatgtttacagctgggaaggaatcaataccctcttccctgagatgtggctgcttcctgaatggtttcccgcacatccctcaactctgtggtgtcactgccggcaggtctatctgcccatgagctactgctacgccactcggctaagtgcctcagaggacccactggttcagagcctccgccaggaactctatgtggaggattatgccagcatcgattggccagcacagaagaacaacgtgtgccccgatgacatgtacacgccacacagttggctgctgcacgtggtgtatggactcctcaacctgtatgaacgtttccacagtaccagcctgcggaagtgggccatccagttgctgtatgaacatgttgcagctgatgatcggttcacaaaatgcatcagcattggcccgatctcaaaaactgtcaacatgcttattcgttggtcagtggacggaccatcctcccctgccttccaggagcacgtctcgaggatcaaagattatctttggctgggccttgacggcatgaaaatgcagggcaccaatggatcacagacctgggacacttcatttgctgtccaagccctgctggaggcaggtgcacaccgaagacctgagtttttgccctgcctgcagaaggctcacgagttcctgcggctttcccaggtcccagacaacaatcctgactaccagaagtattatcgccatatgcacaagggtggtttccccttcagcacactggactgtggctggatcgttgctgactgcacggccgaggctttgaaggctgtgctgctcctgcaggagcggtgtccctcaatcaccgagcatgtcccccaagagcgactctacaatgctgtggctgtgttgttgagcatgaggaattccgatggagggtttgctacctatgagactaagcgtggcgggtatttgctggagctgctgaacccctcagaggtctttggagacatcatgattgactacacgtatgtagagtgtacctccgcagtgatgcaggccctgaggcacttccgcgagtacttcccagaccacagggctacagagagcagggagaccctcaatcaaggcctggacttctgccgaaagaagcagagagcggatggctcgtgggagggctcctggggggtttgcttcacctatggcacctggtttggcttggaagcattcgcttgcatgggacatatctaccaaaataggactgcttgtgcagaagtagctcaggcctgccacttcctcctgtcgcggcagatggcggatgggggctggggggaggactttgagtcctgtgagcagcgacggtacgtgcagagtgccgggtcccaggtccatagtacgtgctgggccctgctgggtttgatggctgtcaggcatcccgacatctctgctcaggagagaggaatcagatgtctgctagggaaacagttccccaacggagaatggcctcaggagaacatctctggggtcttcaacaagtcctgtgccatcagctacaccaattacagaaacatcttccccatctgggccctgggccgcttctccagcctgtatcctgacaatacccttgctggccacatttgagcatgtgtgcgcctgtgcggcacctggccagcgtcagcactgtacaggcccaggcagcccggtttctcagctgggtgataagcgtcctcctagcccactttggcatggttctctatttctgtagacatgaggctggggatagggttcagagtcggtgtctagacactgggtcagcatgctcagagaaaggctcaatggaggaggcaggccccttgctcattgtgtcctgagcagtgtctgttgtcccagacacttacccatgactgcatcactgcacgaaataccagttttccagaaaggaagtacaaactcgctctgtactaaaaatgctactaaaagtcgtttgaatgatcaccaactcccttaataaacagaccctgggctgatggcccagtagtaaag

SEQ ID NO: 2050 - protein, 733 aa, Rattus norvegicus
  ref <308>: DATABASE ACCESSION NUMBER: SWISS-Prot / P48450
  ref <309>: DATABASE ENTRY DATE: 2001-10-16
MTEGTCLRRRGGPYKTEPATDLTRWRLHNELGRQRWTYYQAEEDPGREQTGLEAHSLGLDTTSYFKNLPKAQTAHEGALNGVTFYAKLQAEDGHWAGDYGGPLFLLPGLLITCHIAHIPLPAGYREEMVRYLRSVQLPDGGWGLHIEDKSTVFGTALSYVSLRILGIGPDDPDLVRARNILHKKGGAVGIPSWGKFWLAVLNVYSWEGINTLFPEMWLLPEWFPAHPSTLWCHCRQVYLPMSYCYATRLSASEDPLVQSLRQELYVEDYASIDWPAQKNNVCPDDMYTPHSWLLHVVYGLLNLYERFHSTSLRKWAIQLLYEHVAADDRFTKCISIGPISKTVNMLIRWSVDGPSSPAFQEHVSRIKDYLWLGLDGMKMQGTNGSQTWDTSFAVQALLEAGAHRRPEFLPCLQKAHEFLRLSQVPDNNPDYQKYYRHMHKGGFPFSTLDCGWIVADCTAEALKAVLLLQERCPSITEHVPQERLYNAVAVLLSMRNSDGGFATYETKRGGYLLELLNPSEVFGDIMIDYTYVECTSAVMQALRHFREYFPDHRATESRETLNQGLDFCRKKQRADGSWEGSWGVCFTYGTWFGLEAFACMGHIYQNRTACAEVAQACHFLLSRQMADGGWGEDFESCEQRRYVQSAGSQVHSTCWALLGLMAVRHPDISAQERGIRCLLGKQFPNGEWPQENISGVFNKSCAISYTNYRNIFPIWALGRFSSLYPDNTLAGHI

SEQ ID NO: 2051 - DNA, 3206 bp, Homo sapiens
  ref <308>: DATABASE ACCESSION NUMBER: Refseq / NM_002340
  ref <309>: DATABASE ENTRY DATE: 2000-10-31
cccttgcctactgctcatgggtgtggagactgatattctggaagactgataggcagatttactattaacaaacacatagtctgtggcccagcaaagccaccccaatccctgcacaagggtaaaaggccagcattagagcactgcagcagcaatgacggagggcacgtgtctgcggcgccgagggggcccctacaagaccgagcccgccaccgacctcggccgctggcgactcaactgcgagaggggccggcagacgtggacctacctgcaggacgagcgcgccggccgcgagcagaccggcctggaagcctacgccctggggctggacaccaagaattactttaaggacttgcccaaagcccacaccgcctttgagggggctctgaacgggatgacattttacgtggggctgcaggctgaggatgggcactggacgggtgattatggtggcccacttttcctcctgccaggcctcctgatcacttgccacgtggcacgcatccctctgccagccggatacagagaagagattgtgcggtacctgcggtcagtgcagctccctgacggtggctggggcctgcacattgaggataagtccaccgtgtttgggactgcgctcaactatgtgtctctcagaattctgggtgttgggcctgacgatcctgacctggtacgagcccggaacattcttcacaagaaaggtggtgctgtggccatcccctcctgggggaagttctggctggctgtcctgaatgtttacagctgggaaggcctcaataccctgttcccagagatgtggctgtttcctgactgggcaccggcacacccctccacactctggtgccactgccggcaggtgtacctgcccatgagctactgctacgccgttcggctgagtgccgcggaagacccgctggtccagagcctccgccaggagctctatgtggaggacttcgccagcattgactggctggcgcagaggaacaacgtggcccccgacgagctgtacacgccccacagctggctgctccgcgtggtatatgcgctcctcaacctgtatgagcaccaccacagtgcccacctgcggcagcgggccgtgcagaagctgtatgaacacattgtggccgacgaccgattcaccaagagcatcagcatcggcccgatctcgaaaaccatcaacatgcttgtgcgctggtatgtggacgggcccgcctccactgccttccaggagcatgtctccagaatcccggactatctctggatgggccttgacggcatgaaaatgcagggcaccaacggctcacagatctgggacaccgcattcgccatccaggctctgcttgaggcgggcgggcaccacaggcccgagttttcgtcctgcctgcagaaggctcatgagttcctgaggctctcacaggtcccagataaccctcccgactaccagaagtactaccgccagatgcgcaagggtggcttctccttcagtacgctggactgcggctggatcgtttctgactgcacggctgaggccttgaaggctgtgctgctcctgcaggagaagtgtccccatgtcaccgagcacatccccagagaacggctctgcgatgctgtggctgtgctgctgaacatgagaaatccagatggagggttcgccacctatgagaccaagcgtggggggcacttgctggagctgctgaacccctcggaggtcttcggggacatcatgattgactacacctatgtggagtgcacctcagccgtgatgcaggcgcttaagtatttccacaagcgtttcccggagcacagggcagcggagatccgggagaccctcacgcagggcttagagttctgtcggcggcagcagagggccgatggctcctgggaaggctcctggggagtttgcttcacctacggcacctggtttggcctggaggccttcgcctgtatggggcagacctaccgagatgggactgcctgtgcagaggtctcccgggcctgtgacttcctgctgtcccggcagatggcagacggaggctggggggaggactttgagtcctgcgaggagcggcgttatttgcagagtgcccagtcccagatccataacacatgctgggccatgatggggctgatggccgttcggcatcctgacatcgaggcccaggagagaggagtccggtgtctacttgagaaacagctccccaatggcgactggccgcaggaaaacattgctggggtcttcaacaagtcctgtgccatctcctacacgagctacaggaacatcttccccatctgggccctcggccgcttctcccagctgtaccctgagagagcccttgctggccacccctgagaacatgcctacctgctgggtgccgtctgtgcgttccagtgaggccaaggggtcctggccgggttggggagccctcccataaccctgtcttgggctccaacccctcaacctctatctcatagatgtgaatctgggggccaggctggaggcagggatggggacagggtgggtggcttagactcttgatttttactgtaggttcatttctgaaagtagcttgtcgggcttgggtgaggaagggggcacaggagccgtgacccctgaggaggcacagcgccttctgccacctctgggcacggcctcaaggtagtgaggctaggaggttttttctgaccaatagctgagttcttgggagaggagcagctgtgcctgtgtgattccttagtgtcgagtgggctctgggctggggtcggccctgggcaggcttctcctgcaccttttgtctgctgggctgagggacacgagggcaaccctgtgacaatggcaggtagtgtgcatccgtgaatagcccagtgcgggggttgctcatggagcatcctgaggccgtgcagcagggagccccatgcccctgggtcgtgagcttgcctgcgtatggggtggtgtcatggagcctcatgcccctgggtcgtgagctcgcctgagtatggggtggtgtcatggagccgcatacccctgggttgtgagctcgcctgcatatgcagggtctgtcatggaacatcccaagtctgtgcagcagggagccccatgcccctgggacatgaacccacctgcgtggaatgctgtttgtgaggtgtctacagggtttatagtagtcttgtggacacagaaatgcacaggggacacttacggacacaga

SEQ ID NO: 2052 - protein, 732 aa, Homo sapiens
  ref <308>: DATABASE ACCESSION NUMBER: SWISS-Prot / P48449
  ref <309>: DATABASE ENTRY DATE: 2001-10-16
MTEGTCLRRRGGPYKTEPATDLGRWRLNCERGRQTWTYLQDERAGREQTGLEAYALGLDTKNYFKDLPKAHTAFEGALNGMTFYVGLQAEDGHWTGDYGGPLFLLPGLLITCHVARIPLPAGYREEIVRYLRSVQLPDGGWGLHIEDKSTVFGTALNYVSLRILGVGPDDPDLVRARNILHKKGGAVAIPSWGKFWLAVLNVYSWEGLNTLFPEMWLFPDWAPAHPSTLWCHCRQVYLPMSYCYAVRLSAAEDPLVQSLRQELYVEDFASIDWLAQRNNVAPDELYTPHSWLLRVVYALLNLYEHHHSAHLRQRAVQKLYEHIVADDRFTKSISIGPISKTINMLVRWYVDGPASTAFQEHVSRIPDYLWMGLDGMKMQGTNGSQIWDTAFAIQALLEAGGHHRPEFSSCLQKAHEFLRLSQVPDNPPDYQKYYRQMRKGGFSFSTLDCGWIVSDCTAEALKAVLLLQEKCPHVTEHIPRERLCDAVAVLLNMRNPDGGFATYETKRGGHLLELLNPSEVFGDIMIDYTYVECTSAVMQALKYFHKRFPEHRAAEIRETLTQGLEFCRRQQRADGSWEGSWGVCFTYGTWFGLEAFACMGQTYRDGTACAEVSRACDFLLSRQMADGGWGEDFESCEERRYLQSAQSQIHNTCWAMMGLMAVRHPDIEAQERGVRCLLEKQLPNGDWPQENIAGVFNKSCAISYTSYRNIFPIWALGRFSQLYPERALAGHP

SEQ ID NO: 2053 - DNA, 2669 bp, Rattus norvegicus; identical to SEQ ID NO: 2049
  ref <308>: DATABASE ACCESSION NUMBER: EMBL / D45252
  ref <309>: DATABASE ENTRY DATE: 2000-04-14

SEQ ID NO: 2054 - protein, 733 aa, Rattus norvegicus; identical to SEQ ID NO: 2050
  ref <308>: DATABASE ACCESSION NUMBER: SWISS-Prot / P48450
  ref <309>: DATABASE ENTRY DATE: 2001-10-16

SEQ ID NO: 2055 - DNA, 3206 bp, Homo sapiens; identical to SEQ ID NO: 2051
  ref <308>: DATABASE ACCESSION NUMBER: Refseq / NM_002340
  ref <309>: DATABASE ENTRY DATE: 2000-10-31

SEQ ID NO: 2056 - protein, 732 aa, Homo sapiens; identical to SEQ ID NO: 2052
  ref <308>: DATABASE ACCESSION NUMBER: SWISS-Prot / P48449
  ref <309>: DATABASE ENTRY DATE: 2001-10-16

SEQ ID NO: 2057 - DNA, 1640 bp, Rattus norvegicus
  ref <308>: DATABASE ACCESSION NUMBER: EMBL / D45254
  ref <309>: DATABASE ENTRY DATE: 2000-04-27
agagccgtgcgcagcggcgtgtgtggggccgtgtgcagacccgcgtgtggcgcaggcaaggaccctgaaaataaacagccgctgctttgcgagtctccttcttgggtctacgtccgagtctcctctgctgtgggcagctcagacgccgaagctctaactgcagctatgagcagcaacgaatgcttcaagtgtggacgatctggccactgggccagggaatgccctactggtggaggtcggggtcgtggaatgagaagccgcggcagaggtggttttacctcggatagagggttccagtttgtttcctcgtctcttcctgacatctgttatcgctgtggtgagtctggtcatcttgccaaggattgtgatcttcaggaggatgcctgctataactgcggtagaggtggccacattgccaaggactgcaaggagcccaagagagagcgagagcaatgctgctacaactgtggcaagccaggccatctggctcgtgactgtgaccacgcggacgagcagaagtgctattcctgtggggaatttggacatattcaaaaagactgcaccaaggtgaagtgctataggtgtggtgaaactggtcatgtagccatcaattgcagcaagacaagtgaagtcaactgttaccgctgtggcgagtcagggcatcttgcacgggaatgcacaattgaggctactgcctaattattttcctttgtcgcccctcctttttctgattgatggttgtattattttctctgaatcctcttcactggccaaaggttggcagatagaggctgttcccaggccagtgagctttacttgcagtgtaaaaggaggaaaggggtggaaaaaaaaccgaatttctgcatttaactacaaaaaaagtttatgtttagtttggtagaggtgttatgtataatgctttgttaaagaaccccctttccgtgccactggtgaatagggattaatgaatgggaagagttcagtcagaccagtaagcccttctgggtttgagtgtgttcccatgtaggaggtaaaaccaattctggatgcatctaagcttccatgaataactttaattcttagcataatgatggccttggattgtctgacctcagtagctattaaataacatcgagtaacatctgcatcaggccctcatagaacattcagttgagttgggagtaaactgaaaagacaaatgtgttgaaggatatgccagggaatctggctaaagcctaatacaggagcatcttcatcccagtgttgatgctggacgtacagaaggtgatggcaaaggtgtagaacacattttttcaaagactaaatctaaaacccagagtaaacatccgatgctcagagttagcataatttggagctattcaggaattgcagagaaatgcattttcacagaaatcaagatgttatttttgtatactatatcacttagacaactgtgtttcatttgctgtaatcagtttttaaagtcagatggaaaaagcaactgaagtcttagaaaatagaaaatgtaattttaaactattccaataaagctggaggaggaaggggagttttgactaaagttccttttgtttgttttaaattttcatcaatgtatatagaacaaaatgccatattaaaga

SEQ ID NO: 2058 - protein, 177 aa, Rattus norvegicus
  ref <308>: DATABASE ACCESSION NUMBER: SWISS-Prot / P20694
  ref <309>: DATABASE ENTRY DATE: 2002-06-15
MSSNECFKCGRSGHWARECPTGGGRGRGMRSRGRGGFTSDRGFQFVSSSLPDICYRCGESGHLAKDCDLQEDACYNCGRGGHIAKDCKEPKREREQCCYNCGKPGHLARDCDHADEQKCYSCGEFGHIQKDCTKVKCYRCGETGHVAINCSKTSEVNCYRCGESGHLARECTIEATA

SEQ ID NO: 2059 - DNA, 1500 bp, Homo sapiens
  ref <308>: DATABASE ACCESSION NUMBER: Refseq / NM_003418
  ref <309>: DATABASE ENTRY DATE: 2002-11-05
gaattccaaacagcctctaccttgcgagccgtcttccccaggcctgcgtccgagtctccgccgctgcgggcccgctccgacgcggaagatctgactgcagccatgagcagcaatgagtgcttcaagtgtggacgatctggccactgggcccgggaatgtcctactggtggaggccgtggtcgtggaatgagaagccgtggcagaggtggttttacctcggatagaggtttccagtttgtttcctcgtctcttccagatatttgttatcgctgtggtgagtctggtcatcttgccaaggattgtgatcttcaggaggatgcctgctataactgcggtagaggtggccacattgccaaggactgcaaggagcccaagagagagcgagagcaatgctgctacaactgtggcaaaccaggccatctggctcgtgactgcgaccatgcagatgagcagaaatgctattcttgtggagaattcggacacattcaaaaagactgcaccaaagtgaagtgctataggtgtggtgaaactggtcatgtagccatcaactgcagcaagacaagtgaagtcaactgttaccgctgtggcgagtcagggcaccttgcacgggaatgcacaattgaggctacagcctaattattttcctttgtcgcccctcctttttctgattgatggttgtattattttctctgaatcctcttcactggccaaaggttggcagatagaggcaactcccaggccagtgagctttacttgccgtgtaaaaggaggaaaggggtggaaaaaaaccgactttctgcatttaactacaaaaaaagtttatgtttagtttggtagaggtgttatgtataatgctttgttaaagaaccccctttccgtgccactggtgaatagggattgatgaatgggaagagttgagtcagaccagtaagcccgtcctgggttccttgaacatgttcccatgtaggaggtaaaaccaattctggaagtgtctatgaacttccataaataactttaattttagtataatgatggtcttggattgtctgacctcagtagctattaaataacatcaagtaacatctgtatcaggccctacatagaacatacagttgagtgggagtaaacaaaaagataaacatgcgtgttaatggctgttcgagagaaatcggaataaaagcctaaacaggaacaacttcatcacagtgttgatgttggacacatagatggtgatggcaaaggtttagaacacattattttcaaagactaaatctaaaacccagagtaaacatcaatgctcagagttagcataatttggagctattcaggaattgcagagaaatgcattttcacagaaatcaagatgttatttttgtatactatatcacttagacaactgtgtttcatttgctgtaatcagtttttaaaagtcagatggaaagagcaactgaagtcctagaaaatagaaatgtaattttaaactattccaataaagctgga

SEQ ID NO: 2060 - protein, 177 aa, Homo sapiens; identical to SEQ ID NO: 2058

SEQ ID NO: 2061 - DNA, 1640 bp, Rattus norvegicus; identical to SEQ ID NO: 2057
  ref <308>: DATABASE ACCESSION NUMBER: EMBL / D45254
  ref <309>: DATABASE ENTRY DATE: 2000-04-27

SEQ ID NO: 2062 - protein, 177 aa, Rattus norvegicus; identical to SEQ ID NO: 2058
  ref <308>: DATABASE ACCESSION NUMBER: SWISS-Prot / P20694
  ref <309>: DATABASE ENTRY DATE: 2002-06-15

SEQ ID NO: 2063 - DNA, 1500 bp, Homo sapiens; identical to SEQ ID NO: 2059
  ref <308>: DATABASE ACCESSION NUMBER: Refseq / NM_003418
  ref <309>: DATABASE ENTRY DATE: 2002-11-05

SEQ ID NO: 2064 - protein, 177 aa, Homo sapiens; identical to SEQ ID NO: 2058

SEQ ID NO: 2065 - DNA, 1223 bp, Rattus norvegicus
  ref <308>: DATABASE ACCESSION NUMBER: EMBL / D45255
  ref <309>: DATABASE ENTRY DATE: 1999-01-21
ccggcgttgtgctgaggctgccaccactgaccctgggacaccgaggctgcgatgagcccctgcgggcgggccctacatacatccagaggggccatggccatgctggcgcggaaattcccgcgtacccggctacccgtgggagccagtgccctctgtgtggtggtcctctgttggctctatgtcttccctgtctaccggctgcccaacgagaaggagatcgtgcaaggagtgctggcgcagcgcacagcttggaggaggaaccagacgtcagccaggctcttcaggagacaaatggaagactgctgcaaccccgcccatctctttgcaatgacgaaggtgaactcccccatggggaagagcctgtggtatgacggggagtttctatactcgctcaccatcgacaactccacgtactccctcttcccccaggcaacccccttccagctgccattgaagaaatgtgcggtggtgggaaacggtgggattctgaagatgagtggctgtggccgtcaaatagatgaagcaaattttgtcatgcggtgtaaccttcctcccttgtcaagtgaatacaccagagatgtgggttccaagactcagttggtgacagctaaccccagcataattcgccagagatttgaaaacctgctgtggtccagaaagaagtttgtggacaacatgaagatctataaccacagttacatatacatgcctgccttttctatgaagacgggaacagagccgtctctccgtgtgtactacaccctgaaagacgctggagccaatcaaacagtgctttttgctaaccccaactttcttcgaaacattggaaagttctggaagggtagggggatccatgccaagcgcctgtctacaggactctttttggtgagtgcagccttgggcctttgtgaggaggtgtccatctacggcttctggcccttctccgtgaacatgcaaggggaacctatcagccaccattactatgacaacgtcttgcccttctcaggcttccatgccatgcctgaggagtttcttcaactctggtatcttcataaaatgggtgcactgaggatgcaactggacccatgtgaggagccgtcgccgccacagcccacttcctagggactgcagaagaggaaaagactggatgggggtatttttttgctagatttttttttatgtgactttcaaaaggagctgccaaagtgtgtcatggattggcg

SEQ ID NO: 2066 - protein, 359 aa, Rattus norvegicus
  ref <308>: DATABASE ACCESSION NUMBER: SWISS-Prot / BAA08213
  ref <309>: DATABASE ENTRY DATE: 2002-10-01
MSPGGGPLHTSRGAMAMLGGKFPRTRLPVGASALCVVVLCWLYVFPVYRLPNEKEIVQGVLAQRTAWRRNQTSARLFRKQMEDCCNPAHLFAMTKVNSPMGKSLWYDGEFLYSLTIDTSTYSLFPQATPFQLPLKKCAVVGNGGILKMSGCGRQIDEANFVMRCNLPPLSSEYTRDVGSKTQLVTANPSIIRQRFENLLWSRKKFVDNMKIYNHSYIYMPAFSMKTGTEPSLRVYYTLKDAGANQTVLFANPNFLRNIGKFWKGRGIHAKRLSTGLFLVSAALGLCEEVSIYGFWPFSVNMQGEPISHHYYDNVLPFSGFHAMPEEFLQLWYLHKMGALRMQLDPCENPPPSRHHSPPS

SEQ ID NO: 2067 - DNA, 5233 bp, Rattus norvegicus
  ref <308>: DATABASE ACCESSION NUMBER: EMBL / D45920
  ref <309>: DATABASE ENTRY DATE: 1999-01-21
aggcagccgccgccgcacttcctgaggccgccgctccgcgtcggcgggcaggtggctggtggccggtccgcagtcgccgctcgggccgcgcgcgtccaggcttcggagggttcggaggctccgggctccggcgcccgctgtcttttgtctgcgcagagccggcgctcgcctcccctcgccggtacctcccgctgcttttcgcctgcttctccctcccgctcacatcttctccccgcccccgccgccggtccgcgccggccgctgacctcctggaccacagcccgaggacgcctctgcccgagtgatgtctcctctctacaaagttgcggccgccgctgcagccgccgtcgcgcgctgaaacaaagtctagcggcgtttccttctggtgcctgagcgcacccttactcagggctggacgccgctggcggtcgtgctgtctcgccgggagcctagaacgtgcttggccatggctgagggcgcggctagcagggaggctccggcgcctctcgacgttgcggggggcgaagacgaccctcgagccggcgccgatgctgcctccggggacgctgcacccgaggcctcggggggccggatgagggaccgtcgcagcggggttgcgctgccgggcaatgcgggggtccccgcggatagcgaggctggcctcctggaggcggcacgagcgaccccccggcgcacgagcatcatcaaggatccttcaaaccaaaaatgtggtggcagaaagaaaacagtgtctttcagcagcatgccatcggagaagaagattagcagtgcccatgactgcattagcttcatgcaggctggctgcgagctgaagaaagtgcgaccgaactctcgcatctacaaccgatttttcaccctagacactgacctccaggctctacgctgggaaccttccaagaaagacctcgaaaaagccaagctggacatttctgccatcaaagagatcaggctggggaagaacacggagacattcagaaacaatggccttgctgaccagatctgtgaagactgtgccttctccatactccatggggaaaattacgagtctctggacctagttgccaattcagcagatgtagcaaacatctgggtgtcggggttacggtacctggtctctcgcagtaagcaaccacttgactttatggagggcaaccagaacacaccacggttcatgtggctgaaaacggtgtttgaagcagcagatgttgatgggaatgggattatgttagaagatacctcggtggagttaataaaacaactcaaccctactctgaaggaatctaagatcaggttaaagtttaaagaaatccagaagagcaaagaaaaactaactacccgggtaacagaagaggaattctgtgaagcgttctgtgaactttgcactagaccagaagtgtatttcttacttgttcagatatctaagaacaaagagtatctggatgctaatgacctcatgctctttttagaagttgagcaaggggtcacccatgtcactgaggatatgtgcttagacatcattaggagatacgaactttctgaagatggccgccagaaaggcttccttgcaattgatggctttacccagtatttattatctccagaatgcgacatttttgatccagagcaaaagaaggttgcccaagacatgacccaacccttatctcactactatatcaatgcgtcccataatacctacctgatagaagatcagttcagggggccagctgatatcaatgggtatgtgagggctttgaagatgggctgtcgaagcattgagcttgatgtaagtgacggtccagataatgaacccatcctgtgcaataggaacaacatggccatgctcctttcctttcgaagtgttctggaggtgataaataagttcgccttcgtcgcttcagagtacccactcattctctgcttggggaatcactgttccctgccacagcagagggtcatggttcagcagatgaaaaaggtgtttggcaataaactttatacagaagcacctctgtcttcagaatcctacctcccgtcgcctgaaaaactaaaacatatgatcattgtgaaaggaaagaaattgccttcggagtcagatctgttagagggagaagtgaccgacgaggatgaagaagctgagatgtcccggagggtgtcgggagattacaacggtgagcagaaacatatctggctctgccgagagctctctgacttggtatccatctgtaaatccgttcagtacagggattttgaactgtctatgaaaacccagaactactgggaaatttgttcatttagtgaaacattggccagccggatcgcaaatgagtatccagaggatttcgtgaattataacaagaagttcttatcaagggtctaccctagtgccatgaggatagattccagtaatttgaacccacaggacttctggaattgtggctgtcagattgtggcaatgaattttcaaactcctggtccaatgatggacctccacaccggctggtttcttcaaaatgggggctgtggctacgtcctcaggccatctatcatgcgagatgaagtttcgtactttagtgcaaacacaaagggcattgtccctggagtgtctcccctgcttcttcacatcaagatcatcagtggtcagaacttcccaaagcccaaaggagcttgtgccaaaggggatgtcatagacccctacgtttgtgtagagattcatggaattccagctgattgctccgagcaaagaactaaaactgtacaacagaacagcgataatcccattttcgatgaaactttcgagtttcaagtcaaccttcccgagctgaccatggtccgttttgtcattttggatgatgattacattggagatgagttcattgggcaatacacgataccgtttgaatgtctgcaacctgggtaccggcatgtccccttgcgctcctttgtgggggatatcatggaacatgtgaccctttttgtccacatagcaataaccaatcggagtggcggaggaaaagcgcagaagcgaagtctttccgtgagaatggggaagaaagttcgagaatacaccatgctcagaaatatcggtcttaaaaccatagatgatatcttcaaaatagcagttcatcctttgcgagaagccatagatatgagagaaaacatgcagaacgccatagtgtctgttaaggagctgtgtggactcccaccgattgccagtctgaaacagtgcctgttaaccctgtcctctcgtctcatcaccagtgatagtactccctccgtgtctctggtgatgaaggactgctttccttacctggagcctctgggcacaattccagatgtgcagaagaggatgctggctgcatatgatctgatgattcaagagagtcgggtcctcatagaaatggctgacacagtccaggaaaaaattgtacagtgtcagaaagcagggatggaattccatgaagaacttcataatctaggggcaaaggaaggcttgaagggaagaaaactcaacaaggccatcgagagcttcgcttggaatattactgtattgaagggacaaggagacctgctgaagaatgccaagaatgaagccgtagagaacataaagcagatccagctggcctgtttgtcttgtggactgagtaaaggccctggcagcgctgcagaggccaagggcaagcgcagcttggaagccatagaggagaaggaaagcagtgaagagaacgggaagttgtgagctgggcagtgcgcaggcccttgtccaacactctggtttctcattcttctcgttttgttttgtttttacattcttcagatgttcacagaaatgatgccctttgcggggtgttgtacataaacatatattttcacagtgtcagtattttactgtagttaatttatctaagttaaaacttttagtagcagtgttttaaactttgagctgtgagtatatacttacatgtggctgcctgtgtgtgtgtgtgtgtgtgtgtttgtgtgtgtgtgtgtgtgtgtgtgtgtgtgtgtgagagagagagagagagagagagagagagagagagagagagagagtaagagttcctgttaaaatattctctgtcgcattgttggttttaataagttattcttttatctttaagatcatttggggatagttgataatctgaattctaatgagcatttattataaccccttgctgtcgttagttttacctctctgcctttgtcatataatttggagatctcagcacagcttatgattgaagaaaaccaaatttataagagcaaaggcgttttatagattacatagagatttaaaagttcctaaacattacattagaaatgaaagtgaatagaaaaatcttttaaaatcataattctggaaagataaacaaattcatttcttcattagcaaaatctttgagatatttattaactaaaatcacatttaggaagtttctgtagctgtttactgagcatgtggtttcggtagaagagctgagtgcagagaacctgtagccactgggcagtactttgaagcccactaaatgctctactgaactagcactgttgatgtgaccataacactcagttgtgcaatttcaaggtttgcagaaagacctcattctcctgggccgggagtatggaattcattttctattaccagtggtgggcagatccaagtgcttggccaggactagatctagtatagattactaaatttaagtgtcaacaccttgttaaaataatatattatcatgttgagctggcataaattctgtaagtccgataacatctttctgatgatttgagaactaactaattagacaacatgtatggtataattttaaaacatacagtaaaaaccaagagcaagtggctaattagggtacatttataattatatctagataatcttaccctaatgtcttcataaacttcttaaatgtcatgttcattcattaccaccaacagaactaaatgttctatgattatgaaagaatatatttgtttaaaacattgcttttattttgaaaagcttcttaattaatttgattaacaaatatattaatttgggggagcctagagaagataatcattgaaattttgcaaatataaacatcctctacagctactatgttatttctgactgttcttaatactactctgttcttgtcgcacattaccaaaagagtaaagatactgaaaacag

SEQ ID NO: 2068 - protein, 1096 aa, Rattus norvegicus
  ref <308>: DATABASE ACCESSION NUMBER: SWISS-Prot / BAA08351
  ref <309>: DATABASE ENTRY DATE: 2003-02-01
MAEGAASREAPAPLDVAGGEDDPRAGADAASGDAAPEASGGRMRDRRSGVALPGNAGVPADSEAGLLEAARATPRRTSIIKDPSNQKCGGRKKTVSFSSMPSEKKISSAHDCISFMQAGCELKKVRPNSRIYNRFFTLDTDLQALRWEPSKKDLEKAKLDISAIKEIRLGKNTETFRNNGLADQICEDCAFSILHGENYESLDLVANSADVANIWVSGLRYLVSRSKQPLDFMEGNQNTPRFMWLKTVFEAADVDGNGIMLEDTSVELIKQLNPTLKESKIRLKFKEIQKSKEKLTTRVTEEEFCEAFCELCTRPEVYFLLVQISKNKEYLDANDLMLFLEVEQGVTHVTEDMCLDIIRRYELSEDGRQKGFLAIDGFTQYLLSPECDIFDPEQKKVAQDMTQPLSHYYINASHNTYLIEDQFRGPADINGYVRALKMGCRSIELDVSDGPDNEPILCNRNNMAMLLSFRSVLEVINKFAFVASEYPLILCLGNHCSLPQQRVMVQQMKKVFGNKLYTEAPLSSESYLPSPEKLKHMIIVKGKKLPSESDLLEGEVTDEDEEAEMSRRVSGDYNGEQKHIWLCRELSDLVSICKSVQYRDFELSMKTQNYWEICSFSETLASRIANEYPEDFVNYNKKFLSRVYPSAMRIDSSNLNPQDFWNCGCQIVAMNFQTPGPMMDLHTGWFLQNGGCGYVLRPSIMRDEVSYFSANTKGIVPGVSPLLLHIKIISGQNFPKPKGACAKGDVIDPYVCVEIHGIPADCSEQRTKTVQQNSDNPIFDETFEFQVNLPELTMVRFVILDDDYIGDEFIGQYTIPFECLQPGYRHVPLRSFVGDIMEHVTLFVHIAITNRSGGGKAQKRSLSVRMGKKVREYTMLRNIGLKTIDDIFKIAVHPLREAIDMRENMQNAIVSVKELCGLPPIASLKQCLLTLSSRLITSDSTPSVSLVMKDCFPYLEPLGTIPDVQKRMLAAYDLMIQESRVLIEMADTVQEKIVQCQKAGMEFHEELHNLGAKEGLKGRKLNKAIESFAWNITVLKGQGDLLKNAKNEAVENIKQIQLACLSCGLSKGPGSAAEAKGKRSLEAIEEKESSEENGKL

SEQ ID NO: 2069 - DNA, 4565 bp, Homo sapiens
  ref <308>: DATABASE ACCESSION NUMBER: EMBL / D42108
  ref <309>: DATABASE ENTRY DATE: 2002-06-03
gaattccgggcagcatcatcaaggcacatagattctctctttgaacaatgcagctgctgcaggggatggggaagggatggcactggcaattcaagactgcctttcctacttcttcagtgcctctttcaccaatatgaagttaaaaccaggatccttcaaaccaaaaatgtggtggaagaaagaaaaccgtgtctttcagcagcatgccatcggaaaagaaaattagcagtgcaaatgactgcatcagcttcatgcaagctggctgtgagttgaagaaagtccggccaaattctcgcatttacaaccgttttttcactctggacacagaccttcaagctcttcgctgggaaccttcaaagaaagacctcgagaaagccaagcttgatatttctgccataaaagagatcagactggggaaaaacacggaaacatttacaaacaatggccttgctgaccagatctgtgaggactgtgccttttccatactccacggggaaaactatgagtctctggacctagttgccaattcagcagatgtggcaaacatctgggtgtctgggttacggtacctggtttctcgaagtaagcagcctcttgattttatggagggcaaccagaacacaccacggttcatgtggttgaaaacagtgtttgaagcagcagatgttgatgggaatgggattatgttggaagacacctctgtagagttaataaaacaactcaaccctactctgaaggaagccaagatcaggttaaagtttaaagaaatccagaagagcaaggaaaaactaaccacccgcgtgaccgaagaggaattttgtgaagctttttgtgaactttgcaccaggccagaagtgtatttcttacttgtacagatatctaaaaacaaagaatatttggatgccaatgatctcatgctctttttagaagctgagcaaggagtcacccatatcaccgaggatatatgcttagacatcataaggagatacgaactttctgaagagggacgtcaaaaagggtttcttgcaattgatggctttacccagtatttattgtcatcagaatgtgacatttttgatcctgagcaaaagaaggttgcccaagatatgacccagccattatctcactactatatcaatgcctctcataacacctatctaatagaagaccagttcagggggccagctgacatcaatgggtacattagagctttgaaaatgggctgtcgaagcgttgaactcgatgtaagtgatggttcagataatgaaccaatcctttgtaatcgaaataacatgacaacccatgtttcctttcgaagtgtcatagaggtaataaataaatttgcctttgttgcttctgaatacccactcattctttgcttgggaaatcactgctccttgccgcagcagaaggtaatggctcaacagatgaaaaaggtctttggcaataaactctatactgaagcacctttgccctcagaatcctacctcccatcaccagaaaaattaaaaagaatgatcattgtgaaaggaaagaagttgccttctgatccagatgtgttagaaggagaagtaacagatgaagatgaagaagctcaaatgtctcgaaggatgtcggtagattacaatggtgagcagaagcaaatccgactctgtagggagctctctgatttggtgtctatttgtaaatctgttcaatacagggattttgaactatctatgaaaagccaaaactattgggaaatgtgttcatttagtgaaacagaggccagccgcattgcaaatgagtacccagaggattttgttaattataataagaagttcttatcaagaatctatccaagtgccatgaggatcgattccagtaacttgaatccacaggacttttggaattgtggctgtcagattgtagcaatgaattttcagactccgggtccaatgatggaccttcacacgggctggtttcttcaaaacgggggatgtggttatgttctaaggccgtctataatgcgagatgaagtttcttacttcagcgcaaatacaaagggcattctacctggggtgtctcctctagctcttcatatcaagatcatcagtggtcagaatttcccaaagcccaagggagcttgtgccaaaggggatgtcatagatccctatgtttgtatagagatacacggaattccagcggattgttcggaacaaagaactaaaactgtacagcaaaacagtgataatcctatttttgatgaaacttttgagttccaagtaaacctacctgagctggccatgatccgttttgttgttctggatgatgactacattggggatgagtttatagggcaatatacgataccatttgaatgtttgcagcctggatatcggcatgttcccctgcgttcttttgtgggtgacatcatggagcacgtaaccctttttgtccacatagcaataactaatcgaagtggaggaggaaaggcacagaagcgcagtctttcagtgagaatggggaagaaagttcgggaatataccatgctcaggaatatcggtcttaaaaccattgatgacatctttaaaatagcggttcatccattacgagaagccatagatatgagagaaaatatgcagaatgcaatcgtgtctattaaggaactatgtggactccctccaattgccagtctgaagcagtgcctgttaactctgtcatctcggctcatcaccagtgacaatactccttcagtctcacttgtgatgaaagacagctttccttacctggagcctctgggtgcaattccagatgtgcagaaaaagatgctgactgcttatgatctgatgattcaagagagccggtttctcatagaaatggcggacacagtccaggaaaagattgtacagtgtcagaaagcagggatggagttccatgaagaacttcataatttgggggcaaaagaaggcttgaagggaagaaaactcaacaaagcaactgagagctttgcttggaacattacagtattgaagggccaaggagatctgttgaagaatgccaagaatgaagctatagaaaacatgaagcagatccagctggcatgcctgtcctgtggactgagtaaagcccccagcagcagtgctgaggccaagagcaagcgcagcctggaagccatagaggagaaggaaagtagtgaggagaatgggaagctgtgactctgggcattatcgacacgttcacccatcttatcaaggactctggtttctcattcttgttttctttctttaaatgttttataagttcacaaaatggtgccctatatggggtattggacatagatattttcacaatgtcagtatttcagtgtagttaatttatctaaattaaagcctttagtatcagtgttttaaattctgagacatgtgtcaacacccctgtgtggatgcctgtggaagagtgtgtgtgtgtgtgtgtgtgtgtgtgtgtgtgtgtgtggcagagagagagaaagagagagagagaaattctgttaaaatctattctgtgttgcattattcatttagtgagttattccttgatcattttgggacaattgttttaatctgaaattctaaagagcacttactgtaacctgttgctgtgtttaatttgacttctctgcctttgacatttaatttagtgatcttagcatagcttattattgaaggaagccaaatttatcaaagcatacatgttttggtagattaaatatagattagaaaaattcctaagaatcagagtagaaataaaagtgaatgaaagattaaacagatgatgagaatttctaaaaagattagcaaggtcatttcttcagtcagaaaactttaaaaaatatttattaaataaaatcaatttttaggaagttttctgtagtcatttactaaacatatgatttcactagaaaagctgatcataagtgaatttatacctacctgtgtggctactctgaaacacactgaaagctctgttgcaattaggatttgatgtgacataatattgttgtataatttcgagatttgtaggaaggtctcattcttccaagctgagagtctagcactcattttctataacagatatggcagcttagaggtgttggctttgtttggatgtaattttaggggtactaaaatttaaaatttaaagataattgttcaacaatatcatatcatcacattgagctgatataaattctgtgggtccgataatatctttgtgataatttaagagctaaccagttaccacacatctatgatataaccctaacacacacagaaagcatacatgcaaaaagaaatgactaattagggtacatttataattgcatctaggtaatttttaccctaatgtcttcataaagtacttgagtgtaatgtttgttacctccaacagaactaaatgttctatggttatgaaagaatatatttatttaaagcattgcttttattttgaaaagcttcttaattaatttgattaacaaatatgctaatttggggaaacctagagaagataattgttgaaattttgcaaatataaacatctcctat

SEQ ID NO: 2070 - protein, 997 aa, Homo sapiens
  ref <308>: DATABASE ACCESSION NUMBER: Refseq / NP_006217
  ref <309>: DATABASE ENTRY DATE: 2002-11-05
MPSEKKISSANDCISFMQAGCELKKVRPNSRIYNRFFTLDTDLQALRWEPSKKDLEKAKLDISAIKEIRLGKNTETFTNNGLADQICEDCAFSILHGENYESLDLVANSADVANIWVSGLRYLVSRSKQPLDFMEGNQNTPRFMWLKTVFEAADVDGNGIMLEDTSVELIKQLNPTLKEAKIRLKFKEIQKSKEKLTTRVTEEEFCEAFCELCTRPEVYFLLVQISKNKEYLDANDLMLFLEAEQGVTHITEDICLDIIRRYELSEEGRQKGFLAIDGFTQYLLSSECDIFDPEQKKVAQDMTQPLSHYYINASHNTYLIEDQFRGPADINGYIRALKMGCRSVELDVSDGSDNEPILCNRNNMTTHVSFRSVIEVINKFAFVASEYPLILCLGNHCSLPQQKVMAQQMKKVFGNKLYTEAPLPSESYLPSPEKLKRMIIVKGKKLPSDPDVLEGEVTDEDEEAQMSRRMSVDYNGEQKQIRLCRELSDLVSICKSVQYRDFELSMKSQNYWEMCSFSETEASRIANEYPEDFVNYNKKFLSRIYPSAMRIDSSNLNPQDFWNCGCQIVAMNFQTPGPMMDLHTGWFLQNGGCGYVLRPSIMRDEVSYFSANTKGILPGVSPLALHIKIISGQNFPKPKGACAKGDVIDPYVCIEIHGIPADCSEQRTKTVQQNSDNPIFDETFEFQVNLPELAMIRFVVLDDDYIGDEFIGQYTIPFECLQPGYRHVPLRSFVGDIMEHVTLFVHIAITNRSGGGKAQKRSLSVRMGKKVREYTMLRNIGLKTIDDIFKIAVHPLREAIDMRENMQNAIVSIKELCGLPPIASLKQCLLTLSSRLITSDNTPSVSLVMKDSFPYLEPLGAIPDVQKKMLTAYDLMIQESRFLIEMADTVQEKIVQCQKAGMEFHEELHNLGAKEGLKGRKLNKATESFAWNITVLKGQGDLLKNAKNEAIENMKQIQLACLSCGLSKAPSSSAEAKSKRSLEAIEEKESSEENGKL

SEQ ID NO: 2071 - DNA, 5233 bp, Rattus norvegicus; identical to SEQ ID NO: 2067
  ref <308>: DATABASE ACCESSION NUMBER: EMBL / D45920
  ref <309>: DATABASE ENTRY DATE: 1999-01-21

SEQ ID NO: 2072 - protein, 1096 aa, Rattus norvegicus; identical to SEQ ID NO: 2068
  ref <308>: DATABASE ACCESSION NUMBER: SWISS-Prot / BAA08351
  ref <309>: DATABASE ENTRY DATE: 2003-02-01

SEQ ID NO: 2073 - DNA, 4565 bp, Homo sapiens; identical to SEQ ID NO: 2069
  ref <308>: DATABASE ACCESSION NUMBER: EMBL / D42108
  ref <309>: DATABASE ENTRY DATE: 2002-06-03

SEQ ID NO: 2074 - protein, 997 aa, Homo sapiens; identical to SEQ ID NO: 2070
  ref <308>: DATABASE ACCESSION NUMBER: Refseq / NP_006217
  ref <309>: DATABASE ENTRY DATE: 2002-11-05

SEQ ID NO: 2075 - DNA, 5233 bp, Rattus norvegicus; identical to SEQ ID NO: 2067
  ref <308>: DATABASE ACCESSION NUMBER: EMBL / D45920
  ref <309>: DATABASE ENTRY DATE: 1999-01-21

SEQ ID NO: 2076 - protein, 1096 aa, Rattus norvegicus; identical to SEQ ID NO: 2068
  ref <308>: DATABASE ACCESSION NUMBER: SWISS-Prot / BAA08351
  ref <309>: DATABASE ENTRY DATE: 2003-02-01

SEQ ID NO: 2077 - DNA, 4565 bp, Homo sapiens; identical to SEQ ID NO: 2069
  ref <308>: DATABASE ACCESSION NUMBER: EMBL / D42108
  ref <309>: DATABASE ENTRY DATE: 2002-06-03

SEQ ID NO: 2078 - protein, 997 aa, Homo sapiens; identical to SEQ ID NO: 2070
  ref <308>: DATABASE ACCESSION NUMBER: Refseq / NP_006217
  ref <309>: DATABASE ENTRY DATE: 2002-11-05

SEQ ID NO: 2079 - DNA, 5233 bp, Rattus norvegicus; identical to SEQ ID NO: 2067
  ref <308>: DATABASE ACCESSION NUMBER: EMBL / D45920
  ref <309>: DATABASE ENTRY DATE: 1999-01-21

SEQ ID NO: 2080 - protein, 1096 aa, Rattus norvegicus; identical to SEQ ID NO: 2068
  ref <308>: DATABASE ACCESSION NUMBER: SWISS-Prot / BAA08351
  ref <309>: DATABASE ENTRY DATE: 2003-02-01

SEQ ID NO: 2081 - DNA, 4565 bp, Homo sapiens; identical to SEQ ID NO: 2069
  ref <308>: DATABASE ACCESSION NUMBER: EMBL / D42108
  ref <309>: DATABASE ENTRY DATE: 2002-06-03

SEQ ID NO: 2082 - protein, 997 aa, Homo sapiens; identical to SEQ ID NO: 2070
  ref <308>: DATABASE ACCESSION NUMBER: Refseq / NP_006217
  ref <309>: DATABASE ENTRY DATE: 2002-11-05

SEQ ID NO: 2083 - DNA, 869 bp, Rattus norvegicus
  ref <308>: DATABASE ACCESSION NUMBER: EMBL / D49363
  ref <309>: DATABASE ENTRY DATE: 1999-01-21
cgggatcctccagagggaaggattagcatgtcgtcaataatcagaaaagtgatcagcacttcaaaagccccggcggccattggtgcctacagccaagctgtgctagtggacaggaccatttacgtttctggacagataggcatggatccttccagtggacaacttgtgccaggaggggtagcagaagaagctaaacaagctcttaaaaacctgggtgagattctgaaggctgcagggtgtgacttcactaatgtggtgaagacaactgttttactggctgacataaatgactttggcactgtcaatgagatctacaaaacatatttccagggtaaccttcctgccagggctgcttaccaagtcgccgctttacccaaaggaagtcgaattgaaatcgaagccatcgctgtccaggggcctttcaccacagcaggactgtaaggagccatgctgatgctgactctggagtctttacaatgtctctcacactttaaattttacaaatgattctgggaatgcacacatgagccgtgtgaagtgatcgtggaaatgatcatacatgtggagatttgacattaattggggattattcagtacagtggctagtgctgtaatttcacttatgtggctgggtgtgagagaaaggcacatagctgctaacatgcagagcagaatcaaagacgaaacagtaaagagcacacctaattaaatcatatcaatttgcttgtgtggaatacttagttctcatgttagatatcagaaactaaattaaaatattcaaactttaatagtaccaggagaaaaaagtggaccaaaatcttataagataatactgccttaatggaataaaaaacagatgtgtaactttc

SEQ ID NO: 2084 - protein, 136 aa, Rattus norvegicus
  ref <308>: DATABASE ACCESSION NUMBER: SWISS-Prot / BAA08359
  ref <309>: DATABASE ENTRY DATE: 2002-06-15
SSIIRKVISTSKAPAAIGAYSQAVLVDRTIYVSGQIGMDPSSGQLVPGGVAEEAKQALKNLGEILKAAGCDFTNVVKTTVLLADINDFGTVNEIYKTYFQGNLPARAAYQVAALPKGSRIEIEAIAVQGPFTTAGL

SEQ ID NO: 2085 - DNA, 5956 bp, Homo sapiens
  misc_feature (1)..(5956): n=a, c, g or t
  ref <308>: DATABASE ACCESSION NUMBER: EMBL / AY026764
  ref <309>: DATABASE ENTRY DATE: 2001-02-14
ggcgctgctgtggttggtcagtccagtaagaagccagcagggctggtgctggggcttcttctcctgaaggggctgcaagagggaaggcttagccatgtcgtccttgatcagaagggtgatcagcaccgcgaaagccccaggggccattggaccctacagtcaagctgtattagtcgacaggaccatttacatttcaggacagataggcatggacccttcaagtggacagcttgtgtcaggaggggtagcagaagaagctaaacaagtaagttattttccacatttaaggtcccttttctactacctttttaatgttgaagagcattaagaatccacttgcctgatttgttttatagagattaacagataaatgttttttaaactacttactgcttgatttaacatagtttttgatctaagagttggaaatttgatggatcatgaatcatctaacaaccaaaagagagattccacctccttaacactaaggtgaccttaaacctgaattattgacgtcagatgacatgttgccacttccacatggattgggaaattttcttctcagggccactgacctgcccctcttcaaaaaaaaaaaaaattaccaccacagaagtaaaaagtcaacatttttaaaaataagaatggggaatataattttaatccaataaatataattaaaccataatttaggccaggcacgatgtggctcacacctgtaatcctagcactttgggaggccgaggctggcagttcacttgaggtcaggagttcaagactagcctagacaacatggtgaaaccccatctctactaaaaatacaaaaattagtggggggaggccaggcacaatggctcacacctgtaatcccagcactttgggaggccgaggcgggcagatcacctgaggtcaggagttcaagaccagcctggccaacatggtgaaaccccgtctctactgaaaatacaaaaattagcaggtgtggtggcatgtgcctgtagtcccagctactcgggaggctaaggcatgagaatcgtttgaacccggaaggcggaggttgcagtgagctgagattgtgccactccactctagcctgggcaacagagcaagaaccctgtctcaaaaaaaaaaatagaaaaaaaaaagtaacccagtcaggtggcacatgcctgtagtcccagttactcaggaggcgtatgcagaagaatcgcttaaacctgggaggtggaagttgcaggaagccaagatcgtgccactgcactcctgcctgggacacagagtaagacactgtctcaaaaaataaaataaaataaaacaataaactataatttactgcatttactgagtcatataatgctgaaagtttgttttgttttgttttgtttcttgagacagccttgctctgtcgcccaggctggagtgcagtgtcgtgatctcagctcactgcaacctctgtcttccaggttcaagcaattctcttgcctcagcctcccaagtaactgggactacaggcacacgccaccacacctggcttattttttgtatttttagtagagacggggttttaccgtgctagccaggatggtctcgatctcctgacctcatgatccacccacctcagcctcccaaagtgctgagattacaggcatgagcctccacacccggcctagctgaaagatttttaaaaacctaaatatccactcataaagaactggttgaataaattatgctagatcaatacaactaaagtaatgtggaaagatctccgaggtaaattgttccatggtaataaaaccaagatgcagaacaacatgcacagtatgctaccatgtgtgcttgtgtgtttaaaaatatgtaacataagcattgactgtacctagaaggatatacaataaattaggaacagtggttacctctgaggagggaaacttgggagagggagagaggggtgatagatatctttacacggtatatgcttttttaatagcttttgagtttttttgttgttgttgttgccatatccatgtattacctatttagaagattattttaaaagacacaaggaatataatgaaatattgcattgtgaccagcaaagtgggaagagtgaatccaaaaaaagataaatgtttttccagaagccagtgtctccaactgttatataatttactaatattgtttttttgagaaaaaggaaaaagaaccctttgaagtcaaatattgctttaaaagaaaatatgttttaatgcttactagctcatccttatccttgacgtgatatcgaatgaagaacaccagaaattatttctgtggacattggctgaacaattaacacattttagcactgaagaaggaacttcaacctagtctttttacgcacaaaaggagacaacattttcaccatatttcagaaagactcattctattaaaggaaagccaagaaacacacttgtaagcgagtagggaggatttttctgcaacataagctatttaaggaggtattagtaaaagatgattaattgaatttaattaaagctttaaatctaacatcagtgacttaggcctttcttggcttggttcaccaggctcttaaaaacatgggtgaaattctgaaagctgcaggctgtgacttcactaacggtgagcaatttgatattatttcacatttctttttgatatttctttggtctttttgaaaaatatatggcatccagtaagatgccgtgccatatctttgttgctatttaaaagttgttttaaatagcaactgttctacttcacttctttggtcccatttcagtcccattttaatcaagacagtctcagattcatacactctttttctaagtaatgttttgggtcagaccaaataactaaacctaatgacaatgtttatatcttctagtggtgaaaacaactgttcttctggctgacataaatgacttcaatactgtcaatgaaatctacaaacagtgtaagtaatttggctttattcctattttccatttttaaaaagaaagaaatctggtcacattaatgaatgtgcattatgaatttagagtggtaggagatgctaaagaaatggtcatagatcttaaaagaattaataatctgattggaaatatgttgtataccccccatgaaaaagttctaagacatttctattgcattccctaaaacaatatactgaaancctacatatccatttttcaaaagcttaatttcattaaatccttctcaggctttttaaactctcctaacaagttttttatgcatagattttatttactgtggctgtatggtgcagccaccatctttatcctggctctctcagactcattagttagttacttaatatttctatgccttggttttctcatatgcaaaatggagataatatactcctaacttatagggttgttggaatgattaaatgagtcagtacaacatgtaaagcacttagatgctggtgtgttataagcactgagtaaatgttagctattattaacattgatgttatagtagggaaaattggtgtcccaacacctaatgggatgaggcaaaggtataacttggaaaaagcatcgttacttattctctcctgaagaaattattagaaaagaccaaagttggcagaggaagtacttgccaaaatttctggagatgggcacttgttcctatttagataaatagtttataaatatcactttaaaaacaaaactccattcacatcaaacaagatcaaaatgttagggtatgtattnctttttttttttttttttttttgccagaaagctaagagattttaaaaagtattaactatcataggaatcatatggcaaaatattttatcaaacaaatctgatagtgagcctcttttttaaaatgttgcttaaggccaggagcagtggctcacacctataatcccagcactttgagaggctgaggtgggtggatcacttgacattaggagtttgagaccagtctggccaacatggtgaagccccgactctactaaaaatacaaaaatgagccaggcatggtggtgcacacctgtaatcccagctactcgggaggctgaggcaggagaatctcttgaacatgggagacagaggttgcagtaagctgagatcgcatcacttcactccagccttgggcgatagagcaagactctgtttcaaaaaaataaaaataaatgttgcttatatctaagaactgactagtatatgaaatatttgccagattattaattgtagatattgaataacaatagaatatctgaaaactaaaataaaaattttcacttgatctttattttttcaactcttctctattaaaaaaatgaaattcttttaaattcagatttcaagagtaattttcctgctagagctgcttaccaagttgctgctttacccaaagtaagtacactttaaatgactaatgtacacagttttcagtttctacattgttttccttctataagtaaactaagcactgtgaaaggaaacttaaaagaagtagcctgggcagggtggcttacccctgtaatcccagtgctttgaaaggccaacacaggaggatcgcttgaggccaggagttctagaccagcctgggcaacatagcaagacagccatccctacaaaaacaatttaaaattagccatgcatggtggtggtgcacacctatagtcccagctacttggtaggctgaggtgggaggaacacttgaacccaggagttcaaggctgcagtgagctataatcgaaccactgtgctgcagcctgggtaacagtgtgaccttgtctcttaaaaaaaaaaaaaaaagaaaagaaatagaccctgcttccccagggaacttaaagtctgaaaggaaatatcccatattacatgcatgaaaaaaaaattaagaaaccttttaagacagcacatgaacagagaatcagaatcaaaatacttaaattgtgagaaaaggccaggcgcggtggcktcacgcctgtaatcccagcgctttcggaggccgaggcgggcggatcacaaggtcagaagatcgagaccatcctggctcacatggtgaaacccgtctctactaaaaatacaaaaaaaaattagccgggtgtggtggcggacgcctgtagtcccagctactcgggaggctgaggcaggagaatggcatgaacccaggaggcagagcttgcagtgagccgaaatcgcgccactgcactccagcctgggcgacagagcgagactccatcacaaaaaaaaaaaaattgtgagaaaaaataaaatagcagctgtactgttgtagtgttacttaggggactataaatttgagccaggtttgtttgtgagttctgcagtaaaaatttcacctggatattgtacaattaaaaatctaagccttccactagaaaaataatctctaaaccaggggcacacatatttctcaccattttgattttgctacttttaactcaagcttagcagcacaatattcctgcctataaaaaagcagctcttactgacttccacttgcagtttctactaaagaaaatttatgttttaagagtgtcatttgtattgctttaattagttgttacttggaatgatcattatcaaacctattaaggtactggggtgtagtagaaagagctctgaacttggaatcacaagacaagggttcaacctctgctatctagttgtgacttgggatgacttaattactccttctacacttcagcatatcattctgtgaattgaggggaaaatacgtctctaatagggcttctgtgagaatcacataagctaatatagtatatgaatatacctagcatggtaacctggtctgcaatttgtacaaaatgattacaacaaattctttcattttcctcacagggcagccgaattgaaattgaagcagtagctatccaaggaccactgacaacggcatcactataagt

SEQ ID NO: 2086 - protein, 137 aa, Homo sapiens
  ref <308>: DATABASE ACCESSION NUMBER: SWISS-Prot / AAK01939
  ref <309>: DATABASE ENTRY DATE: 2002-06-15
MSSLIRRVISTAKAPGAIGPYSQAVLVDRTIYISGQIGMDPSSGQLVSGGVAEEAKQALKNMGEILKAAGCDFTNVVKTTVLLADINDFNTVNEIYKQYFKSNFPARAAYQVAALPKGSRIEIEAVAIQGPLTTASL

SEQ ID NO: 2087 - DNA, 1475 bp, Rattus norvegicus
  ref <308>: DATABASE ACCESSION NUMBER: EMBL / D49395
  ref <309>: DATABASE ENTRY DATE: 2000-04-18
atgccgctctgcatcccgcaggtgctgttggccttgttcctttccgtgctgatagcccagggagaaggcagccggaggagggccacccaggcccacagcaccacccagcctgctctgctgaggctgtcagatcacctcctggctaactacaagaagggagtgcggcctgtgcgggactggaggaagcccaccctggtctccattgatgtcatcatgtatgccatcctcaacgtggatgagaagaaccaggttctgaccacctacatatggtaccggcagttctggaccgacgagtttctacagtggactcctgaggacttcgacaatgtcaccaaattgtccatccccaccgacagcatctgggtccctgacatcctcatcaatgagtttgtggacgtggggaagtctccaagcattccttatgtgtatgtgcaccatcaaggtgaagtccagaactacaagcccctacagctggtgaccgcctgtagccttgacatctataacttcccgttcgatgtgcagaactgctctctgaccttcaccagctggctgcataccatccaggacatcaacatttccctgtggcgaacaccagaagaagtgaggtcggacaagagcatcttcataaatcagggcgagtgggagctgctgggggtgttcaccaaatttcaggagttcagtatagaaaccagtaacagctatgcggaaatgaagttctacgtggtcatccgccggcggcctttattctacgcagtcagcctcttgctgcccagtatcttcctcatggtcgtggacattgtgggcttttgtctgcccccggacagtggtgagagagtgtctttcaagatcacgctccttctgggatactcagtctttctcatcatcgtgtcagacacactgcctgcaacggccatcggcactcccctcattggtgtctactttgtagtgtgcatggctctgctggtgataagcctcgctgagaccatcttcattgtgcagctggtgcataagcaggatttacagcgccctgtacctgactggctgaggcacctggtcctagacagaatagcctggctgctctgcctaggggagcagcccatggcccataggcccccagccaccttccaagccaacaagactgatgactgctcagccatgggaaaccactgcagccatgtcggaagccctcaggacttggagaagacctcgaggagcagagatagccctcttccaccaccaagggaggcctcgctggctgtgcgtggcctcttgcaagagctgtcctccatccgccactccctggagaagcgggatgagatgcgggaggtggcaagggactggttgcgggtgggatatgtgctggacaggctgctgtttcgcatctacctgctggccgtgctggcttacagcatcaccctggtcacgctctggtccatttggcattattcctgagtgggtacagcctggcagggagg

SEQ ID NO: 2088 - protein, 483 aa, Rattus norvegicus
  ref <308>: DATABASE ACCESSION NUMBER: SWISS-Prot / BAA08388
  ref <309>: DATABASE ENTRY DATE: 2002-06-15
MPLCIPQVLLALFLSVLIAQGEGSRRRATQAHSTTQPALLRLSDHLLANYKKGVRPVRDWRKPTLVSIDVIMYAILNVDEKNQVLTTYIWYRQFWTDEFLQWTPEDFDNVTKLSIPTDSIWVPDILINEFVDVGKSPSIPYVYVHHQGEVQNYKPLQLVTACSLDIYNFPFDVQNCSLTFTSWLHTIQDINISLWRTPEEVRSDKSIFINQGEWELLGVFTKFQEFSIETSNSYAEMKFYVVIRRRPLFYAVSLLLPSIFLMVVDIVGFCLPPDSGERVSFKITLLLGYSVFLIIVSDTLPATAIGTPLIGVYFVVCMALLVISLAETIFIVQLVHKQDLQRPVPDWLRHLVLDRIAWLLCLGEQPMAHRPPATFQANKTDDCSAMGNHCSHVGSPQDLEKTSRSRDSPLPPPREASLAVRGLLQELSSIRHSLEKRDEMREVARDWLRVGYVLDRLLFRIYLLAVLAYSITLVTLWSIWHYS

SEQ ID NO: 2089 - DNA, 2202 bp, Homo sapiens
  ref <308>: DATABASE ACCESSION NUMBER: Refseq / NM_000869
  ref <309>: DATABASE ENTRY DATE: 2000-10-31
ggaaacatgatccagctgaaggactgattgcaggaaaacttggcagctccccaaccttggtggcccagggagtgtgaggctgcagcctcagaaggtgtgagcagtggccacgagaggcaggctggctgggacatgaggttggcagagggcaggcaagctggcccttggtgggcctcgccctgagcactcggaggcactcctatgcttggaaagctcgctatgctgctgtgggtccagcaggcgctgctcgccttgctcctccccacactcctggcacagggagaagccaggaggagccgaaacaccaccaggcccgctctgctgaggctgtcggattaccttttgaccaactacaggaagggtgtgcgccccgtgagggactggaggaagccaaccaccgtatccattgacgtcattgtctatgccatcctcaacgtggatgagaagaatcaggtgctgaccacctacatctggtaccggcagtactggactgatgagtttctccagtggaaccctgaggactttgacaacatcaccaagttgtccatccccacggacagcatctgggtcccggacattctcatcaatgagttcgtggatgtggggaagtctccaaatatcccgtacgtgtatattcggcatcaaggcgaagttcagaactacaagccccttcaggtggtgactgcctgtagcctcgacatctacaacttccccttcgatgtccagaactgctcgctgaccttcaccagttggctgcacaccatccaggacatcaacatctctttgtggcgcttgccagaaaaggtgaaatccgacaggagtgtcttcatgaaccagggagagtgggagttgctgggggtgctgccctactttcgggagttcagcatggaaagcagtaactactatgcagaaatgaagttctatgtggtcatccgccggcggcccctcttctatgtggtcagcctgctactgcccagcatcttcctcatggtcatggacatcgtgggcttctacctgccccccaacagtggcgagagggtctctttcaagattacactcctcctgggctactcggtcttcctgatcatcgtttctgacacgctgccggccactgccatcggcactcctctcattggtgtctactttgtggtgtgcatggctctgctggtgataagtttggccgagaccatcttcattgtgcggctggtgcacaagcaagacctgcagcagcccgtgcctgcttggctgcgtcacctggttctggagagaatcgcctggctactttgcctgagggagcagtcaacttcccagaggcccccagccacctcccaagccaccaagactgatgactgctcagccatgggaaaccactgcagccacatgggaggaccccaggacttcgagaagagcccgagggacagatgtagccctcccccaccacctcgggaggcctcgctggcggtgtgtgggctgctgcaggagctgtcctccatccggcaattcctggaaaagcgggatgagatccgagaggtggcccgagactggctgcgcgtgggctccgtgctggacaagctgctattccacatttacctgctagcggtgctggcctacagcatcaccctggttatgctctggtccatctggcagtacgcttgagtgggtacagcccagtggaggagggggtacagtcctggttaggtggggacagaggatttctgcttaggcccctcaggacccagggaatgccagggacattttcaagacacagacaaagtcccgtgccctgtttccaatgccaattcatctcagcaatcacaagccaaggtctgaacccttccaccaaaaactgggtgttcaaggcccttacacccttgtcccacccccagcagctcaccatggctttaaaacatgctctcttagatcaggagaaactcgggcactccctaagtccactctagttgtggacttttccccattgaccctcacctgaataagggactttggaattctgcttctctttcacaactttgcttttaggttgaaggcaaaaccaactctctactacacaggcctgataactctgtacgaggcttctctaacccctagtgtcttttttttcttcacctcacttgtggcagcttccctgaacactcatcccccatcagatgatgggagtgggaagaataaaatgcagtgaaaccc

SEQ ID NO: 2090 - protein, 478 aa, Homo sapiens
  ref <308>: DATABASE ACCESSION NUMBER: SWISS-Prot / P46098
  ref <309>: DATABASE ENTRY DATE: 2002-06-15
MLLWVQQALLALLLPTLLAQGEARRSRNTTRPALLRLSDYLLTNYRKGVRPVRDWRKPTTVSIDVIVYAILNVDEKNQVLTTYIWYRQYWTDEFLQWNPEDFDNITKLSIPTDSIWVPDILINEFVDVGKSPNIPYVYIRHQGEVQNYKPLQVVTACSLDIYNFPFDVQNCSLTFTSWLHTIQDINISLWRLPEKVKSDRSVFMNQGEWELLGVLPYFREFSMESSNYYAEMKFYVVIRRRPLFYVVSLLLPSIFLMVMDIVGFYLPPNSGERVSFKITLLLGYSVFLIIVSDTLPATAIGTPLIGVYFVVCMALLVISLAETIFIVRLVHKQDLQQPVPAWLRHLVLERIAWLLCLREQSTSQRPPATSQATKTDDCSAMGNHCSHMGGPQDFEKSPRDRCSPPPPPREASLAVCGLLQELSSIRQFLEKRDEIREVARDWLRVGSVLDKLLFHIYLLAVLAYSITLVMLWSIWQYA

SEQ ID NO: 2091 - DNA, 2251 bp, Rattus norvegicus
  ref <308>: DATABASE ACCESSION NUMBER: EMBL / D49446
  ref <309>: DATABASE ENTRY DATE: 1999-01-21
cgcagcggatctccatctctccaccctggggtgacatccttccagggacaggagctggaactccagcatggctgaggagaagaaactgaaactcagcaataccgtgttgccctccgagtctatgaaggtggtggcagaatccatgggcattgctcagattcaggaggagacttgccagctactgacagatgaggtcagctaccgcatcaaggagattgcccaggatgctttgaagttcatgcacatggggaaacgacagaagctcactaccagtgacattgactatgcattgaaattaaagaatgtggagccactatatggcttccatgctcaggagttcatccctttccggtttgcctctggtgggggccgggagctgtacttctatgaagagaaggaagtggacctgagtgatatcatcaacacccctctgcctcgggtgcctctggatgtctgcctcaaagctcattggctgagcattgaaggctgccagccagctataccagagaatccacccccagctcccaaagagcagcagaaggccgaggccacagaacccctgaagtcagcaaagccaggccaagaagaagatggacccttgaaaggcaaaggtcaaggggcagctgcagctgatggcaaaggaaaagagaagaaggcacctcccttgctggagggggcccctttccgcctgaagccccgcagcatccatgagctgtccgtggagcagcagctgtactacaaggagatcacagaagcctgtgtgggatcctgtgaggccaagagagcggaagctctgcagagcattgccacagatcctggactctatcagatgttaccacggtttagtaccttcatctcagagggggtccgtgtgaatgtggttcagaataacctggccttgctcatctacttgatgcgaatggttaaggccctgatggacaaccccacactgtatcttgagaaatatgtgcacgagctgattcctgcagtaatgacctgcattgtgagcagacagctgtgcctgcggccagatgtggacaatcactgggcactccgggattttgctgcccgtctagtggcccagatctgtaagcatttcagcacaaccaccaacaacatccaatcccgaatcaccaagacctttaccaagagctgggtggatgagaagactccatggacaactcgatatggctccattgcaggcctggcagagctggggcatgatgtgattaagaccctaattctgccaaggctgcagcaggaaggggagcggatccgaagtgtcttggacggacctgtgctaagcaacatcgaccgtatcggagcagaccatgttcagagccttctcctgaaacactgtgccccagtattggcgaagctgcgccctccacctgacaatcaggatgcctaccggggagaatttgggtcccttgggccccttctctgctcccatgtggtgaaggccagggcccaggccgctcttcaagctcagcaggtcaacaggaccacactcaccatcacacagcctcggcccacactgaccctctcacaggcccctcagccaggccctcgtacccctggcttattgaaggtccctggctctattgccttgcctgtccagacactggtgtctgcaagagctgctgcccctcctcagccttctcctcctccaaccaagtttattgtaatgtcctcatcttccagtgcctcatcaacccagcaggtcctgtccctcagcacctcagctcctggttcaggctctaccactacctctcctgtcaccaccacagttcccagcgtgcagcccattgtcaagctggtctccactgctaccactgcacccccaagcacagcccctgctggtcctggcagtgttcagaaatacattgtggtctctcttcccccaacaggggaaggcaaaggaggccctccttctcatccttctccagtcccaccttcatcttcttcaccatctccacttgggggcagtgccctctgtggggggaagcaggaaactggggacagcccccctccagctccagggactccaaaggctaatggctcccagcctactggacctagctctccccagcctgctctgtgatattgtcacatgtgctgacctcctctcttctgcagattcctacacacacaaacaacgtgtgagggaggaagaagaaagatgttttccccagtgactttctttttagatactgtacagtaagttcctcagaataaaagttggatttgt

SEQ ID NO: 2092 - protein, 678 aa, Rattus norvegicus
  ref <308>: DATABASE ACCESSION NUMBER: SWISS-Prot / BAA08435
  ref <309>: DATABASE ENTRY DATE: 2002-06-15
MAEEKKLKLSNTVLPSESMKVVAESMGIAQIQEETCQLLTDEVSYRIKEIAQDALKFMHMGKRQKLTTSDIDYALKLKNVEPLYGFHAQEFIPFRFASGGGRELYFYEEKEVDLSDIINTPLPRVPLDVCLKAHWLSIEGCQPAIPENPPPAPKEQQKAEATEPLKSAKPGQEEDGPLKGKGQGAAAADGKGKEKKAPPLLEGAPFRLKPRSIHELSVEQQLYYKEITEACVGSCEAKRAEALQSIATDPGLYQMLPRFSTFISEGVRVNVVQNNLALLIYLMRMVKALMDNPTLYLEKYVHELIPAVMTCIVSRQLCLRPDVDNHWALRDFAARLVAQICKHFSTTTNNIQSRITKTFTKSWVDEKTPWTTRYGSIAGLAELGHDVIKTLILPRLQQEGERIRSVLDGPVLSNIDRIGADHVQSLLLKHCAPVLAKLRPPPDNQDAYRGEFGSLGPLLCSHVVKARAQAALQAQQVNRTTLTITQPRPTLTLSQAPQPGPRTPGLLKVPGSIALPVQTLVSARAAAPPQPSPPPTKFIVMSSSSSASSTQQVLSLSTSAPGSGSTTTSPVTTTVPSVQPIVKLVSTATTAPPSTAPAGPGSVQKYIVVSLPPTGEGKGGPPSHPSPVPPSSSSPSPLGGSALCGGKQETGDSPPPAPGTPKANGSQPTGPSSPQPAL

SEQ ID NO: 2093 - DNA, 2510 bp, Homo sapiens
  ref <308>: DATABASE ACCESSION NUMBER: EMBL / U31659
  ref <309>: DATABASE ENTRY DATE: 1999-07-02
gaattcctgacctcaagtgatccgcccgcctcgtcctcccaaggtgctggtgggattacaggcgtgagccactgaacctggccccagcccagatttgtatctttctctgttacacctcagggctgactcacgtggggatggacataagacactcggagttcctcccctgtctccactgtcctccctttgttggccctctccctgtgtctcacgtttctttttcttctgcctgccccgttcctctgccagggtctccgtctctccaccgggggcttcatccttccagggaggagaagagggactccagaatggctgaggagaagaagctgaagcttagcaacactgtgctgccctcggagtccatgaaggtggtggctgaatccatgggcatcgcccagattcaggaggagacctgccagctgctaacggatgaggtcagctaccgcatcaaagagatcgcacaggatgccttgaagttcatgcacatggggaagcggcagaagctcaccaccagtgacattgactacgccttgaagctaaagaatgtcgagccactctatggcttccacgcccaggagttcattcctttccgcttcgcctctggtgggggccgggagctttacttctatgaggagaaggaggttgatctgagcgacatcatcaatacccctctgccccgggtgcccctggacgtctgcctcaaagctcattggctgagcatcgagggctgccagccagctatccccgagaacccgcccccagctcccaaagagcaacagaaggctgaagccacagaacccctgaagtcagccaagccaggccaggaggaagacggacccctgaagggcaaaggtcaaggggccaccacagccgacggcaaagggaaagagaagaaggcgccgcccttgctggagggggcccccttgcgactgaagccccggagcatccacgagttgtctgtggagcagcagctctactacaaggagatcaccgaggcctgcgtgggctcctgcgaggccaagagggcggaagccctgcaaagcattgccacggaccctggactgtatcagatgctgccacggttcagtacctttatctcggagggggtccgtgtgaacgtggttcagaacaacctggccctactcatctacctgatgcgtatggtgaaagcgctgatggacaaccccacgctctatctagaaaaatacgtccatgagctgattccagctgtgatgacctgcatcgtgagcagacagttgtgcctgcgaccagatgtggacaatcactgggcactccgagactttgctgcccgcctggtggcccagatctgcaagcattttagcacaaccactaacaacatccagtcccggatcaccaagaccttcaccaagagctgggtggacgagaagacgccctggacgactcgttatggctccatcgcaggcttggctgagctgggacacgatgttatcaagactctgattctgccccggctgcagcaggaaggggagcggatccgcagtgtgctggacggccctgtgctgagcaacattgaccggattggagcagaccatgtgcagagcctcctgctgaaacactgtgctcctgttctggcaaagctgcgcccaccgcctgacaatcaggacgcctatcgggcagaattcgggtcccttgggcccctcctctgctcccaggtggtcaaggctcgggcccaggctgctctgcaggctcagcaggtcaacaggaccactctgaccatcacgcagccccggcccacgctgaccctctcgcaggccccacagcctggccctcgcacccctggcttgctgaaggttcctggctccatcgcacttcctgtccagacactggtgtctgcacgagcggctgccccaccacagccttcccctcctccaaccaagtttattgtaatgtcatcgtcctccagcgccccatccacccagcaggtcctgtccctcagcacctcggcccccggctcaggttccaccaccacttcgcccgtcaccaccaccgtccccagcgtgcagcccatcgtcaagttggtctccaccgccaccaccgcaccccccagcactgctccctctggtcctgggagtgtccagaagtacatcgtggtctcacttcccccaacaggggagggcaaaggaggccccacctcccatccttctccagttcctcccccggcatcgtccccgtccccactcagcggcagtgccctttgtggggggaagcaggaggctggggacagtccccctccagctccagggactccaaaagccaatggctcccagcccaactccggctcccctcagcctgctccgtgatgctccacctgccagcccccggattcccacacatgcagacatgtacacacgtgcacgtacacacatgcatgctcgctaagcggaaggaagttgtagattgcttccttcatgtcactttctttttagatattgtacagccagtttctcagaataaaagtttggtttgta

SEQ ID NO: 2094 - protein, 677 aa, Homo sapiens
  ref <308>: DATABASE ACCESSION NUMBER: SWISS-Prot / P49848
  ref <309>: DATABASE ENTRY DATE: 2002-06-15
MAEEKKLKLSNTVLPSESMKVVAESMGIAQIQEETCQLLTDEVSYRIKEIAQDALKFMHMGKRQKLTTSDIDYALKLKNVEPLYGFHAQEFIPFRFASGGGRELYFYEEKEVDLSDIINTPLPRVPLDVCLKAHWLSIEGCQPAIPENPPPAPKEQQKAEATEPLKSAKPGQEEDGPLKGKGQGATTADGKGKEKKAPPLLEGAPLRLKPRSIHELSVEQQLYYKEITEACVGSCEAKRAEALQSIATDPGLYQMLPRFSTFISEGVRVNVVQNNLALLIYLMRMVKALMDNPTLYLEKYVHELIPAVMTCIVSRQLCLRPDVDNHWALRDFAARLVAQICKHFSTTTNNIQSRITKTFTKSWVDEKTPWTTRYGSIAGLAELGHDVIKTLILPRLQQEGERIRSVLDGPVLSNIDRIGADHVQSLLLKHCAPVLAKLRPPPDNQDAYRAEFGSLGPLLCSQVVKARAQAALQAQQVNRTTLTITQPRPTLTLSQAPQPGPRTPGLLKVPGSIALPVQTLVSARAAAPPQPSPPPTKFIVMSSSSSAPSTQQVLSLSTSAPGSGSTTTSPVTTTVPSVQPIVKLVSTATTAPPSTAPSGPGSVQKYIVVSLPPTGEGKGGPTSHPSPVPPPASSPSPLSGSALCGGKQEAGDSPPPAPGTPKANGSQPNSGSPQPAP

SEQ ID NO: 2095 - DNA, 539 bp, Rattus norvegicus
  ref <308>: DATABASE ACCESSION NUMBER: EMBL / D49653
  ref <309>: DATABASE ENTRY DATE: 2000-02-01
ccaagaagaagaagaccccagcgaggaaaatgtgctggagacccctgtgccggttcctgtggctttggtcctatctgtcctatgttcaagctgtgcctatccacaaagtccaggatgacaccaaaaccctcatcaagaccattgtcaccaggatcaatgacatttcacacacgcagtcggtatccgccaggcagagggtcaccggtttggacttcattcccgggcttcaccccattctgagtttgtccaagatggaccagaccctggcagtctatcaacagatcctcaccagcttgccttcccaaaacgtgctgcagatagctcatgacctggagaacctgcgagacctcctccatctgctggccttctccaagagctgctccctgccgcagacccgtggcctgcagaagccagagagcctggatggcgtcctggaagcctcgctctactccacagaggtggtggctctgagcaggctgcagggctctctgcaggacattcttcaacagttggaccttagccctgaatgctgaggtttc

SEQ ID NO: 2096 - protein, 167 aa, Rattus norvegicus
  ref <308>: DATABASE ACCESSION NUMBER: SWISS-Prot / P50596
  ref <309>: DATABASE ENTRY DATE: 2001-10-16
MCWRPLCRFLWLWSYLSYVQAVPIHKVQDDTKTLIKTIVTRINDISHTQSVSARQRVTGLDFIPGLHPILSLSKMDQTLAVYQQILTSLPSQNVLQIAHDLENLRDLLHLLAFSKSCSLPQTRGLQKPESLDGVLEASLYSTEVVALSRLQGSLQDILQQLDLSPEC

SEQ ID NO: 2097 - DNA, 504 bp, Homo sapiens
  ref <308>: DATABASE ACCESSION NUMBER: EMBL / U18915
  ref <309>: DATABASE ENTRY DATE: 2000-03-04
atgcattggggaaccctgtgcggattcttgtggctttggccctatcttttctatgtccaagctgtgcccatccaaaaagtccaagatgacaccaaaaccctcatcaagacaattgtcaccaggatcaatgacatttcacacacgcagtcagtctcctccaaacagaaagtcaccggtttggacttcattcctgggctccaccccatcctgaccttatccaagatggaccagacactggcagtctaccaacagatcctcaccagtatgccttccagaaacgtgatccaaatatccaacgacctggagaacctccgggatcttcttcacgtgctggccttctctaagagctgccacttgccctgggccagtggcctggagaccttggacagcctggggggtgtcctggaagcttcaggctactccacagaggtggtggccctgagcaggctgcaggggtctctgcaggacatgctgtggcagctggacctcagccctgggtgctga

SEQ ID NO: 2098 - protein, 167 aa, Homo sapiens
  ref <308>: DATABASE ACCESSION NUMBER: SWISS-Prot / P41159
  ref <309>: DATABASE ENTRY DATE: 2002-06-15
MHWGTLCGFLWLWPYLFYVQAVPIQKVQDDTKTLIKTIVTRINDISHTQSVSSKQKVTGLDFIPGLHPILTLSKMDQTLAVYQQILTSMPSRNVIQISNDLENLRDLLHVLAFSKSCHLPWASGLETLDSLGGVLEASGYSTEVVALSRLQGSLQDMLWQLDLSPGC

SEQ ID NO: 2099 - DNA, 1978 bp, Rattus norvegicus
  ref <308>: DATABASE ACCESSION NUMBER: EMBL / D49708
  ref <309>: DATABASE ENTRY DATE: 1999-01-21
gtggtgcggagcgagtcgactttggactactctcttagcgtggcgtcgcgcgaggctgcggcggagcctctgtcaggaaggcgggagcttgacagcttcagtaaagaccagcagcggtgacagcaacccggagtcatgagcgacagcggcgagcagaactacggcgagcgggaatcccgttctgcttcccgaagtggaagtgctcatggatcggggaaatctgcacggcacacacctgcaaggtctcgctccaaggaagattcaagacgttctagatcaaagtcaagatccagatctgaatctaggtctagatccagaagaagttctagaaggcattatacaaggtcacgatcacgatctcgctctcatagacgatcccggagcaggtcttacagccgagactatcgcagacgccacagccacagccattctcccatgtctactcgaaggcgtcatgttgggaaccgggcaaatcctgaccccaactgttgtcttggagtgtttggattgagcttgtacaccacagaaagagatctaagagaagtgttctctaagtatggccccattgctgatgtgtctattgtgtatgaccagcagtctagacggtcaagaggatttgcctttgtatattttgaaaatgtagatgatgccaaggaagctaaagaacgtgccaatggaatggagcttgatggacgtcggattagggtcgatttctctataacaaaaaggccccataccccaacaccaggaatttatatggggagacccacttatggcagttcacgacgccgggactattatgaccgaggatatgatcggggttatgatgaccgggactattacagcagatcatacagaggaggaggtggaggaggaggtggatggagagcagctcaagatagagatcagatttacagaaggcggtcaccttctccttactacagtcgtggaggatacaggtctcgttctcgatcaagatcctactcacctcgtcgctattaaagcatgaagttgaagactttctgagacctgccatagagctgggatgttgtttgtggacaatattttctattgtctcctgtttaaaaagtgaacagtgcctagtgaagttaggtgacttttacaccttttatgatgactacttttggtggagttgaaatgctgttttcattctgcatttgtgtagttcggtgctttgttcaaagttaagtgttttcagaaaagtatgttttgcatgtatttttttacagtccaaattttgactgctgagaagtttctattgtacaaaacttcatttaaaaggtttttctactgaatccagggtattctgaagatcgaagcctgtgtgtaaaatgctaccagatggcaaaaagcaacaataaacaagtttgatttttacttttctttctaaatatcaatgcttaacaagaaccattcttaagttatcagtaaaaaataaataaataaaaattttctttcaggagtccatgaaacttgccatattcgatatacctgcaattaagtgttaaaaatacgctgtaactctgtactgctagtattagaacaagaatctttccatacagctaatgcttaatgcttacattaatgtggatttgtcggcctttatgtaatctgtattatatatagcaggggataagagctacagatagatacatgcctttaaaaggctgtttcttaaggctgttacaaggagataatggtatttcaactaatcagcaagtgacaatacattccaccacaaatgtactcttgttcttctagcctttagactatgaaaatactgggtgcttcaaagtatggaatgagagaagggatcaccacacctgtgtcatggatgaagactgcctgttcattttttaaatatgattttcaggtcctttgcttaccaaaggaagcccaattcactcaaatgttttgagaactgtttaaataaacaagcaagaaaaattgctgatgc

SEQ ID NO: 2100 - protein, 288 aa, Rattus norvegicus
  ref <308>: DATABASE ACCESSION NUMBER: SWISS-Prot / Q15815
  ref <309>: DATABASE ENTRY DATE: 2002-06-15
MSDSGEQNYGERESRSASRSGSAHGSGKSARHTPARSRSKEDSRRSRSKSRSRSESRSRSRRSSRRHYTRSRSRSRSHRRSRSRSYSRDYRRRHSHSHSPMSTRRRHVGNRANPDPNCCLGVFGLSLYTTERDLREVFSKYGPIADVSIVYDQQSRRSRGFAFVYFENVDDAKEAKERANGMELDGRRIRVDFSITKRPHTPTPGIYMGRPTYGSSRRRDYYDRGYDRGYDDRDYYSRSYRGGGGGGGGWRAAQDRDQIYRRRSPSPYYSRGGYRSRSRSRSYSPRRY

SEQ ID NO: 2101 - DNA, 1430 bp, Homo sapiens
  ref <308>: DATABASE ACCESSION NUMBER: EMBL / BC000451
  ref <309>: DATABASE ENTRY DATE: 2001-07-13
ggcacgagggaggcggtgcggagcatttcggctctgagcggctgggcgaccggcgcgtcgtgcggggctgcggcggagcctccttaaggaaggtgcaagaggttggcagcttcgattgaagcacatcgaccggcgacagcagccaggagtcatgagcgacagcggcgagcagaactacggcgagcgggaatcccgttctgcttccagaagtggaagtgctcacggatcggggaaatctgcaaggcatacccctgcaaggtctcgctccaaggaagattccaggcgttccagatcaaagtccaggtcccgatctgaatctaggtctagatccagaagaagctcccgaaggcattatacccggtcacggtctcgctcccgctcccatagacgatcacgtagcaggtcttacagtcgagattatcgtagacggcacagccacagccattctcccatgtctactcgcaggcgtcatgttgggaatcgggcaaatcctgatcctaactgttgtcttggagtatttgggctgagcttgtacaccacagaaagagatctaagagaagtgttctctaaatatggtcccattgccgatgtgtctattgtatatgaccagcagtctaggcgttcaagaggatttgcctttgtatattttgaaaatgtagatgatgccaaggaagctaaagaacgtgccaatggaatggagcttgatgggcgtaggatcagagttgatttctctataacaaaaagaccacatacgccaacaccaggaatttacatggggagacctacctatggcagctctcgccgtcgggattactatgacagaggatatgatcggggctatgatgatcgggactactatagcagatcatacagaggaggaggtggaggaggaggaggatggagagctgcccaagacagggatcagatttatagaaggcggtcaccttctccttactatagtcgtggaggatacagatcacgttccagatctcgatcatactcacctcgtcgctattaaagcatgaagactttctgaaacctgccctagagctgggatattgtttgtgggcaatattttttattgtctcttgtttaaaaagtgaacagtgcctagtgaagttaggtgacttttacaccttttacgatgactacttttggtggagttgaaatgctgttttcattctgcatttgtgtagtttggtgctttgttccaagttaagtgttttcagaaaagtatgttttgcatgtatttttttacagtctaaattttgactgctgagaagtttctattgtacaaaacttcatttaaaaggtttttctactgaatccagggtattctgaagatcgaagcctgtgtaaaatgctaccaaatggcaaaaagcaacaataaacagtttgatttttaaaaaaaaaaaaaaaaaaaaaaaaaa

SEQ ID NO: 2102 - protein, 288 aa, Homo sapiens; identical to SEQ ID NO: 2100

SEQ ID NO: 2103 - DNA, 1978 bp, Rattus norvegicus; identical to SEQ ID NO: 2099
  ref <308>: DATABASE ACCESSION NUMBER: EMBL / D49708
  ref <309>: DATABASE ENTRY DATE: 1999-01-21

SEQ ID NO: 2104 - protein, 288 aa, Rattus norvegicus; identical to SEQ ID NO: 2100
  ref <308>: DATABASE ACCESSION NUMBER: SWISS-Prot / Q15815
  ref <309>: DATABASE ENTRY DATE: 2002-06-15

SEQ ID NO: 2105 - DNA, 1430 bp, Homo sapiens; identical to SEQ ID NO: 2101
  ref <308>: DATABASE ACCESSION NUMBER: EMBL / BC000451
  ref <309>: DATABASE ENTRY DATE: 2001-07-13

SEQ ID NO: 2106 - protein, 288 aa, Homo sapiens; identical to SEQ ID NO: 2100

SEQ ID NO: 2107 - DNA, 3754 bp, Rattus norvegicus
  ref <308>: DATABASE ACCESSION NUMBER: EMBL / D49785
  ref <309>: DATABASE ENTRY DATE: 1998-10-27
ttggaaggagcgggagttcaagtcgagtgggaacggggcttagagtagtgggtggggggccaaaagctggggctgacacccgtgcacctgagctccactcgagcatcgccggtgacagctctccaggtccagtggagggcaacggggggaggaggggaggaggaggaggaggcgggagcagcatccggagccgagctgcagcagcgccgccttttgtgctgcggccgcggagcccccgagggccttggatcccctggaactggagttataggggttgtgagcatcatgtggatgctgggaatggaaccccagtcatctcgaagaacacccaggctggcctgaaactcactgtgaagccagagatgaccttggacttctgagcctctcacctccattcctgagtgctgggactgctgggcccgctactcagcacacctggctccagaggccatggcctgcctccatgaaacccgaacaccctccccttcctttggaggctttgtgtctactctaagtgaggcctccatgcgaaagctggatccagacacttcagactgcacccctgagaaggacctgacacctacccaatgtgtacttcgagatgttgtgcctctcggtgggcagggtggaggagggcccagcccctccccaggtggagagcctcctccagagccttttgccaatagtgtcctgcagctacatgagcaggatacaggtgggccagggggagccaccgggtcacctgagagtcgagcatctagggttcgagctgatgaggtacgtctgcagtgccagagtggcagtggcttccttgaaggtctttttggctgcctgcgccctgtctggacaatgattggcaaagcctactccacagagcacaagcaacagcaggaagacctttgggaagtcccctttgaggaaatcctggacctgcagtgggtaggctcaggggctcagggtgccgttttcctgggacgctttcatggggaggaggtagctgtgaagaaggttcgagacctcaaggagaccgacatcaagcatcttcgaaaactgaagcaccccaacatcatcactttcaagggtgtttgcacacaggccccgtgctactgcatcctcatggagttctgtgcccaaggacagctgtatgaggtgctcagggcgggccgccccgttaccccctccttgctggttgactggtccatgggcatcgctggaggcatgaattacctacacctgcacaaaatcatccacagagacctgaagtcacccaacatgctaatcacatacgacgatgtggtgaagatctcagactttggcacttccaaggagctgagtgacaagagcaccaagatgtcctttgcagggacagtagcctggatggctcctgaagtgatcagaaatgaacctgtgtctgagaaggttgacatctggtcctttggggtggtgctttgggaattactgactggagagattccctacaaagatgtagactcctcagccatcatctggggtgtgggaagcaacagtcttcacctgcctgtaccctctagctgcccagacggctttaaaattctgcttcgccagtgctggaacagaaaacctcggaaccgcccatcattccgacagatcttgctgcacctggacatcgcctcggctgatgtgctctctacaccccaggagacttactttaaatcccaggcagagtggcgggaagaagtaaaactgcactttgaaaagattaagtcagaagggacctgtctgcaccgcctagaagaggaactggtgatgcggagaagggaggagctcagacatgccctggacatcagggagcactatgagcgcaagttggagagagctaacaacttgtacatggaactgaatgccctcatgttgcaactagaactcaaagagagggaattgctcaggcgagagcaagctttagaaaggaggtgtcctggtctactgaagtcacacacgtcccgaagcctcctacatggaaacacgatggagaagctcatcaagaaaaggaatgtgccacagaaactgtcaccccatagcaaaaggccagatattctcaagacagagtctttgctacctaaactagatgcagccctaagtggggtggggcttcctggttgtcctaaggcccccccttcacctgggaggagtcgtcgtggcaagacccgtcaccgaaaggccagcgccaagggcagctgtggagacctgcctgggcttcgtgcagctttgccaccccatgagcctggaggactaggaagcccaggaggcctaggagtgggccctacagcttgggatgcctccccccctgctctccgtggactccaccatgaccttctacttcggaagatgtcttcatcatccccagacctgttatcagcagcactgggagcccgaggccgaggggcaacagggggagctcgggatcctggctcaccacctccaccccagggtgatactcctccaagtgagggatcagctcctggttccaccagcccagattcacctgggggagctaaaggggaaccacctccaccagtagggcctggagaaggtgtggggctgctgggaactggaagggaagggactacaggccggggaggaagccgggctgggtaccagcacttgacccccgctgcgctgctgtacagggctgctgtgactcgtagtcagaaacgtggtatctcatctgaagaggaagaaggagaggtcgacagtgaagtagagctacccccaagtcaaaggtggcctcagggcccgaacatgcgtcagtcactatctacgttcagctcagagaacccatcagatgtggaggaaggtacagctagtgagccttccccaagtggcacaccggaagttggcagcaccaacactgatgagcgaccagatgaacggtctgatgacatgtgctcacagggttcagaaatcccactggacctacctacttcagaggtggtccctgaacgtgaaaccagctccttgcccatgcaacaccaggatgaccagggccccaatcctgaggactcagactgtgacagcactgaattggacaactccaacagcattgatgccttgccgcccccagcctcccttcctccatgaaagacactcttattccttgtacatagagaaatatttatataaataatatatatgcgccacataatcaacagatagacggggctttcttagccgtaagtcaggcttcagagtgaacgacgcccctgaccaattaagttctagggacactggcagctgtggaaatgactccaagtactaccctagagctgtaaggaaaggacaccggtcccttcttgcttcaccccattccttatgttgaacaagcaagtaggcatagaaaagccaggcttgtctctacactgtctgtccctaaacatggggggcaggaagaggattcacttaaaactgcacttttattttccgtttactgtttacacattttgcacttgggaggagggaaactaaggctgggtcctaggtcctccctctgaggtttctcaggtggcaatgtaactcatttctttgttcctgtttctctgccaaagccctggctttgggcccagaggcaagttagaagattaatagcatgtgatggctcaggctgaagaactgggtgctggttaagtccccgctgttatctggtgcctggtaggggtggggactgtcatattgtaacccctgtgaacaaccctgaaatataaccactccatgcaggccc

SEQ ID NO: 2108 - protein, 888 aa, Rattus norvegicus
  ref <308>: DATABASE ACCESSION NUMBER: SWISS-Prot / Q63796
  ref <309>: DATABASE ENTRY DATE: 2001-10-16
MACLHETRTPSPSFGGFVSTLSEASMRKLDPDTSDCTPEKDLTPTQCVLRDVVPLGGQGGGGPSPSPGGEPPPEPFANSVLQLHEQDTGGPGGATGSPESRASRVRADEVRLQCQSGSGFLEGLFGCLRPVWTMIGKAYSTEHKQQQEDLWEVPFEEILDLQWVGSGAQGAVFLGRFHGEEVAVKKVRDLKETDIKHLRKLKHPNIITFKGVCTQAPCYCILMEFCAQGQLYEVLRAGRPVTPSLLVDWSMGIAGGMNYLHLHKIIHRDLKSPNMLITYDDVVKISDFGTSKELSDKSTKMSFAGTVAWMAPEVIRNEPVSEKVDIWSFGVVLWELLTGEIPYKDVDSSAIIWGVGSNSLHLPVPSSCPDGFKILLRQCWNRKPRNRPSFRQILLHLDIASADVLSTPQETYFKSQAEWREEVKLHFEKIKSEGTCLHRLEEELVMRRREELRHALDIREHYERKLERANNLYMELNALMLQLELKERELLRREQALERRCPGLLKSHTSRSLLHGNTMEKLIKKRNVPQKLSPHSKRPDILKTESLLPKLDAALSGVGLPGCPKAPPSPGRSRRGKTRHRKASAKGSCGDLPGLRAALPPHEPGGLGSPGGLGVGPTAWDASPPALRGLHHDLLLRKMSSSSPDLLSAALGARGRGATGGARDPGSPPPPQGDTPPSEGSAPGSTSPDSPGGAKGEPPPPVGPGEGVGLLGTGREGTTGRGGSRAGYQHLTPAALLYRAAVTRSQKRGISSEEEEGEVDSEVELPPSQRWPQGPNMRQSLSTFSSENPSDVEEGTASEPSPSGTPEVGSTNTDERPDERSDDMCSQGSEIPLDLPTSEVVPERETSSLPMQHQDDQGPNPEDSDCDSTELDNSNSIDALPPPASLPP

SEQ ID NO: 2109 - DNA, 3365 bp, Homo sapiens
  ref <308>: DATABASE ACCESSION NUMBER: EMBL / U07358
  ref <309>: DATABASE ENTRY DATE: 2000-03-04
agcatccggagcggagctgcagcagcgccgccttttgtgctgcggccgcggagcccccgagggcccagtgttcaccatcataccaggggccagaggcgatggcttgcctccatgagacccgaacaccctctccttcctttgggggctttgtgtctaccctaagtgaggcatccatgcgcaagctggacccagacacttctgactgcactcccgagaaggacctgacgcctacccatgtcctgcagctacatgagcaggatgcagggggcccagggggagcagctgggtcacctgagagtcgggcatccagagttcgagctgacgaggtgcgactgcagtgccagagtggcagtggcttccttgagggcctctttggctgcctgcgccctgtctggaccatgattggcaaagcctactccactgagcacaagcagcagcaggaagacctttgggaggtcccctttgaggaaatcctggacctgcagtgggtgggctcaggggcccagggtgctgtcttcctggggcgcttccacggggaggaggtggctgtgaagaaggtgcgagacctcaaagaaaccgacatcaagcacttgcgaaagctgaagcaccccaacatcatcactttcaagggtgtgtgcacccaggctccctgctactgcatcctcatggagttctgcgcccagggccagctgtatgaggtactgcgggctggccgccctgtcaccccctccttactggttgactggtccatgggcatcgctggtggcatgaactacctgcacctgcacaagattatccacagggatctcaagtcacccaacatgctaatcacctacgacgatgtggtgaagatctcagattttggcacttccaaggagctgagtgacaagagcaccaagatgtcctttgcagggacagtagcctggatggcccctgaggtgatccgcaatgaacctgtgtctgagaaggtcgacatctggtcctttggcgtggtgctatgggaactgctgactggtgagatcccctacaaagacgtagattcctcagccattatctggggtgtgggaagcaacagtctccatctgcccgtgccctccagttgcccagatggtttcaagatcctgcttcgccagtgctggaatagcaaaccacgaaatcgcccatcattccgacagatcctgctgcatctggacattgcctcagctgatgtactctccacaccccaggagacttactttaagtcccaggcagagtggcgggaagaagtaaaactgcactttgaaaagattaagtcagaagggacctgtctgcaccgcctagaagaggaactggtgatgaggaggagggaggagctcagacacgccctggacatcagggagcactatgaaaggaagctggagagagccaacaacctgtatatggaacttaatgccctcatgttgcagctggaactcaaggagagggagctgctcaggcgagagcaagctttagagcggaggtgcccaggcctgctgaagccacacccttcccggggcctcctgcatggaaacacaatggagaagcttatcaagaagaggaatgtgccacagaatctgtcaccccatagccaaaggccagatatcctcaaggcggagtctttgctccctaaactagatgcagccctgagtggggtggggcttcctgggtgtcctaaggcccccccctcaccaggacggagtcgccgtggcaagacccgtcaccgcaaggccagcgccaaggggagctgtggggacctgcctgggcttcgtacagctgtgccaccccatgaacctggaggaccaggaagcccagggggcctaggagggggaccctcagcctgggaggcctgccctcccgccctccgtgggcttcatcatgacctcctgctccgcaaaatgtcttcatcgtccccagacctgctgtcagcagcactagggtcccggggccggggggccacaggcggagctggggatcctggctcaccacctccggcccggggtgacaccccaccaagtgagggctcagcccctggctccaccagcccagattcacctgggggagccaaaggggaaccacctcctccagtagggcctggtgaaggtgtggggcttctgggaactggaagggaagggacctcaggccggggaggaagccgggctgggtcccagcacttgaccccagctgcactgctgtacagggctgccgtcacccgaagtcagaaacgtggcatctcatcggaagaggaggaaggagaggtagacagtgaagtagagctgacatcaagccagaggtggcctcagagcctgaacatgcgccagtcactatctaccttcagctcagagaatccatcagatggggaggaaggcacagctagtgaaccttcccccagtggcacacctgaagttggcagcaccaacactgatgagcggccagatgagcggtctgatgacatgtgctcccagggctcagaaatcccactggacccacctccttcagaggtcatccctggccctgaacccagctccctgcccattccacaccaggaacttctcagagagcggggccctcccaattctgaggactcagactgtgacagcactgaattggacaactccaacagcgttgatgccttgcgccccccagcttccctccctccatgaaagccactcgtattccttgtacatagagaaatatttatatggattatatatatatacatatatatatatatatgcgccacataatcaacagaaagatggggctgtcccagccgtaagtcaggctcgagggagactgatcccctgaccaattcacctgataaactctagggacactggcagctgtggaaatgaatgaggcacagccgtagagctgtggctaagggcaagccccttcctgccccaccccattccttatattcagcaagcaacaaggcaatagaaaagccagggttgtctttatattctttatccccaaataatagggggtggggggaggggcggtgggaggggcaggagagaaaaccacttagactgcacttttctgttccgtttactctgtttacacattttgcacttgggaggagggaggctaaggctgggtcctcccctctgaggtttctcaggtggcaatgtaactcatttttttgtcccaccatttatcttctctgcccaagccctgtcttaaggcccagggggaggttaggagactgatagcatgtgatggctcaggctgaagaaccggggttctgtttaagtccctgcttttatcctggtgcctgattggggtggggactgtcctactgtaacccctgtgaaaaaccttgaaaaataacactccatgcagga

SEQ ID NO: 2110 - protein, 859 aa, Homo sapiens [sequence omitted]

SEQ ID NO: 2111 - DNA, 1739 bp, Rattus norvegicus
  ref <308>: DATABASE ACCESSION NUMBER: EMBL / D49847
  ref <309>: DATABASE ENTRY DATE: 1999-01-21
ggaggacggcacgtcgcgggtggcattgtgtgtcccagtgtgcaagaatagccccagaagaggaaaggctgagcccagagcgcttcagcagggaagattcccttccccccgcttcaggctgctgagcactgagcggcgctcagaatggaagccatcgccaaatatgacttcaaagctactgctgacgatgagctgagcttcaagaggggggacatccttaaggttttgaatgaagagtgtgatcagaactggtataaggcagaactcaatgggaaagatggcttcatccccaagaattacatagaaatgaaaccacatccgtaagtcagactctatggttcccctaagcaaggggtttgcctgcttgtctccagcactgttttgatttggttttggggggatgatgtagaaggctcttcactatataggccttgttcccctaagctgtagccagcctgtagaccaggctggcctcacagagacccacctgcctctgcctccctactgttccagcatgcccagattggtttggttttgtgagataggcttaaaagtcttaataaagacatcaaaatcaaaataataatattgaagaaatcaaaatcaatttaaatggcaaatatatgttagattactggacctctgtccttggttcagaatgccccttgcctgcgatctctgcagcctaagattgggagccagcgtacagccagtccaggttactcagaggcagactcgaatggggataagtccgaagaagctttgagactccaagcatgaagtcctcacagcttcctgtggtgggataagcccacttggcactcctacagccatttagccttgggttttttgtcttttaggtattttttgctttagggagttttgtgggcttttcacagacaaaacagtaatacgctggtggagaagcacgaagcagtgaggatgacccctagatcagacctagactcagcctgtgcatctcaccaagagtccctacgcgtctgtctccttcatccatgctcaaaaagcttctgtgccgcatggtatcacagaccgtgtgggtcccagctcctaggaggcagaggcaggggatccctgggagtcgggaccagcctggtctgtagtattgagattagccaggactgcatggtgagaccctgtcttaaagaaaagaaagaaaggatggagggaagcaaggagggagaatataaaagtgtacgtgggaaaacacaggctggagaggtggcttagtggttaggagcattgtctgctcttccatagaatttgggtttgagtcctagcaccaacatcatggctcacagccatctgtaatttaagttctagagacccaagtcctcttctggccaccaaagtcacagacatacatgcaggcataacactcatgtatatactttttattttttaaataagaaagaaaagcagaaggtcaggagacagtttgtaaaggaggaagttttctttctttctctccctttgtttatttcttacttggtcaaggccttactatatggctctgactagaacttttgttgaccactctggccttaaactcaaagatctgcctgcctctgcctctgcctctgccttccaagtgtgtgtattattaaaggtccatgccaacacacatgtcctgccttcttttaaaaagtaaattgtgggggttggggatttagctcagtggtagagcgcttgggccctgggttcagtccccagctccc

SEQ ID NO: 2112 - protein, 217 aa, Rattus norvegicus [sequence omitted]

SEQ ID NO: 2113 - DNA, 1356 bp, Homo sapiens
  ref <308>: DATABASE ACCESSION NUMBER: EMBL / BC000631
  ref <309>: DATABASE ENTRY DATE: 2001-07-13
ggcacgagggaccgggcggcggcagcggcggcggcggctgtggcagagtctgtgcctgtggcggtgacggcggcgggagcaagcgctgccctcgcagagcagccttggggtcgccggccgctcgcagcgttgtggaggggcgggccggacgctgagcggagcagctgcgccacgggtggcattgtgtgtcccagagtgccggagcgagtcccagaagagaggcgaggctaagcccagagcgctgggttgcttcagcagggaagactcccttccccctgcttcaggctgctgagcactgagcagcgctcagaatggaagccatcgccaaatatgacttcaaagctactgcagacgacgagctgagcttcaaaaggggggacatcctcaaggttttgaacgaagaatgtgatcagaactggtacaaggcagagcttaatggaaaagacggcttcattcccaagaactacatagaaatgaaaccacatccgtggttttttggcaaaatccccagagccaaggcagaagaaatgcttagcaaacagcggcacgatggggcctttcttatccgagagagtgagagcgctcctggggacttctccctctctgtcaagtttggaaacgatgtgcagcacttcaaggtgctccgagatggagccgggaagtacttcctctgggtggtgaagttcaattctttgaatgagctggtggattatcacagatctacatctgtctccagaaaccagcagatattcctgcgggacatagaacaggtgccacagcagccgacatacgtccaggccctctttgactttgatccccaggaggatggagagctgggcttccgccggggagattttatccatgtcatggataactcagaccccaactggtggaaaggagcttgccacgggcagaccggcatgtttccccgcaattatgtcacccccgtgaaccggaacgtctaagagtcaagaagcaattatttaaagaaagtgaaaaatgtaaaacacatacaaaagaattaaacccacaagctgcctctgacagcagcctgtgagggagtgcagaacacctggccgggtcaccctgtgaccctctcactttggttggaactttagggggtgggagggggcgttggatttaaaaatgccaaaacttacctataaattaagaagagtttttattacaaattttcactgctgctcctctttcccctcctttgtcttttttttcatccttttttctcttctgtccatcagtgcatgacgtttaaggccacgtatagtcctagctgacgccaataataaaaaacaagaaaccaaaaaaaaaaaaaaaaaaaaaaaaaaaaaaaaaaaa

SEQ ID NO: 2114 - protein, 217 aa, Homo sapiens [sequence omitted]

SEQ ID NO: 2115 - DNA, 3090 bp, Rattus norvegicus
  ref <308>: DATABASE ACCESSION NUMBER: EMBL / D50093
  ref <309>: DATABASE ENTRY DATE: 1999-01-21
agtcctcgctccagggcttactgagtcagctatcttcaagtctttgctcctgatgcagccactcaggagtcttcctgactagaccctgactcaggcccttgtggtgtggtgtggtgtggtgtggtgtggtgtggtgtggtgtggtgtggtgtgttactcaggacgggtgtgttcacagatccacacagctgccccgcaggtgactttttgaattctggtgagtgaggtctacatctgtggataaaggttctcctccatgtatggctcaggccccacaggaccctggctccattagagcagccttctgagtatggctcaagaccccacaagaccatgtccagttccaaatgccaccgcattgtcgaagctcaaagccatggcattaactccaatgtggtatttcccagaccagatgtagtttaccaattggggtaattcttgttttcagggaacagagtgaaacattgtcaaatctgtcctaagaggatgggaatgagctgtgtacgtctgacttacttttctcctaaaggagaagccacaggggtctgacttcacacatttgttctgaagatgtctaggagcttcagcctgagtgccggacactgatgccttgttcttcatttcacagatcagccatcatggcgaaccttggctactggctgctggccctctttgtgactacatgtactgatgttggcctctgcaaaaagcggccaaagcctggagggtggaacactggtggaagccggtaccctgggcagggaagccctggaggcaaccgttacccacctcagagtggtggtacctgggggcagccccatggtggtggctggggacaacctcatggtggtggctggggacaacctcatggtggtggctggggtcagccccatggcgggggctggagtcaaggagggggtacccataatcagtggaacaagcccagcaagccaaaaaccaacctcaagcatgtggcaggggctgccgcagctggggcagtagtggggggccttggtggctacatgttggggagtgccatgagcaggcccatgctccattttggcaacgactgggaggaccgctactaccgagaaaacatgtaccgttaccctaaccaagtgtactacaggccggtggatcagtacagcaaccagaacaacttcgtgcacgactgtgtcaatatcaccatcaagcagcatacagtcaccaccaccaccaagggggagaacttcacggagaccgacgtgaagatgatggagcgtgtggtggagcagatgtgcgtcacccagtatcagaaggagtcccaggcctattacgacgggagaagatctagcgccgtgcttttctcctcccctcctgtgatcctcctcatctccttcctcatcttcctgatcgtgggatgaggaggccttcctgcttgttccttctcattctcgtggtctaggctgggggaggggttacccacctgtagctctttcaattgaggtggtgtctcattcttgcttctctttgtcccccataggctaatacccttggcagtgatgggtctggggaaatgtacagtagaccagatgctattcgcttcagcgtcctttgattgagtccatcatgggccagggttaacaccaggccagtaagaatataacaccaaataactgctggctagtcagggctttgttttggtctactgagtaaatactgtgtaacccctgaattgtacccagaggacatggtgacagagacacacataacttagtataggcaaagggttctatagccaaagaagccactgtgtgggcatggcaccctggataacagcctcccgcctgggatatctagagcatccacatgtggaattctttcttttctaacataaaccatagctgattgaaggcaacaagaaaaagaatcaaattatcctactgacattgaaagcaaactgtgttcattccctaggcgctggaatgatttttagccttggattaaaccaggagattttgactctgaggagaaccagcagtacaaaagcatggtctcctgtgatgggagagatggtgaagggacaaaggcaagacccctgcgtttcttcatttctgtctcataattatcaagagctagaattaggtcgtgccctaagtttctgtactcgtatttgaactggacaacaaagagacaatctacaaattctcttgggctgcagaggagagaaataggctccattccaaagtggaaagagaaattctgctagcattgtctaagtaaggctaacttttccttaaatcgctttgtatttcccccagcagacatcacaaccctgtgatcggttcagcctgcaccgcgggtgttctgtgtagaatatataaatataacttcaagcttaggccttctattttaaaacatctgaagtgtggaacgcactggccgttctgtgcagtactaagtgtgacccttgggctttcaatgtgcactcggttccgtatgattccaaagtagagccctagctggtcttcgaatctgcatgtacttcacgttttctatatttgtaacttcgcatgtatttgttttgtcatataaaaagtttataaatgtttgctatctgactgacattaaatagaagctatgatgagcacgtgtgggggtttttctccttcaatgctcctggccctgtgtttgtcacgagggtggcttgggctcatctgagcctgggagtggctcatttcacaccctgtccctgatgggcctctgataaggagtcttctcatttccactgactttgcattttcccttaagttgtactgagtcctgcagaaacacagtagtactccctggggagggagggaagactggggagtagggctcccccactccagaagaggtttttctgttttttgtttttttcactgtgaatcagtggttttgcctacatatatgactgttcaaaagatcccctggaactgaagttatgaatggttgtgagccactgtggggtttgggacttgaaccaggtactctgaaagaacagccactggccttaaccactgagctactgcttcagctccagggagtttgtttattctgaattcagattca

SEQ ID NO: 2116 - protein, 254 aa, Rattus norvegicus
  ref <308>: DATABASE ACCESSION NUMBER: SWISS-Prot / BAA08790
  ref <309>: DATABASE ENTRY DATE: 2001-10-16
MANLGYWLLALFVTTCTDVGLCKKRPKPGGWNTGGSRYPGQGSPGGNRYPPQSGGTWGQPHGGGWGQPHGGGWGQPHGGGWGQPHGGGWSQGGGTHNQWNKPSKPKTNLKHVAGAAAAGAVVGGLGGYMLGSAMSRPMLHFGNDWEDRYYRENMYRYPNQVYYRPVDQYSNQNNFVHDCVNITIKQHTVTTTTKGENFTETDVKMMERVVEQMCVTQYQKESQAYYDGRRSSAVLFSSPPVILLISFLIFLIVG

SEQ ID NO: 2117 - DNA, 2413 bp, Homo sapiens
  ref <308>: DATABASE ACCESSION NUMBER: EMBL / AY008282
  ref <309>: DATABASE ENTRY DATE: 2000-11-03
cgcgagcttctcctctcctcacgaccgaggcagagcagtcattatggcgaaccttggctgctggatgctggttctctttgtggccacatggagtgacctgggcctctgcaagaagcgcccgaagcctggaggatggaacactgggggcagccgatacccggggcagggcagccctggaggcaaccgctacccacctcagggcggtggtggctgggggcagcctcatggtggtggctgggggcagcctcatggtggtggctgggggcagccccatggtggtggctggggacagcctcatggtggtggctggggtcaaggaggtggcacccacagtcagtggaacaagccgagtaagccaaaaaccaacatgaagcacatggctggtgctgcagcagctggggcagtggtggggggccttggcggctacatgctgggaagtgccatgagcaggcccatcatacatttcggcagtgactatgaggaccgttactatcgtgaaaacatgcaccgttaccccaaccaagtgtactacaggcccatggatgagtacagcaaccagaacaactttgtgcacgactgcgtcaatatcacaatcaagcagcacacggtcaccacaaccaccaagggggagaacttcaccgagaccgacgttaagatgatggagcgcgtggttgagcagatgtgtatcacccagtacgagagggaatctcaggcctattaccagagaggatcgagcatggtcctcttctcctctccacctgtgatcctcctgatctctttcctcatcttcctgatagtgggatgaggaaggtcttcctgttttcaccatctttctaatctttttccagcttgagggaggcggtatccacctgcagcccttttagtggtggtgtctcactctttcttctctctttgtcccggataggctaatcaatacccttggcactgatgggcactggaaaacatagagtagacctgagatgctggtcaagccccctttgattgagttcatcatgagccgttgctaatgccaggccagtaaaagtataacagcaaataaccattggttaatctggacttatttttggacttagtgcaacaggttgaggctaaaacaaatctcagaacagtctgaaatacctttgcctggatacctctggctccttcagcagctagagctcagtatactaatgccctatcttagtagagatttcatagctatttagagatattttccattttaagaaaacccgacaacatttctgccaggtttgttaggaggccacatgatacttattcaaaaaaatcctagagattcttagctcttgggatgcaggctcagcccgctggagcatgagctctgtgtgtaccgagaactggggtgatgttttacttttcacagtatgggctacacagcagctgttcaacaagagtaaatattgtcacaacactgaacctctggctagaggacatattcacagtgaacataactgtaacatatatgaaaggcttctgggacttgaaatcaaatgtttgggaatggtgcccttggaggcaacctcccattttagatgtttaaaggaccctatatgtggcattcctttctttaaactataggtaattaaggcagctgaaaagtaaattgccttctagacactgaaggcaaatctcctttgtccatttacctggaaaccagaatgattttgacatacaggagagctgcagttgtgaaagcaccatcatcatagaggatgatgtaattaaaaaatggtcagtgtgcaaagaaaagaactgcttgcatttctttatttctgtctcataattgtcaaaaaccagaattaggtcaagttcatagtttctgtaattggcttttgaatcaaagaatagggagacaatctaaaaaatatcttaggttggagatgacagaaatatgattgatttgaagtggaaaaagaaattctgttaatgttaattaaagtaaaattattccctgaattgtttgatattgtcacctagcagatatgtattacttttctgcaatgttattattggcttgcactttgtgagtattctatgtaaaaatatatatgtatataaaatatatattgcataggacagacttaggagttttgtttagagcagttaacatctgaagtgtctaatgcattaacttttgtaaggtactgaatacttaatatgtgggaaacccttttgcgtggtccttaggcttacaatgtgcactgaatcgtttcatgtaagaatccaaagtggacaccattaacaggtctttgaaatatgcatgtactttatattttctatatttgtaactttgcatgttcttgttttgttatataaaaaaattgtaaatgtttaatatctgactgaaattaaacgagcgaagatgagcccccaa

SEQ ID NO: 2118 - protein, 253 aa, Homo sapiens
  ref <308>: DATABASE ACCESSION NUMBER: SWISS-Prot / P04156
  ref <309>: DATABASE ENTRY DATE: 2002-06-15
MANLGCWMLVLFVATWSDLGLCKKRPKPGGWNTGGSRYPGQGSPGGNRYPPQGGGGWGQPHGGGWGQPHGGGWGQPHGGGWGQPHGGGWGQGGGTHSQWNKPSKPKTNMKHMAGAAAAGAVVGGLGGYMLGSAMSRPIIHFGSDYEDRYYRENMHRYPNQVYYRPMDEYSNQNNFVHDCVNITIKQHTVTTTTKGENFTETDVKMMERVVEQMCITQYERESQAYYQRGSSMVLFSSPPVILLISFLIFLIVG

SEQ ID NO: 2119 - DNA, 838 bp, Rattus norvegicus
  ref <308>: DATABASE ACCESSION NUMBER: EMBL / D50436
  ref <309>: DATABASE ENTRY DATE: 2001-10-30
gggacccaggggacccttggcactgcgcaggaccccgcgggacccggaaccttccgacagggttatggcggccgctccgggcgcccgactcctgcgcgctgcctgcgcctccgtcgcttttcgtggtctggactgccgtcggctgctggtctgcgggacccgtgcgggacctgccgtccctcagtggaccccgagcccccacacgcttgcagaggccggacctggccggccactgagcgtgtctgcgcgcgcgcggagtagctcagaagataaggtaacagtccacttcaagaaccgagatggtgaaacgctaacgaccaaggggaaagttggtgactctctgctagatgttgtgattgagaataacctagatatcgatggatttggtgcgtgtgaggggactttggcttgctctacctgtcatcttatctttgaggaccatatatatgagaagttagatgccattactgatgaagagaacgacatgcttgacctggcttttggactaacaaacaggtcacggctgggctgtcaagtttgtctgaccaaggctatggacaatatgactgtccgtgtgcctgaagcagtggcagatgtccgacagtctgttgacatgagcaagaattcctaagctacaataaaaagaatattttcattaaatttttacctatttttataattatttcttagcataattgattatatggccaaaatatgtagctgtgctgtcttagttcagttttgtagtactgaaaatttgcagtttttattttgattaaattattaaaatatcagtctattagaagacagctgatacaataaactccttatgtatttt

SEQ ID NO: 2120 - protein, 188 aa, Rattus norvegicus
  ref <308>: DATABASE ACCESSION NUMBER: SWISS-Prot / P24483
  ref <309>: DATABASE ENTRY DATE: 2002-06-15
MAAAPGARLLRAACASVAFRGLDCRRLLVCGTRAGPAVPQWTPSPHTLAEAGPGRPLSVSARARSSSEDKVTVHFKNRDGETLTTKGKVGDSLLDVVIENNLDIDGFGACEGTLACSTCHLIFEDHIYEKLDAITDEENDMLDLAFGLTNRSRLGCQVCLTKAMDNMTVRVPEAVADVRQSVDMSKNS

SEQ ID NO: 2121 - DNA, 827 bp, Homo sapiens
  ref <308>: DATABASE ACCESSION NUMBER: EMBL / M18003
  ref <309>: DATABASE ENTRY DATE: 1999-07-02
cgggccggcagttcccgaccgcgggcgatggctgccgctgggggcgcccggctgctgcgcgccgcttctgctgtcctcggcggcccggccggccggtggctgcaccacgctgggtcccgcgctggatccagcggcctgctgaggaaccgggggccgggcgggagcgcggaggcgagccggtcgctgagcgtgtcggcgcgggcccggagcagctcagaagataaaataacagtccactttataaaccgtgatggtgaaacattaacaaccaaaggaaaagttggtgattctctgctagatgttgtggttgaaaataatctagatattgatggctttggtgcatgtgagggaaccctggcttgttcaacctgtcacctcatctttgaagatcacatatatgagaagttagatgcaatcactgatgaggagaatgacatgctcgatctggcatatggactaacagacagatcacggttgggctgccaaatctgtttgacaaaatctatggacaatatgactgttcgagtgcctgaaacagtggctgatgccagacaatccattgatgtgggcaagacctcctgaactagaacaaataggaatattttcatggaattttacctatttttataattattatttcttaaagtgattaaatgagaacatggatgagtggacttcatattatgactagctttactattttaattcaccttgcataactactgaattttgtcattcttgaaagtatgcaatttttattttggttatattacaaaaatgtcaatcaaatattaaaaaatagttaatgtgatagaaaaaccttacat

SEQ ID NO: 2122 - protein, 184 aa, Homo sapiens
  ref <308>: DATABASE ACCESSION NUMBER: SWISS-Prot / P10109
  ref <309>: DATABASE ENTRY DATE: 2002-06-15
MAAAGGARLLRAASAVLGGPAGRWLHHAGSRAGSSGLLRNRGPGGSAEASRSLSVSARARSSSEDKITVHFINRDGETLTTKGKVGDSLLDVVVENNLDIDGFGACEGTLACSTCHLIFEDHIYEKLDAITDEENDMLDLAYGLTDRSRLGCQICLTKSMDNMTVRVPETVADARQSIDVGKTS

SEQ ID NO: 2123 - DNA, 1786 bp, Rattus norvegicus
  ref <308>: DATABASE ACCESSION NUMBER: EMBL / D63761
  ref <309>: DATABASE ENTRY DATE: 2000-02-01
cggcgggttgctcttctcagccatggctcctcgctgctggcgctggtggagctggtccgcgtggcctggggttcggccgcttccctccaggagcactccgacccctggcttctgcaagaagttctccacacaggagacaacccctcagatctgtgtggtcggcagtggcccagctggcttctacacagcccaacacttgttgaagcaccacacccgggcccacgtagacatctatgagaagcagctcgtccccttcggcctggtgcgctttggtgtggcacctgaccatcctgaagtaaagaatgtcatcaacacatttacacagacagcccgctcagaccgctgtgccttccggggcaatgtggtggtgggcagggacgtgtccgttccagagcttcgggaagcctaccatgctgtggttctgagttatggagccgaggaccaccaacccctggaaattcctggcgaggagctgcctggagtggtctcagcccgggcctttgtgggctggtacaatgggcttcctgagaaccagaagctggctccggatctgagctgtgacacggctgtgattctggggcaagggaatgtggctctggatgtggcccggatcctgctgaccccacctgagcacctggagaaaacagacatcacagaggttgcactgggggtcctgaggcagagtcgggtgaagactgtgtggatagtgggtcggcgtggacccctgcaagtagccttcaccattaaggagcttcgggagatgattcagttgccaggaacccagcccattttggatccttcggatttcttgggcctccaggacagaattaaggatgtcccccgtccaaggaaacggctgacagagctgctgcttcggacagccacggagaagccaggagtggaagaggctgcccgccgggcactggcctctcgggcctggggcctccgctttttccgaagcccccagcaggtgctacccaccccagatggtcgacgggtagcaggcatccgcctggcagttaccagactggagggtgttggtgagtccacacgggcagtgcccacgggagatgtggaggacctcccttgtgggctgctgctgagcagtgttgggtataagagccgtcccatcgaccccagcgtgccctttgaccccaagcttggaatcatccccaacacagagggccgggttgtgaatgcaccaggcctctactgcagtggctgggtgaagaggggacccacaggtgtcatcaccacaaccatgacagacagcttcctcaccagccaggtgctgctgaaggacctgaaggccgggctgctgccctctggccccagacctggctatacagccattcaagccctgctcagtgatcgaggggtccggccagtctctttctcagattgggagaagttggatgctgaggaagtagctcgaggccagggcactgggaaaccaagggagaagctggtggatcgaagagagatgctgcagctgctggggcactgaacctgggccccagaccccaccgtacaagaagagctgtgctgggttggcagttgggttacagtgctgactgtcctggcttggaggccgacctgtggcctttccagggccctctgagctctgcctcagttaacctcccagtgtgggtttaggcccaggagggaacctgagctagggatggatggaggtacggacagaccctacccatcttgtttccttcctgtcggacgatggtaggcctctagactggaacacagtggaaataaaacagacgtgcctaag

SEQ ID NO: 2124 - protein, 494 aa, Rattus norvegicus
  ref <308>: DATABASE ACCESSION NUMBER: SWISS-Prot / P56522
  ref <309>: DATABASE ENTRY DATE: 2001-10-16
MAPRCWRWWSWSAWPGVRPLPSRSTPTPGFCKKFSTQETTPQICVVGSGPAGFYTAQHLLKHHTRAHVDIYEKQLVPFGLVRFGVAPDHPEVKNVINTFTQTARSDRCAFRGNVVVGRDVSVPELREAYHAVVLSYGAEDHQPLEIPGEELPGVVSARAFVGWYNGLPENQKLAPDLSCDTAVILGQGNVALDVARILLTPPEHLEKTDITEVALGVLRQSRVKTVWIVGRRGPLQVAFTIKELREMIQLPGTQPILDPSDFLGLQDRIKDVPRPRKRLTELLLRTATEKPGVEEAARRALASRAWGLRFFRSPQQVLPTPDGRRVAGIRLAVTRLEGVGESTRAVPTGDVEDLPCGLLLSSVGYKSRPIDPSVPFDPKLGIIPNTEGRVVNAPGLYCSGWVKRGPTGVITTTMTDSFLTSQVLLKDLKAGLLPSGPRPGYTAIQALLSDRGVRPVSFSDWEKLDAEEVARGQGTGKPREKLVDRREMLQLLGH

SEQ ID NO: 2125 - DNA, 1830 bp, Homo sapiens
  ref <308>: DATABASE ACCESSION NUMBER: EMBL / J03826
  ref <309>: DATABASE ENTRY DATE: 1997-02-17
gggggttgctgctcccagccatggcttcgcgctgctggcgctggtggggctggtcggcgtggcctcggacccggctgcctcccgccgggagcaccccgagcttctgccaccatttctccacacaggagaagaccccccagatctgtgtggtgggcagtggcccagctggcttctacacggcccaacacctgctaaagcacccccaggcccacgtggacatctacgagaaacagcctgtgccctttggcctggtgcgctttggtgtggcgcctgatcaccccgaggtgaagaatgtcatcaacacatttacccagacggcccattctggccgctgtgccttctggggcaacgtggaggtgggcagggacgtgacggtgccggagctgcaggaggcctaccacgctgtggtgctgagctacggggcagaggaccatcgggccctggaaattcctggtgaggagctgccaggtgtgtgctccgcccgggccttcgtgggctggtacaacgggcttcctgagaaccaggagctggagccagacctgagctgtgacacagccgtgattctggggcaggggaacgtggctctggacgtggcccgcatcctactgaccccacctgagcacctggaggccctccttttgtgccagagaacggacatcacgaaggcagccctgggtgtactgaggcagagtcgagtgaagacagtgtggctagtgggccggcgtggacccctgcaagtggccttcaccattaaggagcttcgggagatgattcagttaccgggagcccggcccattttggatcctgtggatttcttgggtctccaggacaagatcaaggaggtcccccgcccgaggaagcggctgacggaactgctgcttcgaacggccacagagaagccagggccggcggaagctgcccgccaggcatcggcctcccgtgcctggggcctccgctttttccgaagcccccagcaggtgctgccctcaccagatgggcggcgggcagcaggtgtccgcctagcagtcactagactggagggtgtcgatgaggccacccgtgcagtgcccacgggagacatggaagacctcccttgtgggctggtgctcagcagcattgggtataagagccgccctgtcgacccaagcgtgccctttgactccaagcttggggtcatccccaatgtggagggccgggttatggatgtgccaggcctctactgcagcggctgggtgaagagaggacctacaggtgtcatagccacaaccatgactgacagcttcctcaccggccagatgctgctgcaggacctgaaggctgggttgctcccctctggccccaggcctggctacgcagccatccaggccctgctcagcagccgaggggtccggccagtctctttctcagactgggagaagctggatgccgaggaggtggcccggggccagggcacggggaagcccagggagaagctggtggatcctcaggagatgctgcgcctcctgggccactgagcccagccccagccccggcccccagcagggaagggatgagtgttgggaggggaagggctgggtccgtctgagtgggactttgcacctctgctgatcccggccggccctggcttggaggcttggctgctcttccagcgtctctcctccctcctggggaaggtcgcccttgcgcgcaaggttttagctttcagcaactgaggtaaccttagggacaggtggaggtgtgggccgatctaaccccttacccatctctctactgctggactgtggagggtcaccaggttgggaacatgctggaaataaaacagctgcaccc

SEQ ID NO: 2126 - protein, 491 aa, Homo sapiens
  ref <308>: DATABASE ACCESSION NUMBER: SWISS-Prot / P22570
  ref <309>: DATABASE ENTRY DATE: 2002-06-15
MASRCWRWWGWSAWPRTRLPPAGSTPSFCHHFSTQEKTPQICVVGSGPAGFYTAQHLLKHPQAHVDIYEKQPVPFGLVRFGVAPDHPEVKNVINTFTQTAHSGRCAFWGNVEVGRDVTVPELQEAYHAVVLSYGAEDHRALEIPGEELPGVCSARAFVGWYNGLPENQELEPDLSCDTAVILGQGNVALDVARILLTPPEHLERTDITKAALGVLRQSRVKTVWLVGRRGPLQVAFTIKELREMIQLPGARPILDPVDFLGLQDKIKEVPRPRKRLTELLLRTATEKPGPAEAARQASASRAWGLRFFRSPQQVLPSPDGRRAAGVRLAVTRLEGVDEATRAVPTGDMEDLPCGLVLSSIGYKSRPVDPSVPFDSKLGVIPNVEGRVMDVPGLYCSGWVKRGPTGVIATTMTDSFLTGQMLLQDLKAGLLPSGPRPGYAAIQALLSSRGVRPVSFSDWEKLDAEEVARGQGTGKPREKLVDPQEMLRLLGH

SEQ ID NO: 2127 - DNA, 3320 bp, Rattus norvegicus
  ref <308>: DATABASE ACCESSION NUMBER: EMBL / D63834
  ref <309>: DATABASE ENTRY DATE: 1999-05-26
gaattcggcacgagctgcgaagtgactggtcggtcgtgtaggtgctgcagccaacgagcccggtggcgggcaagggacacgagcaggacccccggctccgaagaattgcggcccgcgccgccgcgtcacgcacactctgggcgccgcgagatacacataacgatactaggttttcgccgcatcttggaattcatcgacacctaagatgccacctgcgattggcgggccagtggggtacacccccccagatggaggctggggctgggcggtggtagttggagccttcatttctattggcttctcctatgcatttcccaaatccatcactgtcttctttaaagagattgaaattatattcagtgcaacgaccagtgaagtgtcatggatatcgtccatcatgctggctgtcatgtatgccggaggtcctatcagcagtatcttggtgaataaatatggcagccgtccagtaatgattgctggtggctgcctgtctggctgtggcttgattgcagcttctttctgtaacacggtgcaggaactttacttctgcattggtgtcattggaggtcttgggcttgctttcaacttgaacccagctctgactatgattggcaagtatttctacaagaagcgaccattggccaatggcctggctatggcaggcagcccagtgttcctctctaccctggctccacttaatcaggctttctttggtatttttggctggagaggaagcttcctaattcttgggggcctcctcctcaactgttgtgtagctggatccctgatgcgaccaatagggcctcagcaaggcaaggtggaaaaactcaagtccaaagagtctctccaggaagctgggaagtctgatgcaaatacagatctcattggaggaagtcccaaaggagaaaagctgtcagtcttccaaacagttaataaattcctggacttgtccctgtttacccatagaggctttttgctgtacctgtctggaaatgtggtcatgttctttgggctctttacccctttggtctttcttagtaattatggtaagagtaagcatttttccagtgagaagtcagccttcctcctttccattttggcttttgttgatatggtggccagaccgtccatgggtcttgcagccaacaccaggtggatcagacctcgagtccagtacttttttgctgcttctgttgttgcgaatggagtgtgccatttgctggcacctttgtctacgacctatgttgggttctgcatctacgcgggagtctttggatttgcctttggttggctcagctccgtattgtttgagacgttgatggacctcgttggaccccagaggttctccagtgctgtgggcttggtgaccattgtggaatgttgtcctgtcctcctgggaccaccacttttaggccgcctcaatgacatgtatggagactacaaatacacatactgggcttgtggcgtgatcctcatcatcgcaggcctctacctcttcattggtatgggcatcaattatcgacttgtggccaaagaacagaaagcggaggaaaagaagagggacggtaaagaggacgagaccagcactgatgttgatgagaagcccaagaagacaatgaaagaaacacagtcgccagcgccactgcagaacagctctggagaccccgcggaggaggagagcccagtctgacctgtggagcatgaagagagcaggtgtgacccgagacatccgaaaccattctgctggcccctagtctaccagtggtgccccgtgcagacagtggacaattgtgtggaaaacccaccagggtgttcattggtgggatttttttttttcactccttaccaatgcctggatttaaaatatactctgctttaggtagggagtggttgacaaagaatatggggaagaagcagtgatctgtttgtttgtttgtttgtttgtttgtttgtttgttttaatcttagcttttaacagtgtcatgaagattataatatgtgccttaagttttagtttttagaactctttagagagccttaacttttaaaaccattctgctgaattcatctgtttaaaacgtcattttaagaggaaaaataacaactagcttgcttgaggtaactaaccttaatcttgttttgttgttgttgtaatgctttgtcagacagacattgttaccggaacatttatgaatagaaatactgcttaaaggtcacaggtttataaaatactgagctaaagtatttttctagcattatagttgcctggtacatctgctgctaggtatatatttgagaaatttgaagcataaaattctggatcttggcagttccagccacagcctgtcacctgctgggcacctcttctggaatgctcactacagtctagtgctaaggtgttgccactgaattgatacctttgctcctattcagagacactgtgtggttagaagtaattggccatttttgaaatcaaatgcaaaaagttagtattaaaatctacaaaacaattccttaacacgtctgatttaatgtaaacagtatttcaagcatcagctgaattcagcgtaggttgtcccaaaaccttagttatggtgtgatactctgggtatgtgtgggtttgaggggctgtgagtgaggtcttggttcttaggattgacccagggccatgagcatgcgaagtacatgctgtacggccgagccacaacccacaggcaccctggagtcctcctagtccctgagaccttttctctgatttttgatagctcatttatttactgatagtttagagctgtatgtgagatatccagtacagggtgaatgtatgcgctctttgttttttacattgttttcagtatttgcaaaaccgagagggtcagtgtttggcctcagggaagccaataaagataaaatagggtggaagtttgcagactttcagtaagtacccacctcccgccacacacaccagacttacaggggaacttctatcatgcttacgattatttgacgcagtcttacctccacatcttaactttcacgaccctttcacttacctgacatgtagaaaaatgggtttaatatatggataggaggaaagatggaccagattggaattacagtgggttttttttttttaaacctgatgttttctgaatagaggcagaaaaaataagacatatgacactgaattggacgatgcatttaaaataccattgtaatgacagggtgaatacagatttacaaccttgtgtaagaagctgactttttccaaataaaacatttattttatttttagaaaaaaaaaaaaaaaaaaactcgag

SEQ ID NO: 2128 - protein, 494 aa, Rattus norvegicus
  ref <308>: DATABASE ACCESSION NUMBER: SWISS-Prot / P53987
  ref <309>: DATABASE ENTRY DATE: 2002-06-15
MPPAIGGPVGYTPPDGGWGWAVVVGAFISIGFSYAFPKSITVFFKEIEIIFSATTSEVSWISSIMLAVMYAGGPISSILVNKYGSRPVMIAGGCLSGCGLIAASFCNTVQELYFCIGVIGGLGLAFNLNPALTMIGKYFYKKRPLANGLAMAGSPVFLSTLAPLNQAFFGIFGWRGSFLILGGLLLNCCVAGSLMRPIGPQQGKVEKLKSKESLQEAGKSDANTDLIGGSPKGEKLSVFQTVNKFLDLSLFTHRGFLLYLSGNVVMFFGLFTPLVFLSNYGKSKHFSSEKSAFLLSILAFVDMVARPSMGLAANTRWIRPRVQYFFAASVVANGVCHLLAPLSTTYVGFCIYAGVFGFAFGWLSSVLFETLMDLVGPQRFSSAVGLVTIVECCPVLLGPPLLGRLNDMYGDYKYTYWACGVILIIAGLYLFIGMGINYRLVAKEQKAEEKKRDGKEDETSTDVDEKPKKTMKETQSPAPLQNSSGDPAEEESPV

SEQ ID NO: 2129 - DNA, 2578 bp, Homo sapiens
  ref <308>: DATABASE ACCESSION NUMBER: EMBL / L31801
  ref <309>: DATABASE ENTRY DATE: 1999-07-01
tctacacttaaaatgccaccagcagttggaggtccagttggatacacccccccagatggaggctggggctgggcagtggtaattggagctttcatttccatcggcttctcttatgcatttcccaaatcaattactgtcttcttcaaagagattgaaggtatattccatgccaccaccagcgaagtgtcatggatatcctccataatgttggctgtcatgtatggtggaggtcctatcagcagtatcctggtgaataaatatggaagtcgtatagtcatgattgttggtggctgcttgtcaggctgtggcttgattgcagcttctttctgtaacaccgtacagcaactatacgtctgtattggagtcattggaggtcttgggcttgccttcaacttgaatccagctctgaccatgattggcaagtatttctacaagaggcgaccattggccaacggactggccatggcaggcagccctgtgttcctctgtactctggcccccctcaatcaggttttcttcggtatctttggatggagaggaagctttctaattcttgggggcttgctactaaactgctgtgttgctggagccctcatgcgaccaatcgggcccaagccaaccaaggcagggaaagataagtctaaagcatcccttgagaaagctggaaaatctggtgtgaaaaaagatctgcatgatgcaaatacagatcttattggaagacaccctaaacaagagaaacgatcagtcttccaaacaattaatcagttcctggacttaaccctattcacccacagaggctttttgctatacctctctggaaatgtgatcatgttttttggactctttgcacctttggtgtttcttagtagttatgggaagagtcagcattattctagtgagaagtctgccttccttctttccattctggcttttgttgacatggtagcccgaccatctatgggacttgtagccaacacaaagccaataagacctcgaattcagtatttctttgcggcttccgttgttgcaaatggagtgtgtcatatgctagcacctttatccactacctatgttggattctgtgtctatgcgggattctttggatttgccttcgggtggctcagctccgtattgtttgaaacattgatggaccttgttggaccccagaggttctccagcgctgtgggattggtgaccattgtggaatgctgtcctgtcctcctggggccaccacttttaggtcggctcaatgacatgtatggagactacaaatacacatactgggcatgtggcgtcgtcctaattatttcaggtatctatctcttcattggcatgggcatcaattatcgacttttggcaaaagaacagaaagcaaacgagcagaaaaaggaaagtaaagaggaagagaccagtatagatgttgctgggaagccaaatgaagttaccaaaacagcagaatctccggaccagaaagacacagaaggagggcccaaggaggaggaaagtccagtctgaatccatggggctgaagggtaaattgagcagttcatgacccaggatatctgaaaatattctactggcctgtaatctaccagtggtgctcaatgcaaatagtagacatttgtgtggaaatcataccagttgttcattgatgggatttttgtttgactccttaccaatagcctgaatttgaggagggaatgattggtagcaaaggatgggggaaagaagtaggttctgttttgttttgttttaatcttagcttttaatagtgtcataaagattataatatgtgccttaagttttagtctttagaactctagagagccttaacttcttaaaccatttttgctgaattcatctatttcgagtgttgtgttaaaaggaaaaataacaactaacttgtttgaggcaaatctaaaatttaaaattaatcttgcttcattgttacatgtaatatatttcagacattttcactggaagatttatgaacagaaatattggttgaaagttagagattttacaaaatgctgacaaaaatattttcctagcatcagtagatttctggcatatgtttctgctagctatatatttaggaaattcaaagcataaaactttggcaacatcttggctgttctagacacagtgtacttgtcaacccctctcaggtaccttttcttgggatgcttattagaagccaagtaaagtgcttaaggtttgttttcattaaattagctatttctgctcccctgttcaaagatgcattttgagtgtttatagatcactgccctttttgaaatcacctggtattatttttcttactggaaaagttagtattaaaatctacagaactacatatttgtgcctccttggtaaatacaacacatctaattaaatgtagacagatatttcaaacatcagctgaattcacttaagtttttccaaaacctcagttaaactgtgaagctattggaatttttttttcctggaatttttcccctttgattcacagtggtcccatttatatctgcttctagcttagtgctatgtgtgagatatgtgtgtgtttggtgttttt

SEQ ID NO: 2130 - protein, 500 aa, Homo sapiens
  ref <308>: DATABASE ACCESSION NUMBER: SWISS-Prot / P53985
  ref <309>: DATABASE ENTRY DATE: 2002-06-15
MPPAVGGPVGYTPPDGGWGWAVVIGAFISIGFSYAFPKSITVFFKEIEGIFHATTSEVSWISSIMLAVMYGGGPISSILVNKYGSRIVMIVGGCLSGCGLIAASFCNTVQQLYVCIGVIGGLGLAFNLNPALTMIGKYFYKRRPLANGLAMAGSPVFLCTLAPLNQVFFGIFGWRGSFLILGGLLLNCCVAGALMRPIGPKPTKAGKDKSKASLEKAGKSGVKKDLHDANTDLIGRHPKQEKRSVFQTINQFLDLTLFTHRGFLLYLSGNVIMFFGLFAPLVFLSSYGKSQHYSSEKSAFLLSILAFVDMVARPSMGLVANTKPIRPRIQYFFAASVVANGVCHMLAPLSTTYVGFCVYAGFFGFAFGWLSSVLFETLMDLVGPQRFSSAVGLVTIVECCPVLLGPPLLGRLNDMYGDYKYTYWACGVVLIISGIYLFIGMGINYRLLAKEQKANEQKKESKEEETSIDVAGKPNEVTKAAESPDQKDTEGGPKEEESPV

SEQ ID NO: 2131 - DNA, 3320 bp, Rattus norvegicus; identical to SEQ ID NO: 2127
  ref <308>: DATABASE ACCESSION NUMBER: EMBL / D63834
  ref <309>: DATABASE ENTRY DATE: 1999-05-26

SEQ ID NO: 2132 - protein, 494 aa, Rattus norvegicus; identical to SEQ ID NO: 2128
  ref <308>: DATABASE ACCESSION NUMBER: SWISS-Prot / P53987
  ref <309>: DATABASE ENTRY DATE: 2002-06-15

SEQ ID NO: 2133 - DNA, 2578 bp, Homo sapiens; identical to SEQ ID NO: 2129
  ref <308>: DATABASE ACCESSION NUMBER: EMBL / L31801
  ref <309>: DATABASE ENTRY DATE: 1999-07-01

SEQ ID NO: 2134 - protein, 500 aa, Homo sapiens; identical to SEQ ID NO: 2130
  ref <308>: DATABASE ACCESSION NUMBER: SWISS-Prot / P53985
  ref <309>: DATABASE ENTRY DATE: 2002-06-15

SEQ ID NO: 2135 - DNA, 3519 bp, Rattus norvegicus
  ref <308>: DATABASE ACCESSION NUMBER: EMBL / D63886
  ref <309>: DATABASE ENTRY DATE: 1997-09-16
ctggaggggagcagagaggagggaaggagcagcggaggcagtgagctgggagcggctgaggcccttcccgcagaaactgggggcaccggcggcgtaggaggtggagaaggcggaggacgcacgggctggaggcggcggctgcgactcggcggcgctgggaatcggaaccgcgggtgaacttgggcgccacgttccgggcgacggccgggtgaggatggtgaacacttgcagccgctgaccctgcctttcctctgtttcctcgcgggttgccgagcctggcgcccatccccacccctggacgggtgggtgaacctgcaagcttctacccaccccaggactattttttcttttaaaaggaaacagggagtgggcattcggaaagagggagaaaacgcaggggagctcgtccatccgttgaggcagagttcactatgatcttactcgcattcagctctggaagaaggttggatttcgtgcatcgttcgggggtgtttttcttccaaaccttgctttggattttatgtgctacagtctgcggaacggagcagtatttcaatgtggaggtttggttacagaaatacggctaccttccaccgactgaccccagaatgtctgtgctgcgctctgcagagaccatgcagtcagccttagctgccatgcagcagttctatggcattaacatgacaggaaaagtggacagaaacacaattgactggatgaagaagcctcgatgtggtgtaccagaccaaacaagaggcagctctaaattcaacatccgacgaaagcgctatgcattaactgggcagaagtggcaacacaagcatatcacttacagtataaagaacgtaactcccaaggttggagatcctgagacccggagagcaattcgccgtgcctttgatgtgtggcagaatgtaacacctctaacgtttgaagaagttccctacagtgaactagaaaatggcaaacgtgatgtggatataaccatcatttttgcttctggtttccatggagacagatccccctttgatggggagggaggatttttggcccatgcttatttccctgggccaggaattggaggcgatactcattttgattctgatgagccatggacactgggaaatcccaatcatgatggaaatgatttatttcttgtagcagtccatgagctgggacatgctctagggctggagcattccaacgacccaacagctatcatggcaccattttaccagtacatggaaacagacaacttcaagcttcctaatgatgatttgcaaggcatccagaagatatatggtccacctgacaagatccctccacctacaagacctctaccgacagtgccccctcaccgatctgtccctccggccgacccaaggaaaaatgacaggcccaaacctcctcgacctcccactggcagaccttcctatccaggagccaaacccaacatctgtgatgggaacttcaacactctagctattcttcgaagggagatgtttgttttcaaggaccagtggttttggcgagtgagaaacaacagggtgatggatggataccccatgcaaattacttacttctggcggggccttcctcccagtattgatgcagtttatgaaaacagtgatggaaattttgtcttctttaaaggtaacaaatactgggtgttcaaagacacaactcttcaacctggataccctcatgacttgattacccttggaaatggaatcccccctcatggtattgattctgccatatggtgggaagatgttggcaaaacctatttcttcaaaggcgaccggtattggagatatagtgaagaaatgaaaaccatggaccctggctatcccaagcccatcaccatctggaaaggaatccctgaatcacctcagggagctttcgtccacaaggaaaatggctttacctatttctacaaaggaaaggagtattggaaattcaacaaccagatactcaaagtagaacctgggtatccaagatccatcctcaaggactttatgggctgtgatggaccaacagaccgagataaagaaggtctcagcccaccaccatgatgtagacattgtcatcaaactggacaacacagccagcactgtgaaagccatagctattgtcattccctgcatcttggccttatggcctccttgtattggtttacactgtgttccagttcaagcggaaaggaacaccccgccacatactgtactgtaaacgctctatgcaagagtgggtgtgatgtagggatttcttttttctttcttttccggagtttgtggtaacttgagattcaagacaagagctgttatgctgtttcctagctaggagcaggcttgtggcagctgatcgaggctgaccttccaaacctagatggttgctggtcctgcacatgagtggaaatatattcatggagaaacttccatgatgcacagtatctgccgttcttcagtcctctgtctttctttgtcattcagttctaggctttcctctgcacgctcaatgcccagtaaaatttcaggattaactgaagaagaggaaatatagaagaaaagtttcttcttatttttttttaaaatacttttccttctgaaatctgagcccatttctgggaaagagaaagaaagagagagagagagagagagagagagagagagagagagagagagagagagaaagcaaatcagaaaacccataggtttttgctttaaagcaaaagagagtttaaaaacaacaaaatccacaactgaactttcagaaaagtgtgaagatccaaaacagctttgtctccaaagaagatagctctgtgaccactatggatagtttcctgcgcattgtcttgtcaggtgggagatctggaacatacatgcaggacgctagactgttgggacagacattttccaacaaacaaggggccaaaatatctgcaatatagtaacagccttaataatacatgcattttcattttctacagctgttctcaactatgtccacaatgtatcatcacctccatactcatagctgtattcaaacaggaccttttggttgttttgaaatgtttctgaaccccctcttgcctcctgacacagcatcattgtgacattcttcccagttgtgttaggcctttgtcccaggccgtccattggtctgtcagcaatactcagcgcaaagcagagcgagaagcattgtgtctctgaagtaaagaaagtgatggtcatattataaagatatgttcctctttaatacatcggtgtaaccctttgagaactatcagaccagcttacagagtcaggatgatcagtcttgcaatctggtcatttgtagaagtggccaaaagggaaagccatcacatgttcgagaagttcagacttgtaaagcataccttacaatcccatgtaattctttaatgactgacagtactgcataaatgcttttataacaaacaacagtggtgtgacttgccaaaacttttctggcaaataaaaaagatattttgttaacaat

SEQ ID NO: 2136 - protein, 607 aa, Rattus norvegicus
  ref <308>: DATABASE ACCESSION NUMBER: SWISS-Prot / BAA22223
  ref <309>: DATABASE ENTRY DATE: 2002-06-15
MILLAFSSGRRLDFVHRSGVFFFQTLLWILCATVCGTEQYFNVEVWLQKYGYLPPTDPRMSVLRSAETMQSALAAMQQFYGINMTGKVDRNTIDWMKKPRCGVPDQTRGSSKFNIRRKRYALTGQKWQHKHITYSIKNVTPKVGDPETRRAIRRAFDVWQNVTPLTFEEVPYSELENGKRDVDITIIFASGFHGDRSPFDGEGGFLAHAYFPGPGIGGDTHFDSDEPWTLGNPNHDGNDLFLVAVHELGHALGLEHSNDPTAIMAPFYQYMETDNFKLPNDDLQGIQKIYGPPDKIPPPTRPLPTVPPHRSVPPADPRKNDRPKPPRPPTGRPSYPGAKPNICDGNFNTLAILRREMFVFKDQWFWRVRNNRVMDGYPMQITYFWRGLPPSIDAVYENSDGNFVFFKGNKYWVFKDTTLQPGYPHDLITLGNGIPPHGIDSAIWWEDVGKTYFFKGDRYWRYSEEMKTMDPGYPKPITIWKGIPESPQGAFVHKENGFTYFYKGKEYWKFNNQILKVEPGYPRSILKDFMGCDGPTDRDKEGLSPPDDVDIVIKLDNTASTVKAIAIVIPCILALCLLVLVYTVFQFKRKGTPRHILYCKRSMQEWV

SEQ ID NO: 2137 - DNA, 2589 bp, Homo sapiens
  ref <308>: DATABASE ACCESSION NUMBER: Refseq / NM_005941
  ref <309>: DATABASE ENTRY DATE: 2002-11-05
ggctccttacccacccggagacttttttttgaaaggaaactagggagggagggagagggagagagggagaaaacgaaggggagctcgtccatccattgaagcacagttcactatgatcttactcacattcagcactggaagacggttggatttcgtgcatcattcgggggtgtttttcttgcaaaccttgctttggattttatgtgctacagtctgcggaacggagcagtatttcaatgtggaggtttggttacaaaagtacggctaccttccaccgactgaccccagaatgtcagtgctgcgctctgcagagaccatgcagtctgccctagctgccatgcagcagttctatggcattaacatgacaggaaaagtggacagaaacacaattgactggatgaagaagccccgatgcggtgtacctgaccagacaagaggtagctccaaatttcatattcgtcgaaagcgatatgcattgacaggacagaaatggcagcacaagcacatcacttacagtataaagaacgtaactccaaaagtaggagaccctgagactcgtaaagctattcgccgtgcctttgatgtgtggcagaatgtaactcctctgacatttgaagaagttccctacagtgaattagaaaatggcaaacgtgatgtggatataaccattatttttgcatctggtttccatggggacagctctccctttgatggagagggaggatttttggcacatgcctacttccctggaccaggaattggaggagatacccattttgactcagatgagccatggacactaggaaatcctaatcatgatggaaatgacttatttcttgtagcagtccatgaactgggacatgctctgggattggagcattccaatgaccccactgccatcatggctccattttaccagtacatggaaacagacaacttcaaactacctaatgatgatttacagggcatccagaagatatatggtccacctgacaagattcctccacctacaagacctctaccgacagtgcccccacaccgctctattcctccggctgacccaaggaaaaatgacaggccaaaacctcctcggcctccaaccggcagaccctcctatcccggagccaaacccaacatctgtgatgggaactttaacactctagctattcttcgtcgtgagatgtttgttttcaaggaccagtggttttggcgagtgagaaacaacagggtgatggatggatacccaatgcaaattacttacttctggcggggcttgcctcctagtatcgatgcagtttatgaaaatagcgacgggaattttgtgttctttaaaggtaacaaatattgggtgttcaaggatacaactcttcaacctggttaccctcatgacttgataacccttggaagtggaattccccctcatggtattgattcagccatttggtgggaggacgtcgggaaaacctatttcttcaagggagacagatattggagatatagtgaagaaatgaaaacaatggaccctggctatcccaagccaatcacagtctggaaagggatccctgaatctcctcagggagcatttgtacacaaagaaaatggctttacgtatttctacaaaggaaaggagtattggaaattcaacaaccagatactcaaggtagaacctggatatccaagatccatcctcaaggattttatgggctgtgatggaccaacagacagagttaaagaaggacacagcccaccagatgatgtagacattgtcatcaaactggacaacacagccagcactgtgaaagccatagctattgtcattccctgcatcttggccttatgcctccttgtattggtttacactgtgttccagttcaagaggaaaggaacaccccgccacatactgtactgtaaacgctctatgcaagagtgggtgtgatgtagggttttttcttctttctttcttttgcaggagtttgtggtaacttgagattcaagacaagagctgttatgctgtttcctagctaggagcaggcttgtggcagcctgattcggggctgacctttcaaaccagagggttgctggtcctgcacatgagtggaaatacactcatggggaagcttccatgatgcacagtatctgctgttcttcagtcctttgtctttctttgtcattcagttctaggcctttcctctgcacgctcaatgcccagtaaaatttcaggattaactaaagaagaggagaaaaagaagaaaagattctttcttaaaagtttctaatgttattttccttctgaagtctgagcccatttctggggggagaaaaaaaaagcaaatcagaaaacccacggtttttctttttttctttttttctttttttcttttttggctttaaaacaaagggaaaaaagagtttaaacaaaaaacccacaattgaacttccaggaaagtgtgaagacccaaaacagctttgtctccaaagaagatagctctctgactgctttggatagtctcctacgcaccattttgtcaggtgggagatttggaatacacatgcaggacgttagactgttgggacagccattttccaaca

SEQ ID NO: 2138 - protein, 607 aa, Homo sapiens
  ref <308>: DATABASE ACCESSION NUMBER: SWISS-Prot / P51512
  ref <309>: DATABASE ENTRY DATE: 2002-06-15
MILLTFSTGRRLDFVHHSGVFFLQTLLWILCATVCGTEQYFNVEVWLQKYGYLPPTDPRMSVLRSAETMQSALAAMQQFYGINMTGKVDRNTIDWMKKPRCGVPDQTRGSSKFHIRRKRYALTGQKWQHKHITYSIKNVTPKVGDPETRKAIRRAFDVWQNVTPLTFEEVPYSELENGKRDVDITIIFASGFHGDSSPFDGEGGFLAHAYFPGPGIGGDTHFDSDEPWTLGNPNHDGNDLFLVAVHELGHALGLEHSNDPTAIMAPFYQYMETDNFKLPNDDLQGIQKIYGPPDKIPPPTRPLPTVPPHRSIPPADPRKNDRPKPPRPPTGRPSYPGAKPNICDGNFNTLAILRREMFVFKDQWFWRVRNNRVMDGYPMQITYFWRGLPPSIDAVYENSDGNFVFFKGNKYWVFKDTTLQPGYPHDLITLGSGIPPHGIDSAIWWEDVGKTYFFKGDRYWRYSEEMKTMDPGYPKPITVWKGIPESPQGAFVHKENGFTYFYKGKEYWKFNNQILKVEPGYPRSILKDFMGCDGPTDRVKEGHSPPDDVDIVIKLDNTASTVKAIAIVIPCILALCLLVLVYTVFQFKRKGTPRHILYCKRSMQEWV

SEQ ID NO: 2139 - DNA, 2175 bp, Rattus norvegicus
  misc_feature (1)..(2175): n=a, c, g or t
  ref <308>: DATABASE ACCESSION NUMBER: EMBL / D64045
  ref <309>: DATABASE ENTRY DATE: 1999-01-21
atgagcgcagaggggtaccagtacagagcgctgtatgactacaaaaaggaacgagaggaagacatcgacctacacttgggggacatcctgactgtgaataaaggctccttagtggcacttggattcagtgatggccaggaagcccggccagaagatattggctggttaaatggttacaatgaaactactggggagaggggagactttccaggaacttatgttgagtacattggaaggaaaagaatttcaccccccactcctaagccacggccccctcgacctcttcctgtagcacccggttcttcaaaaactgaagcagacactgagcaaccagtgttgacccttcctgatctggccgagcagtttgcccctcctgatgttgccccgcctctccttataaagctcctggaagccattgagaagaaaggactggaatgttcaactctatacagaacacagagctccagcaaccctgcagagttacgacagcttcttgattgtgatcccccctcagtggacttggatgtgttcgatgaacacgttttagcagatgctttcaaacgctatctcgccgacttaccaaatcctgtcattccagtagctgtttacaatgagatgatgtctttagcccaagaagtaccaagctccgaagactacatccagctgttgaagaagctcattaggtcgcctaatatacctcatcagtattggcttacgctccagtatttgctcaagcacttcttcaagctctctcaagcctccagcaagaaccttctgaatgcaagagccctctctgaaattttcagccacgtgcttttcagattcccagcagccagctctgataatactgaacacctcataaaagcggtagagcttttaatctcagcggagtggagtgagcgacagccagcaccagcactgccccctaaaccacccaagcccacttctatagccaacaacagcatgaacaacaatatgtccttacaggatgctgaatggtactggggagatatctcaagggaagaagtaaatgaaaaactccgagacactgctgatgggacctttctggtacgagatgcatccactaaaatgcacggngactacactctcacactaaggaaaggaggaaataacaaattaatcaaaatctttcaccgagatgggaaatacggtttctctgatccattaaccttcaactctgtggttgaattaataaaccactaccggaatgagtccttagctcagtacaatcccaagctggatgtgaagttactctacccagtgtctaaataccagcaggatcaagttgtcaaagaagataatattgaagctgtggggaaaaaattacatgaatataatactcaatttcaagaaaaaagtcgggaatatgatagattatatgaggaatacactcgtacttcccaggaaatacagatgaaaagaacagctatcgaagcatttaatgacaccataaaaatattcgaagagcagtgccacccccaggagcggtacagcaaagactacatagagaagtttaaacgcgaaggcaacgagaaggaaattcaaaggataatgcataatcacgataagctgaagtctcggatcagcgagatcatcgacagcaggaggagactggaggaagacttgaagaagcaggcagccgagtatcgcgagatcgacaagcgcatgaatagcattaagccggacctcattcagctgagaaagacaagagatcaatacttgatgtggctgacgcagaaaggggtccggcagaagaagctgaacgaatggttgggaaacgaaaacacagaagaccaatactcactggtagacgatgacgaggatttgccccaccatgatgagaagacgtggaatgtggggagcagcaaccgaaacaaagccgagaacctattgcgagggaaacgagatggcactttcctggtccgggagagcagtaagcagggctgctatgcctgctctgtagtggtagatggcgaagtcaaacattgcgtcatcaacaagactgccaccggctatggcttcgccgagccctacaacctgtacagctccctgaaagagctggtgctacattaccaacacacctccctggtgcagcacaatgactccctcaatgtcacactagcatacccagtatatgcacaacagaggcgatga

SEQ ID NO: 2140 - protein, 724 aa, Rattus norvegicus
  ref <308>: DATABASE ACCESSION NUMBER: SWISS-Prot / Q63787
  ref <309>: DATABASE ENTRY DATE: 2002-06-15
MSAEGYQYRALYDYKKEREEDIDLHLGDILTVNKGSLVALGFSDGQEARPEDIGWLNGYNETTGERGDFPGTYVEYIGRKRISPPTPKPRPPRPLPVAPGSSKTEADTEQPVLTLPDLAEQFAPPDVAPPLLIKLLEAIEKKGLECSTLYRTQSSSNPAELRQLLDCDPPSVDLDVFDEHVLADAFKRYLADLPNPVIPVAVYNEMMSLAQEVPSSEDYIQLLKKLIRSPNIPHQYWLTLQYLLKHFFKLSQASSKNLLNARALSEIFSHVLFRFPAASSDNTEHLIKAVELLISAEWSERQPAPALPPKPPKPTSIANNSMNNNMSLQDAEWYWGDISREEVNEKLRDTADGTFLVRDASTKMHGDYTLTLRKGGNNKLIKIFHRDGKYGFSDPLTFNSVVELINHYRNESLAQYNPKLDVKLLYPVSKYQQDQVVKEDNIEAVGKKLHEYNTQFQEKSREYDRLYEEYTRTSQEIQMKRTAIEAFNDTIKIFEEQCHPQERYSKDYIEKFKREGNEKEIQRIMHNHDKLKSRISEIIDSRRRLEEDLKKQAAEYREIDKRMNSIKPDLIQLRKTRDQYLMWLTQKGVRQKKLNEWLGNENTEDQYSLVDDDEDLPHHDEKTWNVGSSNRNKAENLLRGKRDGTFLVRESSKQGCYACSVVVDGEVKHCVINKTATGYGFAEPYNLYSSLKELVLHYQHTSLVQHNDSLNVTLAYPVYAQQRR

SEQ ID NO: 2141 - DNA, 3362 bp, Homo sapiens
  ref <308>: DATABASE ACCESSION NUMBER: Refseq / XM_043865
  ref <309>: DATABASE ENTRY DATE: 2002-08-01
tacaaccaggctcaactgttgcatggtagcagatttgcaaacatgagtgctgaggggtaccagtacagagcgctgtatgattataaaaaggaaagagaagaagatattgacttgcacttgggtgacatattgactgtgaataaagggtccttagtagctcttggattcagtgatggacaggaagccaggcctgaagaaattggctggttaaatggctataatgaaaccacaggggaaaggggggactttccgggaacttacgtagaatatattggaaggaaaaaaatctcgcctcccacaccaaagccccggccacctcggcctcttcctgttgcaccaggttcttcgaaaactgaagcagatgttgaacaacaagctttgactctcccggatcttgcagagcagtttgcccctcctgacattgccccgcctcttcttatcaagctcgtggaagccattgaaaagaaaggtctggaatgttcaactctatacagaacacagagctccagcaacctggcagaattacgacagcttcttgattgtgatacaccctccgtggacttggaaatgatcgatgtgcacgttttggctgacgctttcaaacgctatctcctggacttaccaaatcctgtcattccagcagccgtttacagtgaaatgatttctttagctccagaagtacaaagctccgaagaatatattcagctattgaagaagcttattaggtcgcctagcatacctcatcagtattggcttacgcttcagtatttgttaaaacatttcttcaagctctctcaaacctccagcaaaaatctgttgaatgcaagagtactctctgaaattttcagccctatgcttttcagattctcagcagccagctctgataatactgaaaacctcataaaagttatagaaattttaatctcaactgaatggaatgaacgacagcctgcaccagcactgcctcctaaaccaccaaaacctactactgtagccaacaacggtatgaataacaatatgtccttacaagatgctgaatggtactggggagatatctcgagggaagaagtgaatgaaaaacttcgagatacagcagacgggacctttttggtacgagatgcgtctactaaaatgcatggtgattatactcttacactaaggaaagggggaaataacaaattaatcaaaatatttcatcgagatgggaaatatggcttctctgacccattaaccttcagttctgtggttgaattaataaaccactaccggaatgaatctctagctcagtataatcccaaattggatgtgaaattactttatccagtatccaaataccaacaggatcaagttgtcaaagaagataatattgaagctgtagggaaaaaattacatgaatataacactcagtttcaagaaaaaagtcgagaatatgatagattatatgaagaatatacccgcacatcccaggaaatccaaatgaaaaggacagctattgaagcatttaatgaaaccataaaaatatttgaagaacagtgccagacccaagagcggtacagcaaagaatacatagaaaagtttaaacgtgaaggcaatgagaaagaaatacaaaggattatgcataattatgataagttgaagtctcgaatcagtgaaattattgacagtagaagaagattggaagaagacttgaagaagcaggcagctgagtatcgagaaattgacaaacgtatgaacagcattaaaccagaccttatccagctgagaaagacgagagaccaatacttgatgtggttgactcaaaaaggtgttcggcaaaagaagttgaacgagtggttgggcaatgaaaacactgaagaccaatattcactggtggaagatgatgaagatttgccccatcatgatgagaagacatggaatgttggaagcagcaaccgaaacaaagctgaaaacctgttgcgagggaagcgagatggcacttttcttgtccgggagagcagtaaacagggctgctatgcctgctctgtagtggtggacggcgaagtaaagcattgtgtcataaacaaaacagcaactggctatggctttgccgagccctataacttgtacagctctctgaaagaactggtgctacattaccaacacacctcccttgtgcagcacaacgactccctcaatgtcacactagcctacccagtatatgcacagcagaggcgatgaagcgcttactctttgatccttctcctgaagttcagccaccctgaggcctctggaaagcaaagggctcctctccagtctgatctgtgaattgagctgcagaaacgaagccatctttctttggatgggactagagctttctttcacaaaaaagaagtaggggaagacatgcagcctaaggctgtatgatgaccacacgttcctaagctggagtgcttatcccttctttttctttttttctttggtttaatttaaagccacaaccacatacaacacaaagagaaaaagaaatgcaaaaatctctgcgtgcagggacaaagaggcctttaaccatggtgcttgttaatgctttctgaagctttaccagctgaaagttgggactctggagagcggaggagagagaggcagaagaaccctggcctgagaaggtttggtccagcctggtttagcctggatgttgctgtgcacggtggacccagacacatcgcactgtggattatttcattttgtaacaaatgaacgatatgtagcagaaaggcacgtccactcacaagggacgctttgggagaatgtcagttcatgtatgttcagaagaaattctgtcatagaaagtgccagaaagtgtttaacttgtcaaaaaacaaaaacccagcaacagaaaaatggagtttggaaaacaggacttaaaatgacattcagtatataaaatatgtacataatattggatgactaactatcaaatagatggatttgtatcaataccaaatagcttctgttttgttttgctgaaggctaaattcacagcgctatgcaattcttaattttcattaagttgttatttcagttttaaatgtaccttcagaataagcttccccaccccagtttttgttgcttgaaaatattgttgtcccggatttttgttaatattcatttttgttatccttttttaaaagtaaatgtacaggatgccagtaaaaaaaaaaaatggcttcagaattaaaactatgaaatattttacagtttttcttgtacagagtacttggctgttagcccaaggttaaaaagttcataacagattttttttggactgttttgttgggcagtgcctgataagcttcaaagctgctttattcaataaaaaaaagaaa

SEQ ID NO: 2142 - protein, 724 aa, Homo sapiens
  ref <308>: DATABASE ACCESSION NUMBER: Refseq / XP_043865
  ref <309>: DATABASE ENTRY DATE: 2002-08-01
MSAEGYQYRALYDYKKEREEDIDLHLGDILTVNKGSLVALGFSDGQEARPEEIGWLNGYNETTGERGDFPGTYVEYIGRKKISPPTPKPRPPRPLPVAPGSSKTEADVEQQALTLPDLAEQFAPPDIAPPLLIKLVEAIEKKGLECSTLYRTQSSSNLAELRQLLDCDTPSVDLEMIDVHVLADAFKRYLLDLPNPVIPAAVYSEMISLAPEVQSSEEYIQLLKKLIRSPSIPHQYWLTLQYLLKHFFKLSQTSSKNLLNARVLSEIFSPMLFRFSAASSDNTENLIKVIEILISTEWNERQPAPALPPKPPKPTTVANNGMNNNMSLQDAEWYWGDISREEVNEKLRDTADGTFLVRDASTKMHGDYTLTLRKGGNNKLIKIFHRDGKYGFSDPLTFSSVVELINHYRNESLAQYNPKLDVKLLYPVSKYQQDQVVKEDNIEAVGKKLHEYNTQFQEKSREYDRLYEEYTRTSQEIQMKRTAIEAFNETIKIFEEQCQTQERYSKEYIEKFKREGNEKEIQRIMHNYDKLKSRISEIIDSRRRLEEDLKKQAAEYREIDKRMNSIKPDLIQLRKTRDQYLMWLTQKGVRQKKLNEWLGNENTEDQYSLVEDDEDLPHHDEKTWNVGSSNRNKAENLLRGKRDGTFLVRESSKQGCYACSVVVDGEVKHCVINKTATGYGFAEPYNLYSSLKELVLHYQHTSLVQHNDSLNVTLAYPVYAQQRR

SEQ ID NO: 2143 - DNA, 2169 bp, Rattus norvegicus
  ref <308>: DATABASE ACCESSION NUMBER: EMBL / D64046
  ref <309>: DATABASE ENTRY DATE: 1999-01-21
atggcaggtgctgaaggcttccagtacagggctgtatacccattccgccgggagcggcctgaggacctggagcttcttcctggtgacctcctggtggtgagccgggtggctctgcaggcactaggtgtggctgatggaggagagcgctgcccacacaacgtgggctggatgcctggcttcaatgagcgcacccgacagcgaggggacttccctggaacatatgtggagttcctaggacctgtggctctggctcgaccaggccctcgcccacgggggccccgtccattgcctgccaggcccttggatggaccttctgagtcaggtcacacactggcaagcctggcagagcagttctccccacctgagtctgcgcccccgattctggtgaagctgatagaagccattgagcaagcagagctggacagtgaattttacagtaggccggagctgcccgcaccacggacagactggtccctgagtgacttggagcagtgggaccgcaccaccttgtacgatgctgttaagggcttcctgctggcattgcctgcagctgtggtgactcctgaggctgcatcggaggcttatcgggcgatgcgggaggttacggggcctgtggggctggtgctggaacccccaacgctgccgttgcaccaggccctcactctgcggttcctgctgcagcacctgggccgcgtggcccgcagagcaccctcaccagctacagctgtccacgcactggccagtgccttcgggccgctgctgctgcgtgcgcctccgccagggggcgagggtgatgggagtgagcctgcacctgacttccctgtgctgcttctagagaggctggtgcaggagcatgtggatgagcaagacaccgccccgccagcactgccacccaaaccctctaaggtaaagccggcacccacagccctggccaatggagggagtacaccctcgcttcaggatgcagagtggtactggggggacatttccagggaagaggtgaatgagaggctccgagacacacctgatggtaccttcttagtccgagatgcatccagcaagatccaaggagagtacacgctcaccctcaggaaaggcgggaacaacaagctaatcaaagtcttccaccgggacggtcactatggcttctcagagccccttaccttctgctccgtggtagagctcatctcccactaccgacatgagtcactggcccagtacaacgccaagctggacacgcgccttctctaccctgtgtccaagtaccagcaagaccaggtggtgaaggaggacagtgtagaggctgtgggtgcccagctcaaggtctaccaccagcagtaccaggacaagagccgcgagtatgaccagctctatgaggaatacacacgaacctcccaggagcttcagatgaagcgcacagccatagaggccttcaacgagaccatcttgatcttcgaagaacagggccagacacaggagaagtgcagcaaggagtatttggagcgcttccggcgagagggcaatgagaaggagatgcagaggatcctgctgaactcggagcgactcaagtctcgaatcgcggagatacatgaaagccgcacgaagctggagcaggatctgcgggcgcaggcctcggacaatcgagagattgacaagcgcatgaacagcctcaagcctgatctcatgcagctgcgcaagatcagggaccagtacctcgtgtggctcacccagaaaggtgcccgacagaggaagatcaacgagtggctgggaatcaagaatgagactgaggaccagtattcactgatggaggatgaggacgccctcccccaccatgaggagcgcacgtggtacgtgggcaagatcaaccgcacacaggcggaggagatgctgagtgccaaacgagacgggaccttcctcatccgggagagcagccagcggggctgttacgcatgctctgtggtggtggatggcgacacgaagcactgtgtcatctaccgcacagccactggctttggcttcgcagagccctataacctgtacggatccctgaaggagctggtattgcactaccagcacgcatcacttgtgcagcacaatgacgcgctcaccgtcaccctcgcacaccctgtgcgtgcccccgggcctggcccgccccctgcagcacgctga

SEQ ID NO: 2144 - protein, 722 aa, Rattus norvegicus
  ref <308>: DATABASE ACCESSION NUMBER: SWISS-Prot / Q63788
  ref <309>: DATABASE ENTRY DATE: 2002-06-15
MAGAEGFQYRAVYPFRRERPEDLELLPGDLLVVSRVALQALGVADGGERCPHNVGWMPGFNERTRQRGDFPGTYVEFLGPVALARPGPRPRGPRPLPARPLDGPSESGHTLASLAEQFSPPESAPPILVKLIEAIEQAELDSEFYSRPELPAPRTDWSLSDLEQWDRTTLYDAVKGFLLALPAAVVTPEAASEAYRAMREVTGPVGLVLEPPTLPLHQALTLRFLLQHLGRVARRAPSPATAVHALASAFGPLLLRAPPPGGEGDGSEPAPDFPVLLLERLVQEHVDEQDTAPPALPPKPSKVKPAPTALANGGSTPSLQDAEWYWGDISREEVNERLRDTPDGTFLVRDASSKIQGEYTLTLRKGGNNKLIKVFHRDGHYGFSEPLTFCSVVELISHYRHESLAQYNAKLDTRLLYPVSKYQQDQVVKEDSVEAVGAQLKVYHQQYQDKSREYDQLYEEYTRTSQELQMKRTAIEAFNETILIFEEQGQTQEKCSKEYLERFRREGNEKEMQRILLNSERLKSRIAEIHESRTKLEQDLRAQASDNREIDKRMNSLKPDLMQLRKIRDQYLVWLTQKGARQRKINEWLGIKNETEDQYSLMEDEDALPHHEERTWYVGKINRTQAEEMLSAKRDGTFLIRESSQRGCYACSVVVDGDTKHCVIYRTATGFGFAEPYNLYGSLKELVLHYQHASLVQHNDALTVTLAHPVRAPGPGPPPAAR

SEQ ID NO: 2145 - DNA, 3201 bp, Homo sapiens
  ref <308>: DATABASE ACCESSION NUMBER: EMBL / X80907
  ref <309>: DATABASE ENTRY DATE: 1998-06-10
caactccctcccaccagctgacgaatggtggacccagtgacgagtggcccttgtaagggtcatggaataatttgaagcgaggcatgagcggcccctgtggtcgcctgtgactgctggagatagaggtcccagcaccccaagccaacccagcggaccctcccagccctgcttcaaccaatggggccagtggggctccaagcagccaacctaaccatccagaccccaccccactcacgcggccatggcgggccctgagggcttccagtaccgcgctctgtacccgttccgccgggagcggccggaggacctggagctgctgcccggcgacgtgctggtagtgagccgggcggccttgcaggcgctgggcgtggccgagggtggcgagcgctgcccacagagcgtgggctggatgcccggcctcaacgagcgcacacggcagcgaggtgacttccctggcacctatgtggagttcctggggcccgtggccctggcccggcccggccctcgcccacggggcccccgcccactgcccgccaggccccgtgatggggcccctgagccaggcctcacactccccgacttgcccgagcagttctccccacctgatgtggctccccctcttctggtgaagcttgtggaggccattgaaaggacagggctggacagcgaatctcactaccgcccggagctgcccgcaccgcgtacagactggtccctgagcgacgtggatcagtgggacacggcagccctggctgacggcattaagagcttcctgctggcactgcccgcgccgctcgtgacccccgaggcctcggccgaggcgcgccgggccctgcgggaggccgcggggcccgtggggccggcgctggagccaccgacgctgccgctgcaccgcgcgctcacgctgcgcttcctgctccagcacctgggccgcgtggcccgccgcgccccggccctgggtcccgcggtccgggccctgggcgccacctttgggccgctgctcctgcgcgcgccgccgccgccgtcctcgccgccgccagggggcgctcccgacgggagtgagcccagccctgacttcccggcgctgctggtggagaagctgcttcaggaacacttggaagagcaggaggttgcgcccccagcgctgccgcctaaaccccccaaggcaaagccggcccccacagtcctggccaatggagggagcccaccctccctgcaggatgctgagtggtactggggggacatttcaagggaggaggtgaacgagaaactccgggacactcccgatggcaccttcctagtccgagatgcttctagcaagatccagggcgagtacacgctgaccctcaggaaaggcgggaacaataagctgatcaaggtcttccaccgagatgggcactatggcttctcagagccactcaccttctgctccgttgtggacctcatcaatcactaccgccacgagtctctggcccagtacaatgccaagctggacacacggctcctctaccctgtgtccaaataccagcaggaccagattgtcaaggaggacagcgtggaggcagtgggcgcccagcttaaggtctatcaccagcagtaccaggacaagagccgcgagtatgaccagctttatgaagagtacacacggacctcccaggagctgcagatgaagcgtactgcaattgaggccttcaatgagactatcaagatctttgaagagcagggccagactcaagagaaatgcagcaaggaatacctggagcgcttccggcgtgagggcaacgagaaagagatgcaaaggatcctgctgaactccgagcggctcaagtcccgcattgccgagatccatgagagccgcacgaagctggagcagcagctgcgggcccaggcctcggacaacagagagatcgacaagcgcatgaacagcctcaagccggacctcatgcagctgcgcaagatccgagaccagtacctcgtgtggctcacccagaaaggcgcccggcagaagaaaatcaacgagtggctggggattaaaaatgagactgaggaccagtacgcactcatggaggacgaggacgatctcccgcaccacgaggaacgcacttggtacgtgggcaagatcaaccgcacgcaggcagaggagatgctgagcggcaagcgggatggcaccttcctcatccgcgagagcagccagcggggctgctacgcctgctccgtggtagtggacggcgacaccaagcactgcgtcatctaccgcacggccaccggcttcggcttcgcggagccctacaacctgtacgggtcgctgaaggagctggtgctgcactaccagcacgcctcgctggtgcagcacaacgacgcgctcactgtcaccctggcgcacccagtgcgcgccccgggccccggcccgccgcctgccgcccgctgagcaccgaggacccgccccaagcagagccgcccctgggcccgtctgcgccggaggctgcggcggcgggagccacggaccaagaccagccacatccaggggtcctcatttctccggctctggctcttgtttggggttctctcaccctctttctctttccttccctcccccattctccagatctccctctgtctccttttctctgtctttcttggcccctgtctctctccatgttgggggtcctaactcccccaccccatatctacgtgtcctccgggcattgccctctccatggctctggtcaccctgaccctctgccctgcccaccgcaggtcccccggggtcccggaagccccttctggctgcacctgccatgtttacagagggcccctgggctgcgcggccccagcctgggcaccctgatttttaagccatagacctggggtcagggcaggaaggaacttcactctgctgcttccgagaacctcggccgtgacattcggggccgggcgggacccgccccacagactccaacttcccctccaaaccccgaagtgaaacccgccaccgggttaccccacaagggggccgctgcgagaagttcacccacccccgaaaaaataattaaactcgcaggccaggcacggtggctcatgcctgtaatcccagcactttgggaggccaagacgggcggatcttttgaggtcgggagttggaggccagcctggccaaaatggcaaaaccccgcatctactaaaatacaaaaattagccggg

SEQ ID NO: 2146 - protein, 728 aa, Homo sapiens
  ref <308>: DATABASE ACCESSION NUMBER: SWISS-Prot / O00459
  ref <309>: DATABASE ENTRY DATE: 2002-06-15
MAGPEGFQYRALYPFRRERPEDLELLPGDVLVVSRAALQALGVAEGGERCPQSVGWMPGLNERTRQRGDFPGTYVEFLGPVALARPGPRPRGPRPLPARPRDGAPEPGLTLPDLPEQFSPPDVAPPLLVKLVEAIERTGLDSESHYRPELPAPRTDWSLSDVDQWDTAALADGIKSFLLALPAPLVTPEASAEARRALREAAGPVGPALEPPTLPLHRALTLRFLLQHLGRVARRAPALGPAVRALGATFGPLLLRAPPPPSSPPPGGAPDGSEPSPDFPALLVEKLLQEHLEEQEVAPPALPPKPPKAKPAPTVLANGGSPPSLQDAEWYWGDISREEVNEKLRDTPDGTFLVRDASSKIQGEYTLTLRKGGNNKLIKVFHRDGHYGFSEPLTFCSVVDLINHYRHESLAQYNAKLDTRLLYPVSKYQQDQIVKEDSVEAVGAQLKVYHQQYQDKSREYDQLYEEYTRTSQELQMKRTAIEAFNETIKIFEEQGQTQEKCSKEYLERFRREGNEKEMQRILLNSERLKSRIAEIHESRTKLEQQLRAQASDNREIDKRMNSLKPDLMQLRKIRDQYLVWLTQKGARQKKINEWLGIKNETEDQYALMEDEDDLPHHEERTWYVGKINRTQAEEMLSGKRDGTFLIRESSQRGCYACSVVVDGDTKHCVIYRTATGFGFAEPYNLYGSLKELVLHYQHASLVQHNDALTVTLAHPVRAPGPGPPPAAR

SEQ ID NO: 2147 - DNA, 2881 bp, Rattus norvegicus
  ref <308>: DATABASE ACCESSION NUMBER: EMBL / D64050
  ref <309>: DATABASE ENTRY DATE: 1997-04-24
gttcttagtagtactatcaataaccaggtagcagtcggctagctccaagtgactaaacaaagcttcagctcgcaggctttctgattagtccaactagccatggtgagggagtaacaagaagaacacaaatggaagccggatgcatcgcaacactcgacactgcaaatggatatagacaagctgaacataaccttgcttcggatcttccgccaaggagtagctgcagccctgggactcttacctcagcaagtacacatcaaccgcctcattgaaaagaagagccagattgagttgtttgtgtctcccggaaaccggaaaccaggagagccgcaggccctgcaggctgaggaagtactgcgttcccttaatgtggatgttttgcgtcagagtttaccacagtttggaattatagacgtctcccctgagaaaaatgttttacaagggcagcatgaagcggacaagatctggagcaaagaaggcttttacgccgtcgtcatcttcctcagcatctttatcattatagtaacctgtttgatgatcatttataggttaaaagaaaggcttcagctttccttacgacaagataaagagaaaaaccaggagatccacctatcgcccattgcactccagcaagcacaatcggaggccaaggcagcccacagcatggtccagcccgaccaggcgccaaaggtgctgaatgttgttgtggaccctcaaggccaatgcactcctgagattcgaaacaccgcctccacttctgtctgcccttctcccttcaggatgaagcccataggactccaggagcgacgaggttccaatgtatctcttacactggacatgagtagcctgggcaacgtggaaccctttgtggccgtctccaccccccgggagaaggtagccatggagtacctgcagtcagccagccgagttctcacaaggccacagctgagggacgtcgtggcaagttcccacctgcttcaaagtgaattcatggaaataccaatgaactttgtggatcccaaagaaattgatattccacgtcatggaactaaaaatcgttataagaccattttgccaaatcccctcagcagggtgtgcttaagaccaaaaaatataactgacccattgagtacttacatcaatgctaattacattcggggctacagtggcaaggagaaagccttcattgccacacagggccccatgatcaacactgtgaatgacttctggcagatggtttggcaagaagacagtcctgtgattgttatgatcacgaaactcaaagagaaaaatgagaaatgtgtgctctactggccagaaaagagagggatttacggcaaggttgaggttctggtcatcggtgtcaatgaatgtgataactacaccatccgcaacctcgtcttgaagcgaggaagtcacacccaacatgtgaagcattactggtacacttcatggcccgatcacaagactccagacagtgcccagccccttctgcagctcatgctggacgtagaggaagacagactggcctctgaaggccgagggcctgtggttgtccactgcagtgcagggattgggagaaccggatgtttcatcgctacatccattggctgtcaacagttgaaagaagaaggagtcgtagatgcactaagtatcgtctgccagcttcgtgtagacaggggtggaatggtccaaaccagtgagcagtatgaatttgtgcaccacgctctgtgcctgttcgagagcagactttcgccagaaacggtccagtgactctgaagatctaccagagcgtcaatctatcacgggtgattcgtcaagttacctactgagggctccgagaaggagctccccacgatggatgaggaggctctaaagccagcctgaggcgtggattgtggaagctatggtaacttgaaagattgccacctttgtgtataggactgtgttctaggcatccccctagttactccgaaggacctgtgctgatggaggtgtgacagtcctcatgcagcctgaggaggattctgttttgtctgtgtcgactctcacacagaacctgtatgtgtaatattcagagtctgtgcttatggtgactggaggagctgcggaagatatcgttatcctgtgttagatgctttaatgttcacaaagcctgtcttgtgactggactgtcagctgttcaactgttcctgtattaagtgctattacctatctcagttaccagagtcttgctgctaaagttgcaagtgaccgacaatggatttttaaccatgacgttttttgtttttgaaaaaaaaaaatcaaaggcagtaactattttatatggagatgtgtcttgattatctctaataagtgtgtatttatagtatctcctatggatcaattacagagcacaatgattgtcactggatatatatgtatatgtacattacaggtatatgtacgcatatatattctattattaagcatagaggtagctcctgttttacaactctaactactatatttctacattgtgacttgttttactttaaaaggggataaacaaatttatagtaactataaagtatcaataattttaaatactcatctctcttttactaagaagggatttttgaatatagtgtctacttggtttctctctcccagtaagaagcaggtgcctttggggatgctccaacctgtttcatccccgaaagtttttctgaggacaccgtcatgcacgcatgaccttaaatttctaaaaggttttcttcctcaagagaccaatgaaggcaagataaccgcactcagcaaacatgagatgttctgctcagatgtgaattttcaatgcagcaaagttgactttcgtactcccaataaatgactcttaacagcc

SEQ ID NO: 2148 - protein, 535 aa, Rattus norvegicus
  ref <308>: DATABASE ACCESSION NUMBER: SWISS-Prot / BAA19530
  ref <309>: DATABASE ENTRY DATE: 2002-06-15
MDIDKLNITLLRIFRQGVAAALGLLPQQVHINRLIEKKSQIELFVSPGNRKPGEPQALQAEEVLRSLNVDVLRQSLPQFGIIDVSPEKNVLQGQHEADKIWSKEGFYAVVIFLSIFIIIVTCLMIIYRLKERLQLSLRQDKEKNQEIHLSPIALQQAQSEAKAAHSMVQPDQAPKVLNVVVDPQGQCTPEIRNTASTSVCPSPFRMKPIGLQERRGSNVSLTLDMSSLGNVEPFVAVSTPREKVAMEYLQSASRVLTRPQLRDVVASSHLLQSEFMEIPMNFVDPKEIDIPRHGTKNRYKTILPNPLSRVCLRPKNITDPLSTYINANYIRGYSGKEKAFIATQGPMINTVNDFWQMVWQEDSPVIVMITKLKEKNEKCVLYWPEKRGIYGKVEVLVIGVNECDNYTIRNLVLKRGSHTQHVKHYWYTSWPDHKTPDSAQPLLQLMLDVEEDRLASEGRGPVVVHCSAGIGRTGCFIATSIGCQQLKEEGVVDALSIVCQLRVDRGGMVQTSEQYEFVHHALCLFESRLSPETVQ

SEQ ID NO: 2149 - DNA, 2401 bp, Homo sapiens
  ref <308>: DATABASE ACCESSION NUMBER: EMBL / U77917
  ref <309>: DATABASE ENTRY DATE: 1997-05-15
ggtagtttccaagagagacgctgagggatgtttagaaagcctgggacctgcagatgccatgtcaggcacgcttgctcctgcataggagactaaataatctcgatatataaggatggcagtctgttgtcttagatcagtttgagaagcagctctggcagcggggggtgtaggtgtgttgcactacactgaatggaataaggctaaaaatatgtttagtgtctgataagaacgccagttttctcaagctctcatttaacgtcggactttctgttttgcttttaaagaaaaatgttttacaagggcagcatgaagcggacaaaatctggagcaaagaaggattttatgctgttgtcatttttctcagcatctttgttattatagtaacgtgtttgatgattctttacagattaaaagaaagatttcagctttccttaagacaagacaaagagaaaaaccaggagatccacctatcgcccatcacattacagccagcactgtccgaggcaaagacagtccacagcatggtccaacctgagcaggccccaaaggtactgaatgttgtcgtggaccctcaaggccgaggtgctcctgagatcagagctaccaccgctacctctgtttgcccttctcctttcaaaatgaagcccataggacttcaagagagaagagggtccaacgtatctcttacattggacatgagtagcttggggaacattgaaccctttgtgtctataccaacaccacgggagaaggtagcaatggagtatctgcagtcagccagccgaattctcacaaggtctcagctgagggacgtcgtggcaagttcacatttactccaaagtgaattcatggaaataccaatgaactttgtggatcccaaagaaattgatattccgcgtcatggaactaaaaatcgctataagaccattttaccaaatcccctcagcagagtgtgtttaagaccaaaaaatgtaaccgattcattgagcacctacattaatgctaattatattaggggctacagtggcaaggagaaagccttcattgccacgcagggccccatgatcaacaccgtggatgatttctggcagatggtttggcaggaagacagccctgtgattgttatgatcacaaaactcaaagaaaaaaatgagaaatgtgtgctatactggccggaaaagagagggatatatggaaaagttgaggttctggttatcagtgtaaatgaatgtgataactacaccattcgaaaccttgtcttaaagcaaggaagccacacccaacatgtgaagcattactggtacacctcatggcctgatcacaagactccagacagtgcccagcccctcctacagctcatgctggatgtagaagaagacagacttgcttcccagggccgagggcctgtggttgtccactgcagtgcaggaataggtagaacagggtgttttattgctacatccattggctgtcaacagctgaaagaagaaggagttgtggatgcactaagcattgtctgccagcttcgtatggatagaggtggaatggtgcaaaccagtgagcagtatgaatttgtgcaccatgctctgtgcctgtatgagagcagactttcagcagagactgtccagtgagtcattgaagacttgtcagaccatcaatctcttggggtgattaatcaaattacccacccaaggcttctagaaggagcttcctgcaatggaaggaaggagaagctctgaagcccatgtatggcatggattgtggaagactgggcaacatatttaagatttccagctccttgtgtatatgaatgcatttgtaagcatcccccaaattattctgaaggttttttgatgatggaggtatgataggtttatcacacagcctaaggcagattttgttttgtctgtactgactctatctgccacacagaatgtatgtatgtaatattcagtaataaatgtcatcaggtgatgactggatgagctgctgaagacattcgtattatgtgttagatgctttaatgtttgcaaaatctgtcttgtgaatggactgtcagctgttaaactgttcctgttttgaagtgctattacctttctcagttaccagaatcttgctgctaaagttgcaagtgattgataatggatttttaacagagaagtctttgtttttgaaaaacaaaaatcaaaaacagtaactattttatatggaaatgtgtcttgataatattacctattaaatgtgtatttatagtccctcctatcaaacaattacagagcacaatgattgtcattgggtatatatgtatttactctctattattgggcataaaggtggcttctgctccagaactctatccactgtatttccacatcgtgagtcattttactttaaaagggaa

SEQ ID NO: 2150 - protein, 657 aa, Homo sapiens
  ref <308>: DATABASE ACCESSION NUMBER: Refseq / NP_002840
  ref <309>: DATABASE ENTRY DATE: 2002-11-05
MRRAVCFPALCLLLNLHAAGCFSGNNDHFLAINQKKSGKPVFIYKHSQDIEKSLDIAPQKIYRHSYHSSSEAQVSKRHQIVNSAFPRPAYDPSLNLLAMDGQDLEVENLPIPAANVIVVTLQMDVNKLNITLLRIFRQGVAAALGLLPQQVHINRLIGKKNSIELFVSPINRKTGISDALPSEEVLRSLNINVLHQSLSQFGITEVSPEKNVLQGQHEADKIWSKEGFYAVVIFLSIFVIIVTCLMILYRLKERFQLSLRQDKEKNQEIHLSPITLQPALSEAKTVHSMVQPEQAPKVLNVVVDPQGRGAPEIRATTATSVCPSPFKMKPIGLQERRGSNVSLTLDMSSLGNIEPFVSIPTPREKVAMEYLQSASRILTRSQLRDVVASSHLLQSEFMEIPMNFVDPKEIDIPRHGTKNRYKTILPNPLSRVCLRPKNVTDSLSTYINANYIRGYSGKEKAFIATQGPMINTVDDFWQMVWQEDSPVIVMITKLKEKNEKCVLYWPEKRGIYGKVEVLVISVNECDNYTIRNLVLKQGSHTQHVKHYWYTSWPDHKTPDSAQPLLQLMLDVEEDRLASQGRGPVVVHCSAGIGRTGCFIATSIGCQQLKEEGVVDALSIVCQLRMDRGGMVQTSEQYEFVHHALCLYESRLSAETVQ

SEQ ID NO: 2151 - DNA, 2129 bp, Rattus norvegicus
  ref <308>: DATABASE ACCESSION NUMBER: EMBL / D78018
  ref <309>: DATABASE ENTRY DATE: 1998-01-23
ttggaaatgtgaacgcaagaagcaggcttgatttttttttcctcccccctctcctagctctctcctcctctctctccctctcgcacccacactcacgcacacctccagcccgcacacagacgtgcacgcaccccccgccgcccggcagttatgtattctccgctctgtctcacccaggatgagtttcatcctttcattgaagcacttctgccccatgtccgcgccttcgcctacacatggttcaacctgcaggcccgaaagcggaaatacttcaaaaagcatgagaagcgcatgtcgaaagaagaggagagggctgtgaaggatgaactgctaagtgagaagcctgaggtcaagcaaaagtgggcttcccgacttctggccaagttacggaaagatatccgacccgagtaccgagaggattttgttcttacagttacagggaaaaaacctccatgctgtgttctttccaacccagaccagaaaggcaagatgcggagaattgactgcctccgccaggcagataaagtatggaggttggacctcgtcatggtgatcttgttcaaaggtattccgctggaaagtactgatggtgaacgccttgtgaagtccccacagtgctcgaatccagggctctgtgtccagccccatcacataggggtttctgtaaaggaactcgatttatatttggcatactttgtacatgcagcaggacatttgggcttccaggacagcttcgtcacatcaggtgttttcagtgtgactgagctagtaagagtgtcacaaacaccaatagctgcaggaaccggccccaatttttctctctctgatttggaaagttcctcatactacagcatgagtccaggagcaatgaggaggtctctacccagcacatcctctaccagctctaccaagcgcctcaagtctgtggaggacgaaatggacagtcctggtgaagaaccattttacacaggccaagggcgctccccagggagtggcagccagtccagcggatggcatgaagtagagccaggcatgccatctccaaccactctgaagaagtctgagaagtctggtttcagcagcccctccccttcgcagacctcctccctcggaacagcattcacacagcatcaccgacctgtcataacaggaccgagagcaagcccacatgcgacgccatcgactctccactttccaacgtcacctatcatccagcagcctgggccttatttctcacacccagccatccgttaccaccctcaggagacgctgaaggagtttgtccaacttgtctgccccgatgctggtcagcaagctggacaggtggggttcctcaatcccaatggaagcagtcaaggcaaggtgcacaacccattcctccccaccccaatgttgccgccgccaccgccaccaccgatggccaggcctgtgcctctgcccatgccagacaccaagcctccaaccacatcaacagaaggcggtgcagcctcccccacctcaccgacctactcgacacccagcacctcccccgcaaaccgattcgtcagtgttggaccacgggatccaagctttgtaaatatccctcaacagacacagtcctggtacctgggataaaagttgcagcgtcccaccatcctccagacagaccacctgaccccttctcaactctgtaacatggacgcaacctcaacccggcgcagttacaacttcactgtcagtggaaggggagagacaccaactcgaatcaacttgtacatggaaacagcgaacgtcgtggtcaaacagcaaaggccataacttttcgggattctttttttttttttaatactttagggactgtcgtaatttctcatatggtgctggaaatggttgggctgtgtgacatttgaagtgttccagtggtggtgtgagcagtaggtgaagcggctggtaggggatgagccttgctcacgaacttcctgttgtaacacttgtgagcctggccttttcacagtatttcaagaatttgcccgcgcaggtgtgtgaccctcccggagcacttggagacacctggagaatgaaatctttcgtagtagctaagatctgtgatctgtaacttacaggacactcaaagggcaatgttttttggg

SEQ ID NO: 2152 - protein, 509 aa, Rattus norvegicus
  ref <308>: DATABASE ACCESSION NUMBER: SWISS-Prot / P09414
  ref <309>: DATABASE ENTRY DATE: 2001-10-16
MYSPLCLTQDEFHPFIEALLPHVRAFAYTWFNLQARKRKYFKKHEKRMSKEEERAVKDELLSEKPEVKQKWASRLLAKLRKDIRPEYREDFVLTVTGKKPPCCVLSNPDQKGKMRRIDCLRQADKVWRLDLVMVILFKGIPLESTDGERLVKSPQCSNPGLCVQPHHIGVSVKELDLYLAYFVHAADSSQSESPSQPSDADIKDQPENGHLGFQDSFVTSGVFSVTELVRVSQTPIAAGTGPNFSLSDLESSSYYSMSPGAMRRSLPSTSSTSSTKRLKSVEDEMDSPGEEPFYTGQGRSPGSGSQSSGWHEVEPGMPSPTTLKKSEKSGFSSPSPSQTSSLGTAFTQHHRPVITGPRASPHATPSTLHFPTSPIIQQPGPYFSHPAIRYHPQETLKEFVQLVCPDAGQQAGQVGFLNPNGSSQGKVHNPFLPTPMLPPPPPPPMARPVPLPMPDTKPPTTSTEGGAASPTSPTYSTPSTSPANRFVSVGPRDPSFVNIPQQTQSWYLG

SEQ ID NO: 2153 - DNA, 3206 bp, Rattus norvegicus
  ref <308>: DATABASE ACCESSION NUMBER: EMBL / D78303
  ref <309>: DATABASE ENTRY DATE: 1998-05-15
gtttcgcgcaggaagcaggctccattttagcgccgcccgccgtcgccatctgtttctctctcctcccccttgtctctggtgtggccgaatccccaacagaaagattgaagcccgcgctgtccgaggtcaggcgggaagagaaccagaggacgggaggaagggtgctcgtaggagctgagtggagcaggtcaggtcgaagcgcgcggcccgccggacggactgacggacggactcgtgcgcctgcggccgcggctgcggcgcgccgcgcgactcgcttcccggcggcggtggcggcggcggaagccggagggcagccatggcggccgacagccgggaggagaaagatggggaacttaatgttttagatgatattttgactgaagtaccagaacaggatgatgaactgtataatccagagagtgaacaagataaaaatgagaaaaaaggatcaaaaagaaaaagtgaaagaatggaatctattgacaccaagcgacagaagccttctatccattcaagacaactgatttctaagccactaagctcatctgttagcaataataaaagaatagttagtacaaaaggaaagtcggttacagaatataaaaatgaggaatatcaaagatctgaaaggaacaagcgtctagatgctgatcgaaaaattcgtctgtcaagcagttcctctagagaaccttacaagagtcaaccagaaaaaccttgtctacggaaaagggattctgaaagaagggccaagtctcctacaccagatggttctgagagaattgggcttgaagttgatagacgtgcaagcagatccagccagtcttcaaaggaagaggggaactctgaggagtatggctctgaccacgagacaggaagcagtgcttcttctgaacagggcaacaacactgagaatgaggaggaaggaggggaagaagatgtagaggaagatgaagaggtagatgaagatggagatgatgatgaggaagtggatgaagatgcggaggaggaggaggacgaggaagaagatgaggaggaggaggatgaggaagaagaagaggaagaggaagaagaatatgaacaggatgagagagatcagaaggaagaagggaatgattatgacacccgtagtgaggccagtgattctggttctgagtctgtttccttcacagatggatctgtcaggtctggttcaggaacagatggatcagatgagaaaaagaaggaaaggaagagagctcgaggcatatcacccattgtctttgatagaagtggcagttctgcatcagagtcatatgcagatcaaaccagtaaactcaaatctgtccttcaggatgcaagatttttcctcataaagagtaacaaccatgagaatgtgtctcttgccaaagcaaagggtgtatggtccacattacctgtaaatgagaagaaattaaatcttgcgtttagatctgcaaggagtgttatattaatattttctgtcagggaaagtggaaagtttcaaggttttgccagattgtcatcagaatcgcatcatggtggctctcctatacattgggtgcttccagcaggaatgagtgctaaaatgcttggaggtgtttttaaaattgactggatttgcaggcgtgaattaccctttactaagtcagctcatctcaccaatccctggaatgaacataagccagtaaagattggacgtgatggacaggaaattgaacttgaatgtggaacccagctttgtcttctgtttccccctgatgaaagtattgacttgtatcagctcattcataaaatgcgtcacaagagaagaatgcattctcagcctcgatcaagaggacgtccatcccgtcgagaaccagtccgggatgtgggaaggcgtcgaccagaagattatgatattcataacagcagaaagaaaccaaggattgactatccccctgagtttcaccagagaccagggtatttaaaggatccccgataccaggaagttgacagacgattttcaggagttcgccgagatgtgtttttaaatgggtcctacaatgattatgtgagggaatttcataacatgggaccaccgcctccttggcaaggaatgcctccttacccgggaatagaacagcctccacaccatccctactaccagcaccatgccccgcctcctcaagcccaccccccttactcaggacaccatccggtaccacatgaagcaagatacagagataaacgagtacatgactatgatatgagggttgatgatttccttcgccgcacacaagccgttgtcagtggtcggagaagtagaccccgagaaagagatcgggagcgagagcgagaccgccctagagataacagaagagatagagagcgagacagaggtcgtgatcgagaaagagagagagaaagaatatgtgatcgggacagagaccgaggggaaagaggtcgttatcgaagataatgtgctttttggaagcactgactgaagataaaaaatattgtattttttttgtgtgtgtttacaagtagtaaatttattttcagctgtctacttaaagctcattgtgtagaaggatttattatcttctttgttccaagcatgcagtagaataagaactggaaaactcagatccgccaaaaaatgcacagttgacagttgagttgacacttttattggggcagaatggaacagtccaagaatgtagatattgattcattctccataaatgttctttttacagtgtattcatcctagagttattttgtttgtttgttttccttcttttggaccttggtcaatactgccatagtattttgctttgtgtttctataggtagctgcacacggttcagtaaaaataatgctgctatcaagtatgcagatattgagtatgatggtttgactatatggcagtgttgtagcagcctctcggtttctcctcttccctccttttttttaaacctataaatccactttttttttaagtcttcaatgatgagagcaatattaagaagacattgctatctaatttttaatctttttaaataaaacgttcctatgttcagtagcatggtcgatgctattgtttagccttccttccaaactgtacattggcttggaatgttcagttttgcgtgtgtggcagcagaagataaccccacattctacattgctactgttttgtatgaaataaattggtaaagattgacact

SEQ ID NO: 2154 - protein, 712 aa, Rattus norvegicus
  ref <308>: DATABASE ACCESSION NUMBER: SWISS-Prot / BAA23885
  ref <309>: DATABASE ENTRY DATE: 2003-02-01
MAADSREEKDGELNVLDDILTEVPEQDDELYNPESEQDKNEKKGSKRKSERMESIDTKRQKPSIHSRQLISKPLSSSVSNNKRIVSTKGKSVTEYKNEEYQRSERNKRLDADRKIRLSSSSSREPYKSQPEKPCLRKRDSERRAKSPTPDGSERIGLEVDRRASRSSQSSKEEGNSEEYGSDHETGSSASSEQGNNTENEEEGGEEDVEEDEEVDEDGDDDEEVDEDAEEEEDEEEDEEEEDEEEEEEEEEEYEQDERDQKEEGNDYDTRSEASDSGSESVSFTDGSVRSGSGTDGSDEKKKERKRARGISPIVFDRSGSSASESYADQTSKLKSVLQDARFFLIKSNNHENVSLAKAKGVWSTLPVNEKKLNLAFRSARSVILIFSVRESGKFQGFARLSSESHHGGSPIHWVLPAGMSAKMLGGVFKIDWICRRELPFTKSAHLTNPWNEHKPVKIGRDGQEIELECGTQLCLLFPPDESIDLYQLIHKMRHKRRMHSQPRSRGRPSRREPVRDVGRRRPEDYDIHNSRKKPRIDYPPEFHQRPGYLKDPRYQEVDRRFSGVRRDVFLNGSYNDYVREFHNMGPPPPWQGMPPYPGIEQPPHHPYYQHHAPPPQAHPPYSGHHPVPHEARYRDKRVHDYDMRVDDFLRRTQAVVSGRRSRPRERDRERERDRPRDNRRDRERDRGRDRERERERICDRDRDRGERGRYRR

SEQ ID NO: 2155 - DNA, 383 bp, Homo sapiens
  ref <308>: DATABASE ACCESSION NUMBER: EMBL / BF798521
  ref <309>: DATABASE ENTRY DATE: 2001-08-31
catataacctgggcagcagtccctactgctggatatcctgcctctggtcatcctgtcagccagcctgtgctccagcagcaggatatattcagcagccatcaccacagatgccagcctgttattagcgctccaggccactatcactccagccaacctcagtatcgcccagtcccttctgttcattacaattcacatctaagaccaaccactgccacaacctgcgcagcagacaggttatcaagttatacccaaccagcagaaagaaaccaaggattgactatccccctgagtttcaccagagaccagggtatttaaaggatccacgataccaggaagtggacagacgattttcaggagttcgccgagatgtgtgtacaaatggg

SEQ ID NO: 2156 - protein, 971 aa, Homo sapiens
  ref <308>: DATABASE ACCESSION NUMBER: SWISS-Prot / Q15032
  ref <309>: DATABASE ENTRY DATE: 2002-06-15
MRMSDTVTVKDETATMKDLEAEVKDTTRVENLIKSENYGKILVEKNEHCIENNIDLQEKIQIQLTQSFEKEEKPSKDEAEKEKASDKLPRKMLSRDSSQEYTDSTGIDLHEFLVNTLKNNPRDRMMLLKLEQEILDFIGNNESPRKKFPPMTSYHRMLLHRVAAYFGLDHNVDQSGKSVIVNKTSNTRIPDQKFNEHIKDDKGEDFQKRYILKRDNSSFDKDDNQVRIRLKDDRRSKSIEEREEEYQRARDRIFSQDSLCSQENYIIDKRLQDEDASSTQQRRQIFRVNKDASGRSTNSHQSSTENELKYSEPRPWSSTDSDSSLRNLKPAVTKASSFSGISVLTRGDSSGSSKSIGRLSKTGQPFINPDGSPVVYNPPMTQQPVRSQVPGPPQPPLPAPPQQPAANHIFSQQDNLGSQFSHMSLARQPSADGSDPHAAMFQSTVVLQSPQQSGYIMTAAPPPHPPPPPPPPPPPPPLPPGQPVPTAGYPASGHPVSQPVLQQQGYIQQPSPQMPACYCAPGHYHSSQPQYRPVPSVHYNSHLNQPLPQPAQQTGYQVIPNQQQNYQGIVGVQQPQSQSLVSGQPNSIGNQIQGVVIPYTSVPTYQVSLPQGSQGIPHQTYQQPVMFPNQSNQGSMPTTGMPVYYSVIPPGQQNNLSSSVGYLQHPGSEQVQFPRTTSPCSSQQLQGHQCTAGPPPPPGGGMVMMQLSVPNNPQSCAHSPPQWKQNKYYCDHQRGQKCVEFSSVDNIVQHSPQLSSPIISPAQSPAPAQLSTLKTVRPSGPPLSIMPQFSRPFVPGQGDSRYPLLGQPLQYNPPAVLHGHIPNQQGQPGSRHGNRGRRQAKKAASTDLGAGETVVGKVLEITELPDGITRMEAEKLFGELFKIGAKIRWLRDPQSQPRRHPLCCGSGDNTANPERSKPSDLASTYTVLATFPSISAAQNALKKQINSVNKFKLRTSKKHYDFHILERASSQ

SEQ ID NO: 2157 - DNA, 1816 bp, Rattus norvegicus
  ref <308>: DATABASE ACCESSION NUMBER: EMBL / D78308
  ref <309>: DATABASE ENTRY DATE: 2000-04-29
ccccctcggcccgccatgctcctttcggtgccgctcctgcttggcctcctcggcctggctgccgcagaccctgccatctatttcaaagagcagttcttggacggagatgcctggaccaaccgctgggtcgaatccaaacataagtctgattttggcaaattcgtcctcagttctggcaaattctacggggaccaggagaaggataaagggttgcagacaagccaagatgcccgattttacgcgctgtccgccagattcgaacccttcagcaacaagggccagacactggtggtacagttcaccgtgaagcatgagcagaatatcgactgtgggggcggctacgtgaagctgtttccgggtggcttggaccagaaggacatgcatggagactcagaatataacatcatgtttggtccggacatctgcggtcctggcaccaagaaggttcatgtcatctttaactacaagggcaagaacgtgctgatcaacaaggatatccggtgtaaggatgatgaattcacacatctatacacgctgattgtgcggccagacaacacctacgaggtgaaaattgacaacagccaggtggagtcgggctccttggaggatgattgggactttctgccgcccaagaagattaaggatcctgacgctgccaagccagaagactgggatgaacgagccaagattgatgaccccacagattccaagcctgaggactgggacaagccagagcacatccctgaccctgatgctaagaagcctgaggactgggacgaagagatggatggagagtgggaaccaccagtgattcaaaatcctgaatacaagggcgaatggaagccacgtcaaattgacaacccagattacaagggtacctggatacacccagagattgacaatcctgaatactcccccgatgcgaatatctatgcctatgatagttttgctgtactgggcttagacctctggcaggtcaagtctggcacaatttttgacaacttcctcatcaccaatgatgaggcctatgcagaggagtttggcaatgagacctggggtgtcaccaaggctgcagagaagcagatgaaggacaagcaggatgaggagcagaggcttaaggaagaagaagaagacaagaagcgtaaagaggaagaggaggccgaggataaagaggatgaggatgacagagatgaagatgaagatgaagaggatgagaaggaagaagatgaggaggatgccactggccaagccaaggatgagctgtagaggccacaccacctgcctccagggctggactgaggcctgaacaccccgccacagagctggctgctcccaataatgtctctatgagactcaagaacttttcatttttttttcaggcaggttcaggtctggggtggattctgatttttgttcccctgcctccccatcctccccacccccctttttttttactggtgtttgtctttaattcttcagccctcacctcctggcctctcatttttgaatcaacattttttctttctgtccctttctccatctcttggtcactatcctccaactctaggaacaggtatggaggaaaagcctaggcttgagatttcatctgctctcctttctgaatctcagaggagggtaggagaagggggtggtatcttccctccccccagcactgaggaagaatggggctcttcccctttctcccttgcccccaggactgggccatttgtggggcagccagttctagcacagctcacactgagagtgtaagaactacaaacaaaatttctattaaattaagttttgtgtcttccca

SEQ ID NO: 2158 - protein, 416 aa, Rattus norvegicus
  ref <308>: DATABASE ACCESSION NUMBER: SWISS-Prot / P18418
  ref <309>: DATABASE ENTRY DATE: 1997-11-01
MLLSVPLLLGLLGLAAADPAIYFKEQFLDGDAWTNRWVESKHKSDFGKFVLSSGKFYGDQEKDKGLQTSQDARFYALSARFEPFSNKGQTLVVQFTVKHEQNIDCGGGYVKLFPGGLDQKDMHGDSEYNIMFGPDICGPGTKKVHVIFNYKGKNVLINKDIRCKDDEFTHLYTLIVRPDNTYEVKIDNSQVESGSLEDDWDFLPPKKIKDPDAAKPEDWDERAKIDDPTDSKPEDWDKPEHIPDPDAKKPEDWDEEMDGEWEPPVIQNPEYKGEWKPRQIDNPDYKGTWIHPEIDNPEYSPDANIYAYDSFAVLGLDLWQVKSGTIFDNFLITNDEAYAEEFGNETWGVTKAAEKQMKDKQDEEQRLKEEEEDKKRKEEEEAEDKEDEDDRDEDEDEEDEKEEDEEDATGQAKDEL

SEQ ID NO: 2159 - DNA, 275 bp, Homo sapiens
  ref <308>: DATABASE ACCESSION NUMBER: EMBL / AA654394
  ref <309>: DATABASE ENTRY DATE: 2000-03-03
ttttaagacacaaaacttaatttaatagaaattttgtttgtagttcttacactctcagtgtgagctgtgctagaactggctgccccacaagtggcccagtcctgggggcaagggagaaaggggatgagaagagccccattcttcctcagtgcggggggagggaaaacaccacccccttctcctgccctcctctgagatgcaggaaggagagcagatgaaatctcaagcctagggcttctcctctacacccctgttcctagagttggagggtagtg

SEQ ID NO: 2160 - protein, 417 aa, Homo sapiens
  ref <308>: DATABASE ACCESSION NUMBER: Refseq / NP_004334
  ref <309>: DATABASE ENTRY DATE: 2000-11-01
MLLSVPLLLGLLGLAVAEPAVYFKEQFLDGDGWTSRWIESKHKSDFGKFVLSSGKFYGDEEKDKGLQTSQDARFYALSASFEPFSNKGQTLVVQFTVKHEQNIDCGGGYVKLFPNSLDQTDMHGDSEYNIMFGPDICGPGTKKVHVIFNYKGKNVLINKDIRCKDDEFTHLYTLIVRPDNTYEVKIDNSQVESGSLEDDWDFLPPKKIKDPDASKPEDWDERAKIDDPTDSKPEDWDKPEHIPDPDAKKPEDWDEEMDGEWEPPVIQNPEYKGEWKPRQIDNPDYKGTWIHPEIDNPEYSPDPSIYAYDNFGVLGLDLWQVKSGTIFDNFLITNDEAYAEEFGNETWGVTKAAEKQMKDKQDEEQRLKEEEEDKKRKEEEEAEDKEDDEDKDEDEEDEEDKEEDEEEDVPGQAKDEL

SEQ ID NO: 2161 - DNA, 1816 bp, Rattus norvegicus; identical to SEQ ID NO: 2157
  ref <308>: DATABASE ACCESSION NUMBER: EMBL / D78308
  ref <309>: DATABASE ENTRY DATE: 2000-04-29

SEQ ID NO: 2162 - protein, 416 aa, Rattus norvegicus; identical to SEQ ID NO: 2158
  ref <308>: DATABASE ACCESSION NUMBER: SWISS-Prot / P18418
  ref <309>: DATABASE ENTRY DATE: 1997-11-01

SEQ ID NO: 2163 - DNA, 275 bp, Homo sapiens; identical to SEQ ID NO: 2159
  ref <308>: DATABASE ACCESSION NUMBER: EMBL / AA654394
  ref <309>: DATABASE ENTRY DATE: 2000-03-03

SEQ ID NO: 2164 - protein, 417 aa, Homo sapiens; identical to SEQ ID NO: 2160
  ref <308>: DATABASE ACCESSION NUMBER: Refseq / NP_004334
  ref <309>: DATABASE ENTRY DATE: 2000-11-01

SEQ ID NO: 2165 - DNA, 3560 bp, Rattus norvegicus
  ref <308>: DATABASE ACCESSION NUMBER: EMBL / D78588
  ref <309>: DATABASE ENTRY DATE: 1999-01-21
ggagcggaggctgcttccccggcacctgggagtgggtcgcggggacgcgaaggcacagggcgggcggacgcgccttcgccatgagcttggcggcggtgcggaccgggcgtgctgagctccggccgccggcccggcatgggcgtctcccgcgagcccgctgccggccggggctagggccggatggagccgcgggaccccagccccgaggcccggagcagcgactcggagtcggcctccgcctcgtccagcggctccgagcgcgacgcggatccggagccggacaaggctccgcggcgcttaaccaagaggcgcttcccggggctgcggctctttgggcacaggaaagccatcaccaagtcgggcctccagcacctggcaccccctcctcccacgcctggggccccgtgcggtgaatctgagcggcagatccggagtactgtggactggagtgagtcagcagcgtatggggagcacatctggtttgagaccaacgtgtccggagatttctgctatgtcggggagcagtactgtgtagctaagatgctgccgaagtcagcgcccagaagaaagtgtgcagcctgtaagatcgtggtgcataccccttgcatcgggcagctggaaaagatcaatttccgctgtaagccatccttccgtgaatcaggctccaggaatgtccgtgagccaaccttcgtaagacaccactgggtccacaggcgacgccaggatggcaagtgtcggcactgtgggaagggcttccagcagaagttcaccttccacagcaaagagatcgtagctatcagctgttcctggtgcaaacaggcgtaccacagcaaggtgtcctgcttcatgctgcagcagattgaggagccctgttccctaggggtgcatgcagccgtggtcatcccacccacctggatcctacgggcccggaggccccagaacaccctcaaggccagcaagaagaaaaagagagcatccttcaaaaggagatccagtaagaaaggacctgaggaaggccgctggagacccttcatcatcaggcccaccccgtcccccctcatgaagcccctgctagtgtttgtaaaccccaagagtgggggtaaccagggcgctaagatcatccagtcttttctgtggtatctgaacccccggcaagtcttcgatctgagccagggaggacccagggaagcgctggaaatgtaccgcaaagtccataatttgaggattctggcttgcgggggtgatggcacggttggctggattctttccaccctagaccagctgcgcttaaaaccaccacctcctgtggccatcctgcccctgggcactggcaatgacctggcccgaactctcaactggggtgggggttacacagatgagccagtgtcaaagatcctttcccatgtagaggaggggaacgtggtacagctggaccgttgggacctccgagcagagcccaaccctgaggcagggcctgaggagcgagatgacggagccactgaccggctgcccctggatgtcttcaacaactacttcagtctgggctttgatgcccacgtcaccctggagtttcatgagtctcgagaagccaacccagagaagttcaacagccgctttcggaataagatgttctatgctgggacagccttctctgacttcctgatgggcagctccaaggacttagccaagcacatccgagtagtgtgtgacggaatggacctaacccccaagattcaggacctgaaaccgcagtgcatagtctttctgaatatccccaggtactgtgcaggcaccatgccctggggccaccctggggagcaccatgacttcgagccccagaggcacgatgatggctacctcgaggtcatcggcttcaccatgacatccttggccgcattgcaggtgggtggacacggcgagcggctgacccagtgccgagaagtgctgctcaccactgccaaggccatccctgtgcaggtggatggtgaaccctgcaagcttgcagcatcgcggattcgaattgccctgcgcaaccaggccactatggtgcagaaggccaagcgccggagtactgccccactgcacagcgatcagcagccagttcctgagcagctgaggatccaagtgagcagggtcagcatgcacgactacgaggctctccattatgacaaggagcagctcaaggaggcctctgtgcctctgggtactgtggtggtccccggagacagtgacctagagctctgccgagcccacattgagagactccagcaggagcccgatggggctggagccaagtcccccatgtgccacccactgtcctccaagtggtgtttcctggacgccaccactgccagccgcttctacaggatcgacagggcccaggagcacctcaactatgtgacggagattgcccaggatgagatttatatcctagacccagagctgctgggtgcatcagcccgacctgacctccctacccctacctccccgctccctgcctccccctgctcccctacacccgggtcactgcagggggatgccgcactgccccaaggtgaagagctgattgaagctgccaagaggaatgacttctgcaagctccaggaactacaccgagcaggaggtgacctcatgcaccgcgaccatcagagccgcacactcctgcaccacgcagtcagcactggcagtaaggaagtggtccgctatctgctcgatcatgcaccaccagagatcctcgatgctgtggaggagaacggggagacctgtctacaccaggcagccgccctaggtcagcgcaccatctgccactacattgtggaagccggggcctccctcatgaagacagatcagcagggcgacactcccaggcagcgagctgagaaggctcaagacacagagctagctgcatacctggagaacagacaacattaccagatgatccaacgtgaggaccaggagacagctgtgtagttaaggggaccatggatcaacgagggacactaccagaggactagagctctccttgcccatctcactgccacattcctgtcagatggctatggggggaccctgtcacagggaaggagccccgtgccaccccctgagaagccgttcagatctagggctggactctaaggagctggactctcacctgtccctggtttcatggggaacaggaaacaagctgggctgactgggtccctcccttcaggcggcctccccctcaccacagctgatggaatggctggacagctcagtcagggaggcctgctctcagcaggactttctaaagccacctgatcccttgggctctttggaaggttctgggtgcctagccctcctctctgacccacacaccttgggcatcccagaaactcaagagcctgctgtatttgcctgcccgctgccctgcttggcacctaccctggtgatcctcctcatgcacccagtcatttcatttccgactgtatggcctggggtggggggtggggctcccacggtgacttgtttacagctgggtgtgactcagtaaagtgaagtttttttccttaaaaaaagcg

SEQ ID NO: 2166 - protein, 929 aa, Rattus norvegicus
  ref <308>: DATABASE ACCESSION NUMBER: SWISS-Prot / O08560
  ref <309>: DATABASE ENTRY DATE: 2002-06-15
MEPRDPSPEARSSDSESASASSSGSERDADPEPDKAPRRLTKRRFPGLRLFGHRKAITKSGLQHLAPPPPTPGAPCGESERQIRSTVDWSESAAYGEHIWFETNVSGDFCYVGEQYCVAKMLPKSAPRRKCAACKIVVHTPCIGQLEKINFRCKPSFRESGSRNVREPTFVRHHWVHRRRQDGKCRHCGKGFQQKFTFHSKEIVAISCSWCKQAYHSKVSCFMLQQIEEPCSLGVHAAVVIPPTWILRARRPQNTLKASKKKKRASFKRRSSKKGPEEGRWRPFIIRPTPSPLMKPLLVFVNPKSGGNQGAKIIQSFLWYLNPRQVFDLSQGGPREALEMYRKVHNLRILACGGDGTVGWILSTLDQLRLKPPPPVAILPLGTGNDLARTLNWGGGYTDEPVSKILSHVEEGNVVQLDRWDLRAEPNPEAGPEERDDGATDRLPLDVFNNYFSLGFDAHVTLEFHESREANPEKFNSRFRNKMFYAGTAFSDFLMGSSKDLAKHIRVVCDGMDLTPKIQDLKPQCIVFLNIPRYCAGTMPWGHPGEHHDFEPQRHDDGYLEVIGFTMTSLAALQVGGHGERLTQCREVLLTTAKAIPVQVDGEPCKLAASRIRIALRNQATMVQKAKRRSTAPLHSDQQPVPEQLRIQVSRVSMHDYEALHYDKEQLKEASVPLGTVVVPGDSDLELCRAHIERLQQEPDGAGAKSPMCHPLSSKWCFLDATTASRFYRIDRAQEHLNYVTEIAQDEIYILDPELLGASARPDLPTPTSPLPASPCSPTPGSLQGDAALPQGEELIEAAKRNDFCKLQELHRAGGDLMHRDHQSRTLLHHAVSTGSKEVVRYLLDHAPPEILDAVEENGETCLHQAAALGQRTICHYIVEAGASLMKTDQQGDTPRQRAEKAQDTELAAYLENRQHYQMIQREDQETAV

SEQ ID NO: 2167 - DNA, 3490 bp, Homo sapiens
  ref <308>: DATABASE ACCESSION NUMBER: EMBL / U51477
  ref <309>: DATABASE ENTRY DATE: 1999-06-30
gcggcgcggagcgggcgtgctgagccccggccgccggcccggcatgggcgtctcccgcgggccctccgccggccggggctagggccggatggagccgcgggacggtagccccgaggcccggagcagcgactccgagtcggcttccgcctcgtccagcggctccgagcgcgacgccggtcccgagccggacaaggcgccgcggcgactcaacaagcggcgcttcccggggctgcggctcttcgggcacaggaaagccatcaccaagtcgggcctccagcacctggccccccctccgcccacccctggggccccgtgcagcgagtcagagcggcagatccggagtacagtggactggagcgagtcagcgacatatggggagcacatctggttcgagaccaacgtgtccggggacttctgctacgttggggagcagtactgtgtagccaggatgctgaagtcagtgtctcgaagaaagtgcgcagcctgcaagattgtggtgcacacgccctgcatcgagcagctggagaagataaatttccgctgtaagccgtccttccgtgaatcaggctccaggaatgtccgcgagccaacctttgtacggcaccactgggtacacagacgacgccaggacggcaagtgtcggcactgtgggaagggattccagcagaagttcaccttccacagcaaggagattgtggccatcagctgctcgtggtgcaagcaggcataccacagcaaggtgtcctgcttcatgctgcagcagatcgaggagccgtgctcgctgggggtccacgcagccgtggtcatcccgcccacctggatcctccgcgcccggaggccccagaatactctgaaagcaagcaagaagaagaagagggcatccttcaagaggaagtccagcaagaaagggcctgaggagggccgctggagacccttcatcatcaggcccaccccctccccgctcatgaagcccctgctggtgtttgtgaaccccaagagtgggggcaaccagggtgcaaagatcatccagtctttcctctggtatctcaatccccgacaagtcttcgacctgagccagggagggcccaaggaggcgctggagatgtaccgcaaagtgcacaacctgcggatcctggcgtgcgggggcgacggcacggtgggctggatcctctccaccctggaccagctacgcctgaagccgccaccccctgttgccatcctgcccctgggtactggcaacgacttggcccgaaccctcaactggggtgggggctacacagatgagcctgtgtccaagatcctctcccacgtggaggaggggaacgtggtacagctggaccgctgggacctccacgctgagcccaaccccgaggcagggcctgaggaccgagatgaaggcgccaccgaccggttgcccctggatgtcttcaacaactacttcagcctgggctttgacgcccacgtcaccctggagttccacgagtctcgagaggccaacccagagaaattcaacagccgctttcggaataagatgttctacgccgggacagctttctctgacttcctgatgggcagctccaaggacctggccaagcacatccgagtggtgtgtgatggaatggacttgactcccaagatccaggacctgaaaccccagtgtgttgttttcctgaacatccccaggtactgtgcgggcaccatgccctggggccaccctggggagcaccacgactttgagccccagcggcatgacgacggctacctcgaggtcattggcttcaccatgacgtcgttggccgcgctgcaggtgggcggacacggcgagcggctgacgcagtgtcgcgaggtggtgctcaccacatccaaggccatcccggtgcaggtggatggcgagccctgcaagcttgcagcctcacgcatccgcatcgccctgcgcaaccaggccaccatggtgcagaaggccaagcggcggagcgccgcccccctgcacagcgaccagcagccggtgccagagcagttgcgcatccaggtgagtcgcgtcagcatgcacgactatgaggccctgcactacgacaaggagcagctcaaggaggcctctgtgccgctgggcactgtggtggtcccaggagacagtgacctagagctctgccgtgcccacattgagagactccagcaggagcccgatggtgctggagccaagtccccgacatgccagaaactgtcccccaagtggtgcttcctggacgccaccactgccagccgcttctacaggatcgaccgagcccaggagcacctcaactatgtgactgagatcgcacaggatgagatttatatcctggaccctgagctgctgggggcatcggcccggcctgacctcccaacccccacttcccctctccccacctcaccctgctcacccacgccccggtcactgcaaggggatgctgcaccccctcaaggtgaagagctgattgaggctgccaagaggaacgacttctgtaagctccaggagctgcaccgagctgggggcgacctcatgcaccgagacgagcagagtcgcacgctcctgcaccacgcagtcagcactggcagcaaggatgtggtccgctacctgctggaccacgcccccccagagatccttgatgcggtggaggaaaacggggagacctgtttgcaccaagcagcggccctgggccagcgcaccatctgccactacatcgtggaggccggggcctcgctcatgaagacagaccagcagggcgacactccccggcagcgggctgagaaggctcaggacaccgagctggccgcctacctggagaaccggcagcactaccagatgatccagcgggaggaccaggagacggctgtgtagcgggccgcccacgggcagcaggagggacaatgcggccaggggacgagcgccttccttgcccacctcactgccacattccagtgggacggccacggggggacctaggccccagggaaagagccccatgccgccccctaaggagccgcccagacctagggctggactcaggagctgggggggcctcacctgttcccctgaggaccccgccggacccggaggctcacagggaacaagacacggctgggttggatatgcctttgccggggttctggggcagggcgctccctggccgcagcagatgccctcccaggagtggaggggctggagagggggaggccttcgggaagaggcttcctgggccccctggtcttcggccgggtccccagcccccgctcctgccccaccccacctcctccgggcttcctcccggaaactcagcgcctgctgcacttgcctgccctgccttgcttggcacccgctccggcgaccctccccgctcccctgtcatttcatcgcggactgtgcggcctgggggtggggggcgggactctcacggtgacatgtttacagctgggtgtgactcagtaaagtggatttttttttctttaaaaaaaa

SEQ ID NO: 2168 - protein, 1117 aa, Homo sapiens [sequence omitted]

SEQ ID NO: 2169 - DNA, 3560 bp, Rattus norvegicus; identical to SEQ ID NO: 2165
  ref <308>: DATABASE ACCESSION NUMBER: EMBL / D78588
  ref <309>: DATABASE ENTRY DATE: 1999-01-21

SEQ ID NO: 2170 - protein, 929 aa, Rattus norvegicus; identical to SEQ ID NO: 2166
  ref <308>: DATABASE ACCESSION NUMBER: SWISS-Prot / O08560
  ref <309>: DATABASE ENTRY DATE: 2002-06-15

SEQ ID NO: 2171 - DNA, 3490 bp, Homo sapiens; identical to SEQ ID NO: 2167
  ref <308>: DATABASE ACCESSION NUMBER: EMBL / U51477
  ref <309>: DATABASE ENTRY DATE: 1999-06-30

SEQ ID NO: 2172 - protein, 1117 aa, Homo sapiens [sequence omitted]

SEQ ID NO: 2173 - DNA, 892 bp, Rattus norvegicus
  ref <308>: DATABASE ACCESSION NUMBER: EMBL / D78613
  ref <309>: DATABASE ENTRY DATE: 1999-01-21
atggagcccttgtgtccactcctgttggcaagttttagcttgtcgcttgccacagctggccagggcaacgacaccaccccaacagagagcaactggaccagtacaactgcaggccctccggaccctggcacgtcccagccgctgcttacctggctgctgctgcctctgctcctcctcctgttcctccttgcagcctacttcttcaggttcaggaagcagaggaaagccgtggtcaacagcaacgacaagaagatgcctaacgggatcctagaagaacaagagcagcagagagtgatgctactgagcagatctccatcgggtcccaagaagtacttccccatccctgtggagcacctggaggaggagatccgggtgagatctgcggatgactgcaagcggttccgagaggagttcaattcattgccatccggacacatacaaggaacctttgaactagcaaataaagaagaaaacagagaaaaaaacagataccccaacattctgcccaatgatcattgcagagtgattttgagccaattggatggaatcccctgctctgactacattaatgcttcctacatagatggctacaaagaaaagaacaaattcatagcagctcaaggccccaagcaggagacagtgaatgacttctggagaatggtctgggagcaaaggtcagccaccattgtcatgttgacgaacctgaaggaaaggaaggaggagaagtgctaccagtactggccagaccagggctgttggacttatgggaacatccgggtgtgtgtagaggactgcgtggtcctggtggattacaccatccgcaagttctgcatccatccgcaactccccgacagctgcaaagctccacggctggtctcacagctgcacttca

SEQ ID NO: 2174 - protein, 297 aa, Rattus norvegicus
  ref <308>: DATABASE ACCESSION NUMBER: SWISS-Prot / BAA11433
  ref <309>: DATABASE ENTRY DATE: 2002-03-01
MEPLCPLLLASFSLSLATAGQGNDTTPTESNWTSTTAGPPDPGTSQPLLTWLLLPLLLLLFLLAAYFFRFRKQRKAVVNSNDKKMPNGILEEQEQQRVMLLSRSPSGPKKYFPIPVEHLEEEIRVRSADDCKRFREEFNSLPSGHIQGTFELANKEENREKNRYPNILPNDHCRVILSQLDGIPCSDYINASYIDGYKEKNKFIAAQGPKQETVNDFWRMVWEQRSATIVMLTNLKERKEEKCYQYWPDQGCWTYGNIRVCVEDCVVLVDYTIRKFCIHPQLPDSCKAPRLVSQLHF

SEQ ID NO: 2175 - DNA, 1952 bp, Rattus norvegicus
  ref <308>: DATABASE ACCESSION NUMBER: EMBL / D82074
  ref <309>: DATABASE ENTRY DATE: 1999-01-21
gcggcacgagcgcccacgcagaaggcaaggtgtcccgaggctccagggttatgagatcgtcactattcagaaccttttaacaacaggaagtggaaacatgaccaaatcatacagcgagagcgggctgatgggcgagcctcagccccaaggtcccccaagctggacagacgagtgcctcagttctcaggacgaggaacacgaggcagacaagaaggaggatgagcttgaagccatgaatgcagaggaggactctctgagaaacgggggagaggaggaggatgaagatgaggatctggaagaggaggaagaggaggaggaagaggaggatgatcaaaagcccaagagacggggccccaaaaagaaaaagatgaccaaggcgcgcctagagcgttttaaattaagacgcatgaaggccaatgcccgcgagcggaaccgcatgcacgggctgaatgcggcgctggacaacctgagaaaggtggtaccctgctactctaagacacagaagctgtctaagatagagacactgcgcttggccaagaactatatctgggctctgtcagagatcctgcgctcaggcaaaagcccagacctcgtctcctttgtacagacactctgcaaaggtttgtcccagcccactaccaatttggtggctggctgcttgcagctcaacccccggactttcttgcctgagcagaatccggacatgcccccacacctgccaaccgccagcgcttccttcccggtgcatccctactcctaccagtcccctggactgcccagcccgccctacggcaccatggacagctcccatgtcttccacgtcaagccgccgccacacgcctacagcgcagccctggagcccttctttgaaagccccctaactgattgcaccagcccttcctttgacggacccctcagcccgccgctcagcatcaatggcaacttctctttcaaacacgaaccatccaccgagtttgaaaaaaattatgcctttaccatgcactaccctgcagcgaccctggcagggccccaaagccacggatcaatcttctcctcgggtgccgctgctcctcgctgtgagatccccatagacaatattatgtctttcgatagccattcgcatcatgagcgagtcatgagtgcccagcttaatgccatctttcacgattagaggcacgtcagtttcaccattcccgggaaacgaatccactgtgcttacagtgactgtcctgtttacagaaggcagcccttttgataacattgctgcaaagtgcaaatactcgaagcttcaagggatatatgtatttattgtcgttactgcctttggaagaaacaggggatcaaagttcctgttcaccttatctattgttttctatagctcttctattttaaaaaataatagtacagtaaagtaaaaaaggaaaatgtgtaccacgaatttcgtgtagctgtattcagatcgtattaattatctgatcgggataaaaaaaatcaagcaataattaggatctatgcaatttttaaactagtaatgggccaattaaagtatatataaatatatatttttcaaccagcattttactacttgttacctttcccatgccgaattattttgttgtgattttgtacagaatttttaatgactttttataacgtggatttcctattttaaaaccatgcagcttcatcaatttttatacatatcagaaaagtagaattatatctaatttatacaaaaataatttaactaatttaaaccagcagaaaagtgcttagaaagttattgcgttgccttagcacttctttcttctctaattgtaaaaaaaaaaaaatagaaaagaaaagagaaaaacaacaaattgcacaatttgagcaattcatctcactttaaagtctttccctctccctaaagtagaaaccagacccataacactcaagaggaaaaaaaaaaa

SEQ ID NO: 2176 - protein, 357 aa, Rattus norvegicus
  ref <308>: DATABASE ACCESSION NUMBER: SWISS-Prot / BAA11535
  ref <309>: DATABASE ENTRY DATE: 2002-06-15
MTKSYSESGLMGEPQPQGPPSWTDECLSSQDEEHEADKKEDELEAMNAEEDSLRNGGEEEDEDEDLEEEEEEEEEEDDQKPKRRGPKKKKMTKARLERFKLRRMKANARERNRMHGLNAALDNLRKVVPCYSKTQKLSKIETLRLAKNYIWALSEILRSGKSPDLVSFVQTLCKGLSQPTTNLVAGCLQLNPRTFLPEQNPDMPPHLPTASASFPVHPYSYQSPGLPSPPYGTMDSSHVFHVKPPPHAYSAALEPFFESPLTDCTSPSFDGPLSPPLSINGNFSFKHEPSTEFEKNYAFTMHYPAATLAGPQSHGSIFSSGAAAPRCEIPIDNIMSFDSHSHHERVMSAQLNAIFHD

SEQ ID NO: 2177 - DNA, 2502 bp, Homo sapiens
cggccacgacacgaggaattcgcccacgcaggaggcgcggcgtccggaggccccagggttatgagactatcactgctcaggacctactaacaacaaaggaaatcgaaacatgaccaaatcgtacagcgagagtgggctgatgggcgagcctcagccccaaggtcctccaagctggacagacgagtgtctcagttctcaggacgaggagcacgaggcagacaagaaggaggacgacctcgaaaccatgaacgcagaggaggactcactgaggaacgggggagaggaggaggacgaagatgaggacctggaagaggaggaagaagaggaagaggaggatgacgatcaaaagcccaagagacgcggccccaaaaagaagaagatgactaaggctcgcctggagcgttttaaattgagacgcatgaaggctaacgcccgggagcggaaccgcatgcacggactgaacgcggcgctagacaacctgcgcaaggtggtgccttgctattctaagacgcagaagctgtccaaaatcgagactctgcgcttggccaagaactacatctgggctctgtcggagatcctgcgctcaggcaaaagcccagacctggtctccttcgttcagacgctttgcaagggcttatcccaacccaccaccaacctggttgcgggctgcctgcaactcaatcctcggacttttctgcctgagcagaaccaggacatgcccccccacctgccgacggccagcgcttccttccctgtacacccctactcctaccagtcgcctgggctgcccagtccgccttacggtaccatggacagctcccatgtcttccacgttaagcctccgccgcacgcctacagcgcagcgctggagcccttctttgaaagccctctgactgattgcaccagcccttcctttgatggacccctcagcccgccgctcagcatcaatggcaacttctctttcaaacacgaaccgtccgccgagtttgagaaaaattatgcctttaccatgcactatcctgcagcgacactggcaggggcccaaagccacggatcaatcttctcaggcaccgctgcccctcgctgcgagatccccatagacaatattatgtccttcgatagccattcacatcatgagcgagtcatgagtgcccagctcaatgccatatttcatgattagaggcacgccagtttcaccatttccgggaaacgaacccactgtgcttacagtgactgtcgtgtttacaaaaggcagccctttgggtactactgctgcaaagtgcaaatactccaagcttcaagtgatatatgtatttattgtcattactgcctttggaagaaacaggggatcaaagttcctgttcaccttatgtattattttctatagctcttctatttaaaaaataaaaaaatacagtaaagtttaaaaaatacaccacgaatttggtgtggctgtattcagatcgtattaattatctgatcgggataacaaaatcacaagcaataattaggatctatgcaatttttaaactagtaatgggccaattaaaatatatataaatatatatttttcaaccagcattttactacttgttacctttcccatgctgaattattttgttgtgattttgtacagaatttttaatgactttttataatgtggatttcctattttaaaaccatgcagcttcatcaatttttatacatatcagaaaagtagaattatatctaatttatacaaaataatttaactaatttaaaccagcagaaaagtgcttagaaagttattgtgttgccttagcacttctttcctctccaattgtaaaaaaaaaaaaaaaaaaaaaaaaaaaaaaaaaattgcacaatttgagcaattcatttcactttaaagtctttccgtctccctaaaataaaaaccagaatcataattttcaagagaagaaaaaattaagagatacattccctatcaaaacatatcaattcaacacattacttgcacaagcttgtatatacatattataaataaatgccaacatacccttctttaaatcaaaagctgcttgactatcacatacaatttgcactgttactttttagtcttttactcctttgcattccatgattttacagagaatctgaagctattgatgtttccagaaaatataaatgcatgattttatacatagtcacaaaaatggtggtttgtcatatattcatgtaataaatctgagcctaaatctaatcaggttgttaatgttgggatttatatctatagtagtcaattagtacagtagcttaaataaattcaaaccatttaattcataattagaacaatagctattgcatgtaaaatgcagtccagaataagtgctgtttgagatgtgatgctggtaccactggaatcgatctgtactgtaattttgtttgtaatcctgtatattatggtgtaatgcacaatttagaaaacattcatccagttgcaataaaatagtattgaaagtg

SEQ ID NO: 2178 - protein, 356 aa, Homo sapiens
MTKSYSESGLMGEPQPQGPPSWTDECLSSQDEEHEADKKEDDLETMNAEEDSLRNGGEEEDEDEDLEEEEEEEEEDDDQKPKRRGPKKKKMTKARLERFKLRRMKANARERNRMHGLNAALDNLRKVVPCYSKTQKLSKIETLRLAKNYIWALSEILRSGKSPDLVSFVQTLCKGLSQPTTNLVAGCLQLNPRTFLPEQNQDMPPHLPTASASFPVHPYSYQSPGLPSPPYGTMDSSHVFHVKPPPHAYSAALEPFFESPLTDCTSPSFDGPLSPPLSINGNFSFKHEPSAEFEKNYAFTMHYPAATLAGAQSHGSIFSGTAAPRCEIPIDNIMSFDSHSHHERVMSAQLNAIFHD

SEQ ID NO: 2179 - DNA, 1621 bp, Rattus norvegicus
  ref <308>: DATABASE ACCESSION NUMBER: EMBL / D82928
  ref <309>: DATABASE ENTRY DATE: 1999-01-21
gtggatcgcccgggagaactgggcccagggctcaggtggagctgccgatgccccgggctgaaaggtgagaccacgctggtgaggctgggacaagaccttgcacctccagacctgggccgagaccacaaggggagccgccaagatgccagaggaaaatatcttcctgttcgtgcctaatcttattggttatgcccggattgttttcgccatcatttccttctactttatgccctgctgccccttcacggcctcctccttctatctactcagcggacttctagacgctttcgatggacacgcagctcgagcccttaatcaaggaacccgatttggggccatgctcgacatgctgacggaccgttgcgccaccatgtgtctcttggtcaacctggccctgctctaccctcgggccactcttctgttccagctcagcatgagcctggacgtggccagtcactggctgcatctgcacagttctgtggtgcgaggcagtgagagccacaagatgattgacctgtctgggaaccctgtgcttcgaatctactatacttccaggcctgctctgttcaccctgtgtgctggaaatgaactcttctactgcctcctgtacctgttcaatttctccgagggaccactagtcggctctgtggggcttttccgaatgggcctctggatcacagctcccattgccctgctcaagtccatcattagtgtcatccacctcgtcacggctgcaaggaacatggctgccctcgatgcagcagaccgcgccaagaagaaatgatcctctcccatccccagctgcccacctgccctgggtatctactgtgccacatggctcctctcctcctaagaggtcccagtgtcatgtctttctcatgtgttctctaacctgctgggattgggggtcaccctctgtttggtgttgtcactgtctttttactcctgataactagacccaacccgtgaccccaaggacctggcactgcaaagcaggaagggtgctcaggaggcccactcatccagccggtgctccaggaggcctgtctgaagactgggtgttgccacatatcctgctggatcagcctggggtctggcctgagactttgggaacttatacgggcaaaggagtcaggctgatgggccaagaaggctggggtaccaggccagggagggaaggggccaagggccaactagatctttcccttaggcaagctcctctatcctgtcctgctctggaaacctccataataaaggggggcaccttcactctttttggatttgtttactttgggacactcttagatgatggcctagggttcaaaggagctgggtaaaaaaaaaagaaatccacctggatgcttttcccacaaaggtggttggctcctccctgtcattccagtgacctcagagaggcctcgaggttcacaagcgttgtcctgcccacctgctctatgtcctggctggccactttcactgtaaccttgatgtttttgaccctcatgagaatgtaagcttcacaagagcagatttagatctttctcgtctctgcctggagtgaaaagtagcctggcatgtggtaactgcttaataaatattcatggaaagatgaaaaaaatac

SEQ ID NO: 2180 - protein, 213 aa, Rattus norvegicus
  ref <308>: DATABASE ACCESSION NUMBER: SWISS-Prot / P70500
  ref <309>: DATABASE ENTRY DATE: 2001-10-16
MPEENIFLFVPNLIGYARIVFAIISFYFMPCCPFTASSFYLLSGLLDAFDGHAARALNQGTRFGAMLDMLTDRCATMCLLVNLALLYPRATLLFQLSMSLDVASHWLHLHSSVVRGSESHKMIDLSGNPVLRIYYTSRPALFTLCAGNELFYCLLYLFNFSEGPLVGSVGLFRMGLWITAPIALLKSIISVIHLVTAARNMAALDAADRAKKK

SEQ ID NO: 2181 - DNA, 1833 bp, Homo sapiens
  ref <308>: DATABASE ACCESSION NUMBER: EMBL / AF014807
  ref <309>: DATABASE ENTRY DATE: 2000-03-03
gaattcggcacgaggcgcggaggaggaggttcccggaagccacgcgcactgggagcagcggcgaccgcagctggaggcccggagcgcctgcggggctggcagaggcgagggaggttgcgggtaggaagggcgggactgcgcgcgccccctgcgtcccgcgcacctcggggccggtccatgctcccgacggctgcgggcttcagcatctggggccaggttggggcggcggggtccagggcgcagtggtgcggccgatgcgccggggccggagctgaaggccgcgctgcggggctgggacagcactggcatctccagagcaggcccggggcagcaagggaggcgccgcgatgccagacgaaaatatcttcctgttcgtgcccaacctcatcggttatgcccggattgtcttcgccatcatttctttctacttcatgccctgctgccccctcacggcctcctccttctacctgctcagcggcctgctggacgctttcgatggacacgctgctcgcgctcttaatcaaggaacccggtttggggccatgctggacatgctgacggaccgctgctccaccatgtgcctgttggtcaacctggccctgctgtaccctggagccacgctgttcttccaaatcagcatgagtttggatgtggccagtcactggctgcacctccacagttctgtggtccgaggcagtgagagtcacaagatgatcgacttgtccgggaatccggtgcttcggatctactacacctcgaggcctgctctgttcaccttgtgtgctgggaatgagctcttctactgcctcctctacctgttccatttctctgagggacctttagttggctctgtgggactgttccggatgggcctctgggtcactgcccccatcgccttgctgaagtcgctcatcagcgtcatccacctgatcacggccgcccgcaacatggctgccctggacgcagcagaccgcgccaagaagaagtgacgctggagccccgggtcctggctgcccacctgccctgggagtcttgctgtgccacacagctccccaccccctgctaggaggtcccagtctcacgccttcctcatgtgttgttctacctgctgggatgggggtcagcctctctttggtgacgtcacgttctctgggatcctgaggacccgggcctcaaatcagggaggatacgcgggaggccccctccatccaggcggtgctcctggggtgccgggaccgggcagtgtcacaccctgcctgctcagtcctggggtccgagatgctagggacgcttgagtgagggaggtggtgtgagggccaggtttcctgaaaggcgggagtcagacctccgcccccagccagagcaagcttggggcaccatgcccaggagggaagaagccatccacagccttccctgtcaccggctcctctgtcctgcctgaccctggtcctggcgggacttcactatttgacttggtttcctttcagatattcttggctcagggcctgggttgagggagcttagggaaggacgtccgtctgggtgcttttcctccagtttgctggctggcttctccgtctacccacagtgacctcacagagaggccctcctgccacccatgctcatgtggtgtccccaccgcccacttgtttgatgtcactgactgtctacatgtatttatattcttgatattttctaccctcactagaatgtaaactccatgaaggcacagacttttcttgttctcttctctatccctagagtaagaccaacttgaacctggcatatagtagctgcttaataaatactcgtctgtcaaaaaaaaaaaaaaaa

SEQ ID NO: 2182 - protein, 213 aa, Homo sapiens
  ref <308>: DATABASE ACCESSION NUMBER: SWISS-Prot / O14735
  ref <309>: DATABASE ENTRY DATE: 2002-06-15
MPDENIFLFVPNLIGYARIVFAIISFYFMPCCPLTASSFYLLSGLLDAFDGHAARALNQGTRFGAMLDMLTDRCSTMCLLVNLALLYPGATLFFQISMSLDVASHWLHLHSSVVRGSESHKMIDLSGNPVLRIYYTSRPALFTLCAGNELFYCLLYLFHFSEGPLVGSVGLFRMGLWVTAPIALLKSLISVIHLITAARNMAALDAADRAKKK

SEQ ID NO: 2183 - DNA, 1621 bp, Rattus norvegicus; identical to SEQ ID NO: 2179
  ref <308>: DATABASE ACCESSION NUMBER: EMBL / D82928
  ref <309>: DATABASE ENTRY DATE: 1999-01-21

SEQ ID NO: 2184 - protein, 213 aa, Rattus norvegicus; identical to SEQ ID NO: 2180
  ref <308>: DATABASE ACCESSION NUMBER: SWISS-Prot / P70500
  ref <309>: DATABASE ENTRY DATE: 2001-10-16

SEQ ID NO: 2185 - DNA, 1833 bp, Homo sapiens; identical to SEQ ID NO: 2181
  ref <308>: DATABASE ACCESSION NUMBER: EMBL / AF014807
  ref <309>: DATABASE ENTRY DATE: 2000-03-03

SEQ ID NO: 2186 - protein, 213 aa, Homo sapiens; identical to SEQ ID NO: 2182
  ref <308>: DATABASE ACCESSION NUMBER: SWISS-Prot / O14735
  ref <309>: DATABASE ENTRY DATE: 2002-06-15

SEQ ID NO: 2187 - DNA, 6857 bp, Rattus norvegicus
  ref <308>: DATABASE ACCESSION NUMBER: EMBL / D83538
  ref <309>: DATABASE ENTRY DATE: 1997-05-30
ttccagaatcgatagtggttcggcccacctctgaaggttccagaatcgatagtggttcggcccacctctgaaggttccagaatcgatagtggttcggcccacctctgaaggttccagaatcgatagtggttcggcccacctctgatggttccagcacctcccgaggtttttatttcaacacagtgctttcactggcccgctccctggctgtgcagagacctgcatccctagagaaggttcaaaattcggcccacctctgaaggttccagaatcgataggctctggttccagcacctcccgaggtttttatttcaacacagtgccttcactggcccgctccctggctgtgcagagacctgcatccttagagaaggttcaaaagctgctgtgcatgtgcccagtagattttcatggaatcttccagctagatgaaagacggagagatgcagtgattgctctgggcatttttctcattgagtctgatcttcagcacaaagattgtattgttccttatcttcttcgacttctcaggggtcttccaaaagtctattgggtagaagaaagcacagctcggaaaggcagaggtaacctcccggttgcagaaagcttcagcttctgcctggtgaccttgctgtctgatgtggcttgcagggacccctcgcttagggatgagattttagaggcacttttgcaggttttacatgtccttctggggatgtgccaggccctggagattcaagagaaagaatacctttgcaagtatgcaatcccatgcctgatagggatctcgaaatcttttggacgttacagcaattcagaagaatctctcctctcaaagctttttcccaaagtccctcctcattccctgagaatccccgaagagctagaaggtgtccgaaggcgttcctttaatgacttccgctccatcctgcccagcaacctgctgactgtctgtcaggagggcacactgaagaggaaaaccagcagtgtgtccagcatctctcaggttagcccagaacgtggcatgccccctcccagctcccctggaggatctgcttttcactattttgaagcctcttgcctgcctgatggaaccaccttggagcccgaatactacttctctaccatcagctccagtttttctgtctctcccctgttcaatggtatcacctataaggagttctatattccactggaaatgcttcgagaactcttaaacttggtaaagaagattgttgaggagcctgttctcaagtccttagatgcagctgtagccagagtgatggaggccaatcccagtgctgacctatactacacgaccttcagtgatcccgtctacctgaccatgttcaagatgcttcgagacactctgtactatatgaaagacttacccacctcctttgtgaaagagatccatgattttgtgttggagcagttcaacatgagccaaggggaactccaaaagattctccatgatgcagacaggatccacagtgagatgagcccactcaaactgcgctgccaagcaaatgctgcctgcgtagacctcatggtgtgggctgtgaaggatgagcagggtgcagaaaacctttgcatcaagctgtctgaaaagctgcagtccaagacatccagcaaggtcatcatcgcccatttgcccttgctgatctgctgcctacagggtctgggccgcctatgtgaacggttcccggtggtggtccactcagtgacaccatctttgagagactttctggtgattccatccccagtgctggtgaagctctataagtaccacagtcagtaccacacagttgctggcagtgatataaaaattagtgtcaccaatgagcattctgagtcaactctgaatgtcttgcccggcaagaagaaccagccatccatgtatgagcagctccgggacatcgccattgacaacatctgcaggtgcctgaaggccggcctcaccgtggaccctgtgatcgtggaggccttcctggccagcctctccaaccggctctatatctcccaggagagcgataaggatgctcacttgattcctgaccataccattcgtgccttgggacacattgcagtggctctgagggataccccaaaggtcatggagccaattctgcagcagaaattttgccagcccccctcacccctcgatgtgctcatcatcgaccagctgggctgcctggttatcactggaaatcaatacatttatcaggaagtgtggaatctcttccaacaaatcagtgtgaaggccagttcagttgtatattcagccaccaaagactacaaagaccatggctacaggcactgctccctcgcagtcatcaatgccctggccaacatcgcagccaacattcaggaggagcaccttgtggatgagctgttgatgaacctgctggaactgtttgtgcagctggggctggaggggaagagagccagtgagagggccagcgagaaggggcccgccctgaaggcttccagcagtgcagggaatttgggagtgctcattcctgtaatagccgtgctcacccgacgattgccacccatcaaagaagctaaacctaggctacaaaagcttttccgagacttctggctctactctgtgctaatgggattcgctgtggaaggctcagggctctggccggaagagtggtatgaaggagtctgtgaaatagcaaccaagtcacctctgcttacctttcccagcaaagagcctcttcgatcagtcctccagtacaactcagccatgaaaaatgatacagtgaccccggctgagctgaatgagctccgaagtaccatcatcaacttgctagatcctcctcctgaggtgtctgccctcatcaacaagctggactttgccatgtccacctatctcttgtctgtgtatcggctggaatacatgagggtgctgcgttctacagatccagatcgcttccaggtaatgttctgctacttcgaggataaagctattcagaaagacaaatctgggatgatgcagtgtgtcatcgctgttgctgacaaagtatttgatgccttcctgaacatgatggcagaaaaagccaagaccaaggagaatgaagaggagttggagcggcatgcccagtttctgctggtgaacttcaaccacattcacaagaggatacgcagagtggctgacaagtacctgtctggtctggtggataagtttccacacttgctctggagtgggactgtgctgaagaccatgttggacatcctgcagaccctgtcactatcactaagtgctgatattcacaaggaccaaccttattatgacattcctgacgccccctatcggatcacggttcctgacacgtatgaagcccgggagagcatcgtgaaagactttgctgcacgctgtgggatgatcctgcaggaagccatgaagtgggcacccacggtcactaagtcccacctgcaggaatatctgaacaagcatcagaactgggtgtcaggactgtcccagcacacgggattggccatggccactgagagcatccttcactttgccggctacaacaagcagaacacaactcttggggtaactcagctcactgagcgcccggcctgtgtgaagaaagactactccaacttcatggcatccttgaatttgcgcaaccgctatgccggcgaggtgcacgggatgattcggttctcaggtgccacaggccagatgtccgacctgaacaaaatgatggtccaggatctgattacagctctggaccacagtcatcctcagcactatacccaagccatgttcaaattgacggccatgctcattagcagcaaagattgtgacccacagctccttcatcatctgtgttggggtcccctccggatgttcaacgagcatggcatggagactgcactagcctgctgggagtggctgctggctggcaagaatggagtggaagtgccgttcatgcgggagatggcaggagcctggcacatgacagtggagcagaagttcggcctcttctctgcagaaacaaaggaagcagaccccctggcagcgtcagaagcaagtcagccacgaccctgtccccctgaagtgacacctcactacatctggattgatttcctggtgcagcggtttgagattgccaagtactgtagctctgaccaggtggagatcttctcaagcctgctgcagcgctccatgtccctccacatcggtggagccagggggagcatgaacaggcatgtggcagccattggaccacgtttcaaactgctgaccctggggctgtccctcctacacgctgatgtggttccaaatgcaaccattcgaaacgtgcttcgagagaagatctactcaacagcctttgactatttcagttgtccaccaaagttccctactcaaggagaaaagaggctgcgtgaagatataagcatcatgattaagttttggactgccatgttctcagataagaagtacctgactgccagccaactcgttcccccagataaccaggacacccgaagcaacttggatataactgtgggctctcgacaacaggctacacagggatggatcaacacataccccctctccagtggcatgtcaactatctccaaaaaatcaggcatgtctaagaaaaccaaccgaggttcccagctgcacaagtactacatgaagcgtaggacgctgctgctgtcactgttggccactgagatcgagcgcctcatcacttggtacaacccgctgtcagccccagagctagagctggaccaggcaggtgagaacagtgttgccaactggaggtccaagtatatcagcctgagtgagaagcagtggaaggacaacgtgaaccttgcctggaccatctctccatacctcgctgtgcagctgccagccaggttcaagaatacagaagccattggaaatgaagtgacccgtctcgttcgcctggacccaggagctgttagtgatgtccctgaagctatcaagttccttgtcacctggcacaccatcgatgctgatgctccagagcttagccatgtgttatgctgggcacccacggacccgcccacgggcctctcctacttctccagcatgtaccccccacaccctctcactgcacagtatggggtgaaagtcctgcggtccttccctccggatgccattctgttctacatcccccagattgtgcaggccctcagatatgacaagatgggctatgtgcgcgagtacattctctgggctgcagccaaatcccagcttctggcacaccagtttatttggaatatgaaaactaacatctaccttgatgaagaagggcaccagaaagaccctgacattggtgaccttctggagcagttagtagaagaaatcacagggtctctatcaggcccagccaaagatttctatcaacgggaatttgatttctttaacaagatcaccaacgtgtcagctatcatcaagccctaccctaaaggcgatgaaagaaagaaggcttgtctgtcagccctgtctgaagtgaaggtgcagcctggctgctacctgcccagcaaccctgaagcaattgtgctagacattgactacaagtcagggacaccaatgcagagtgctgcaaaagcgccgtatcttgccaagtttaaggtgaagcgatgcggagtgagtgaacttgaaaaagaaggtctgcagtgccgctcagacacagaggatgagtgccgcaggcaagaggctgatggcaagaagatctgctggcaagcagccatcttcaaagtgggggatgactgccgacaggacatgctagccctgcagatcatcgaccttttcaagaacatcttccagctggttggcctggacctcttcgtttttccctatcgggtagtggctactgcccctgggtgtggggtgattgagtgcattccagactgtacctcccgagaccagctaggccgccagactgacttcggcatgtatgactactttacacgccagtatggggacgagtctaccttggccttccagcaggcacgctacaactttatcagaagcatggcggcctacagcctcctgctgttcctgctgcagatcaaggacaggcacaacggcaacatcatgctggacaagaagggacacatcatccacatagactttggcttcatgtttgaaagctcaccgggtggcaaccttggctgggagccagacatcaagctgacagacgagatggtgatgattatggggggcaagatggaagccacacccttcaagtggttcatggagatgtgcgtccgaggttatctggctgtgcgcccctatatggatgcagtcgtctccctggttacactcatgttggacacaggcctgccctgtttccgtggccagacaatcaaacttttgaaacacaggttcagcccgaacatgacagagcgggaggctgcaaattttatcatgaagatcatccaaaactgtttcctcagcaacaggagccggacctacgacatgatccagtactaccagaatgatatcccctactgaggagactgtacctgaagccttgagtgtcacagagcagcttgtactgtcaccataagcctgggtgtggaggtgacaggcacatggaacttggatgcacaggtgtgagtctttttcacactggacacattccctatttgttcacccatcttactatgttggtacatgaagtattttcctgtgtaaacatgagaaattgacataaaaaataagaaccctaaaatgtgctacttctgtttgttaggtcaccaagactttgtccttagtcaaaggtaccctttgaatccctggtccttccaactcacacctagcttagtcttgctttgatttggtcctgaggatc

SEQ ID NO: 2188 - protein, 2041 aa, Rattus norvegicus
  ref <308>: DATABASE ACCESSION NUMBER: SWISS-Prot / BAA19614
  ref <309>: DATABASE ENTRY DATE: 2003-02-01
MCPVDFHGIFQLDERRRDAVIALGIFLIESDLQHKDCIVPYLLRLLRGLPKVYWVEESTARKGRGNLPVAESFSFCLVTLLSDVACRDPSLRDEILEALLQVLHVLLGMCQALEIQEKEYLCKYAIPCLIGISKSFGRYSNSEESLLSKLFPKVPPHSLRIPEELEGVRRRSFNDFRSILPSNLLTVCQEGTLKRKTSSVSSISQVSPERGMPPPSSPGGSAFHYFEASCLPDGTTLEPEYYFSTISSSFSVSPLFNGITYKEFYIPLEMLRELLNLVKKIVEEPVLKSLDAAVARVMEANPSADLYYTTFSDPVYLTMFKMLRDTLYYMKDLPTSFVKEIHDFVLEQFNMSQGELQKILHDADRIHSEMSPLKLRCQANAACVDLMVWAVKDEQGAENLCIKLSEKLQSKTSSKVIIAHLPLLICCLQGLGRLCERFPVVVHSVTPSLRDFLVIPSPVLVKLYKYHSQYHTVAGSDIKISVTNEHSESTLNVLPGKKNQPSMYEQLRDIAIDNICRCLKAGLTVDPVIVEAFLASLSNRLYISQESDKDAHLIPDHTIRALGHIAVALRDTPKVMEPILQQKFCQPPSPLDVLIIDQLGCLVITGNQYIYQEVWNLFQQISVKASSVVYSATKDYKDHGYRHCSLAVINALANIAANIQEEHLVDELLMNLLELFVQLGLEGKRASERASEKGPALKASSSAGNLGVLIPVIAVLTRRLPPIKEAKPRLQKLFRDFWLYSVLMGFAVEGSGLWPEEWYEGVCEIATKSPLLTFPSKEPLRSVLQYNSAMKNDTVTPAELNELRSTIINLLDPPPEVSALINKLDFAMSTYLLSVYRLEYMRVLRSTDPDRFQVMFCYFEDKAIQKDKSGMMQCVIAVADKVFDAFLNMMAEKAKTKENEEELERHAQFLLVNFNHIHKRIRRVADKYLSGLVDKFPHLLWSGTVLKTMLDILQTLSLSLSADIHKDQPYYDIPDAPYRITVPDTYEARESIVKDFAARCGMILQEAMKWAPTVTKSHLQEYLNKHQNWVSGLSQHTGLAMATESILHFAGYNKQNTTLGVTQLTERPACVKKDYSNFMASLNLRNRYAGEVHGMIRFSGATGQMSDLNKMMVQDLITALDHSHPQHYTQAMFKLTAMLISSKDCDPQLLHHLCWGPLRMFNEHGMETALACWEWLLAGKNGVEVPFMREMAGAWHMTVEQKFGLFSAETKEADPLAASEASQPRPCPPEVTPHYIWIDFLVQRFEIAKYCSSDQVEIFSSLLQRSMSLHIGGARGSMNRHVAAIGPRFKLLTLGLSLLHADVVPNATIRNVLREKIYSTAFDYFSCPPKFPTQGEKRLREDISIMIKFWTAMFSDKKYLTASQLVPPDNQDTRSNLDITVGSRQQATQGWINTYPLSSGMSTISKKSGMSKKTNRGSQLHKYYMKRRTLLLSLLATEIERLITWYNPLSAPELELDQAGENSVANWRSKYISLSEKQWKDNVNLAWTISPYLAVQLPARFKNTEAIGNEVTRLVRLDPGAVSDVPEAIKFLVTWHTIDADAPELSHVLCWAPTDPPTGLSYFSSMYPPHPLTAQYGVKVLRSFPPDAILFYIPQIVQALRYDKMGYVREYILWAAAKSQLLAHQFIWNMKTNIYLDEEGHQKDPDIGDLLEQLVEEITGSLSGPAKDFYQREFDFFNKITNVSAIIKPYPKGDERKKACLSALSEVKVQPGCYLPSNPEAIVLDIDYKSGTPMQSAAKAPYLAKFKVKRCGVSELEKEGLQCRSDTEDECRRQEADGKKICWQAAIFKVGDDCRQDMLALQIIDLFKNIFQLVGLDLFVFPYRVVATAPGCGVIECIPDCTSRDQLGRQTDFGMYDYFTRQYGDESTLAFQQARYNFIRSMAAYSLLLFLLQIKDRHNGNIMLDKKGHIIHIDFGFMFESSPGGNLGWEPDIKLTDEMVMIMGGKMEATPFKWFMEMCVRGYLAVRPYMDAVVSLVTLMLDTGLPCFRGQTIKLLKHRFSPNMTEREAANFIMKIIQNCFLSNRSRTYDMIQYYQNDIPY

SEQ ID NO: 2189 - DNA, 1787 bp, Homo sapiens
  ref <308>: DATABASE ACCESSION NUMBER: EMBL / AK024034
  ref <309>: DATABASE ENTRY DATE: 2002-08-06
aaaaaattaactgggcatggtggtgggcacctgtagtcccagctactcgggaggctgaggcaggagaatctcttgaacccaggaggcagaggttgcagtgagccaagatcatgccactgcactccagcctggcgacagagcgagactccatttaaaaaaaaaaacaccagggcatctgtaagccactttgggagtcaaaagaatgtagagctgggctggactccttagaagaaagttaagttctgagtgtgggaggaagtgcctgcacccccacatccagacagcccgtcactcctgctgccgaagactgacttgctgattcgggctctgcctccatagtgggggcacagagccagggagagtgcccacaggcccagggatcctgggtgtgggaccagggagaatgcccacaggccccagggcctttttgagcccagggcgctctctgcacaggcctgctacaacttcatccgaagcatggccgcctacagcctcctgctgttcctgctgcagatcaaggacagacacaacggcaacattatgctggacaagaagggccatatcatccacatcggtcagccagccacagcgccaccctcctctcccttcaccccggcacccaggggtggatagggatccccaccccacagagaggagaatgcccaggaccaccctgccaggagtgtcagggtccagctctgaggtccgaactgtcggccaccaagctgttctgctgtagagggtgcctggccccggccccagggagctggggcgagagccgccattgctctgagtcagaagctggagctgggcggagtggggctcgtccaggttcagtgccccagcttggctccttcctccacttcctcccttctctttctctgcctgctgccccaccacccaccccatcactgtctccaagaaaacacaacctgccttttgggggtggagggggtgctcctgttgcagagtccttttccactcctcaaaacagaccactcgtccttgcccgccctggctcctacccagtcacaggcagctctttggtgttttgcagactttggcttcatgtttgaaagctcgccgggcggcaatctcggctgggaacctgacatcaagctgacggatgagatggtgatgatcatggggggcaagatggaggccacacccttcaagtggttcatggagatgtgtgtccaggctacctggctgtgcggccctacatggatgtggtcgtctccctggtcactatcatgttggacacgggcctgccctgttttcgcggccagacaatcaagttcttgaagcacaggtttagccccaacatgactgagcgcgaggctgcaaatttcatcatgaaggtcatccagagctgcttcctcagcaacaggagccggacctacaacatgatccagtactatcagaatgacatcccctactgaggaggggaccttcgagggcctctgccccatgtgcccttgaagctgccccacaatcatggagccctgcgacctacccgccctgccgccacatgcagtggaggagaggcctgtggcccgaagagcctggtagcgcctcctggggcagcacgtgggtggcgcaggcttagtaacgccgtggactgcagcgacaatcagtggatggtgctgtctatgcacaggtgtgagtcctctgtttgcactggacatattccctacctgttttatttcataggtacatgaagtattgtgtataaaaaaagagataagatttaaccaacatcaacaaaataaaaacccaaaatagtg

SEQ ID NO: 2190 - protein, 854 aa, Homo sapiens
  ref <308>: DATABASE ACCESSION NUMBER: SWISS-Prot / P42356
  ref <309>: DATABASE ENTRY DATE: 2002-06-15
MREMAGAWHMTVEQKFGLFSAEIKEADPLAASEASQPKPCPPEVTPHYIWIDFLVQRFEIAKYCSSDQVEIFSSLLQRSMSLNIGGAKGSMNRHVAAIGPRFKLLTLGLSLLHADVVPNATIRNVLREKIYSTAFDYFSCPPKFPTQGEKRLREDISIMIKFWTAMFSDKKYLTASQLVPPDNQDTRSNLDITVGSRQQATQGWINTYPLSSGMSTISKKSGMSKKTNRGSQLHKYYMKRRTLLLSLLATEIERLITWYNPLSAPELELDQAGENSVANWRSKYISLSEKQWKDNVNLAWSISPYLAVQLPARFKNTEAIGNEVTRLVRLDPGAVSDVPEAIKFLVTWHTIDADAPELSHVLCWAPTDPPTGLSYFSSMYPPHPLTAQYGVKVLRSFPPDAILFYIPQIVQALRYDKMGYVREYILWAASKSQLLAHQFIWNMKTNIYLDEEGHQKDPDIGDLLDQLVEEITGSLSGPAKDFYQREFDFFNKITNVSAIIKPYPKGDERKKACLSALSEVKVQPGCYLPSNPEAIVLDIDYKSGTPMQSAAKAPYLAKFKVKRCGVSELEKEGLRCRSDSEDECSTQEADGQKISWQAAIFKVGDDCRQDMLALQIIDLFKNIFQLVGLDLFVFPYRVVATAPGCGVIECIPDCTSRDQLGRQTDFGMYDYFTRQYGDESTLAFQQARYNFIRSMAAYSLLLFLLQIKDRHNGNIMLDKKGHIIHIDFGFMFESSPGGNLGWEPDIKLTDEMVMIMGGKMEATPFKWFMEMCVRGYLAVRPYMDAVVSLVTLMLDTGLPCFRGQTIKLLKHRFSPNMTEREAANFIMKVIQSCFLSNRSRTYDMIQYYQNDIPY

SEQ ID NO: 2191 - DNA, 6857 bp, Rattus norvegicus; identical to SEQ ID NO: 2187
  ref <308>: DATABASE ACCESSION NUMBER: EMBL / D83538
  ref <309>: DATABASE ENTRY DATE: 1997-05-30

SEQ ID NO: 2192 - protein, 2041 aa, Rattus norvegicus; identical to SEQ ID NO: 2188
  ref <308>: DATABASE ACCESSION NUMBER: SWISS-Prot / BAA19614
  ref <309>: DATABASE ENTRY DATE: 2003-02-01

SEQ ID NO: 2193 - DNA, 1787 bp, Homo sapiens; identical to SEQ ID NO: 2189
  ref <308>: DATABASE ACCESSION NUMBER: EMBL / AK024034
  ref <309>: DATABASE ENTRY DATE: 2002-08-06

SEQ ID NO: 2194 - protein, 854 aa, Homo sapiens; identical to SEQ ID NO: 2190
  ref <308>: DATABASE ACCESSION NUMBER: SWISS-Prot / P42356
  ref <309>: DATABASE ENTRY DATE: 2002-06-15

SEQ ID NO: 2195 - DNA, 6857 bp, Rattus norvegicus; identical to SEQ ID NO: 2187
  ref <308>: DATABASE ACCESSION NUMBER: EMBL / D83538
  ref <309>: DATABASE ENTRY DATE: 1997-05-30

SEQ ID NO: 2196 - protein, 2041 aa, Rattus norvegicus; identical to SEQ ID NO: 2188
  ref <308>: DATABASE ACCESSION NUMBER: SWISS-Prot / BAA19614
  ref <309>: DATABASE ENTRY DATE: 2003-02-01

SEQ ID NO: 2197 - DNA, 1787 bp, Homo sapiens; identical to SEQ ID NO: 2189
  ref <308>: DATABASE ACCESSION NUMBER: EMBL / AK024034
  ref <309>: DATABASE ENTRY DATE: 2002-08-06

SEQ ID NO: 2198 - protein, 854 aa, Homo sapiens; identical to SEQ ID NO: 2190
  ref <308>: DATABASE ACCESSION NUMBER: SWISS-Prot / P42356
  ref <309>: DATABASE ENTRY DATE: 2002-06-15

SEQ ID NO: 2199 - DNA, 6857 bp, Rattus norvegicus; identical to SEQ ID NO: 2187
  ref <308>: DATABASE ACCESSION NUMBER: EMBL / D83538
  ref <309>: DATABASE ENTRY DATE: 1997-05-30

SEQ ID NO: 2200 - protein, 2041 aa, Rattus norvegicus; identical to SEQ ID NO: 2188
  ref <308>: DATABASE ACCESSION NUMBER: SWISS-Prot / BAA19614
  ref <309>: DATABASE ENTRY DATE: 2003-02-01

SEQ ID NO: 2201 - DNA, 1787 bp, Homo sapiens; identical to SEQ ID NO: 2189
  ref <308>: DATABASE ACCESSION NUMBER: EMBL / AK024034
  ref <309>: DATABASE ENTRY DATE: 2002-08-06

SEQ ID NO: 2202 - protein, 854 aa, Homo sapiens; identical to SEQ ID NO: 2190
  ref <308>: DATABASE ACCESSION NUMBER: SWISS-Prot / P42356
  ref <309>: DATABASE ENTRY DATE: 2002-06-15

SEQ ID NO: 2203 - DNA, 3123 bp, Rattus norvegicus
  ref <308>: DATABASE ACCESSION NUMBER: EMBL / D83948
  ref <309>: DATABASE ENTRY DATE: 1998-05-29
ggcacgagctcgtgccgcggctgagaggaggcggcactgagtttccttgggagggcaacgcgttgggcgcgtctcccttccccctgtcctcccttttgcctccagtcttggacttggtagttgcatgcattggctcccgtcgaactaacagttctgaaggaggtagtggcgggcggaggtgatgcctgggagccctcccttgacagcccgggccgagaagagtctctgcaggaggtatcacccagactgacagatcatgctgacagcagcaggggaggctgagaagtgaaaggagccagctactgaggaggggctccagtagctcctaaagatcctatcaggacatggagtatgaaagacgaggtggtcgtggtgacagaactggccggtatggagctactgaccgctcacaggacgatggtggagagaaccgcagccgagaccatgattatagagacatggactatcgttcatacccacgagagtatggcagtcaggaaggcaagcatgagtatgacgactcatctgaagagcaaagtgcagagatccgtggccagctgcagtcccatggtgtccaagcacgagaggtccggctgatgcggaacaaatcctcaggtcagagccggggcttcgccttcgtcgagtttagtcacttgcaggacgctacacgatggatggaagccaatcagcattccctcaacatcctgggccagaaggtatccatgcattacagcgaccccaagcccaagatcaatgaggactggctgtgtaataagtgtggtgtccagaacttcaagcgccgagagaagtgcttcaaatgcggtgtgcccaaatcagaagcagagcagaagctaccccttggcactcgactggatcagcaggcactaccgttgggtgggcgggagctaagccagggcctactcccactgccgcagccctaccaggcccagggagtgctgacctcgcaagccttgtcacagggctcagagccaagctccgagaatgccaatgacaccattattttacgcaacctgaacccacacagcactatggattccatcctcggggccctagcaccctatgcggtgctgtcctcttccaatgttcgtgttatcaaggacaagcagacccagctgaaccgaggcttcgccttcatccagctctccaccatcgtggaagcagcccagctgctacagatccttcaggccctacaccctccgctcaccatcgatggcaagaccatcaacgtggagtttgccaagggctctaagagggatatggcctccaatgaaggcagtcgcatcaatgctgcctctgtggccagcactgccattgctgctgcccagtgggcaatctcacaggcctcccagggtggggagagtacctgggctgcccccgaggagccaccagttgactacagctactaccaacaggatgagggctatggcagcagccagggaacagattccctctatgcccatggctaccttaagaataccaagggccctggcatgactgggaccaaaggggacacatctggagcaggtcctgagacctcccttgagggtgggacagactctgtgtcactgcaggctttctctcgagcccagcctggtgctgcccctggactctatcagcaatcagctgaggggagcagtggccagggcactgctaccaacagccagtcatataccatcatgtcacctgctgtgctcaagtctgagctccagagccctactcatcccagctctgccttaccaccggccaccagtcccactgccccagagtcctacagccagtaccctgttcctgatgtctctacttaccaatatgatgagacatctggctactactatgacccccagactggtctatactatgatcccaactcccagtattactacaatgctcagagtcagcagtacctatactgggatggggagcggcggacctacatacctgccttggagcagtctgctgatggacataaggacacaggggcatcatcaaaggagggaaaagagaaaaaagagaagcataagacgaagacggcccaacagattgccaaggacatggagcggtgggcccgcagtctcaacaagcaaaaagaaaacttcaaaaacagcttccagcctattagtgctctacgagatgatgaaaggcgggaatcagccactgcagatgcaggctatgccatccttgagaagaagggagcactagctgaaagacagcacaccagcatggatctcccaaagttggccagtgatgaccgccctagcccacctcgagggctggtggcagcctatagtggagagagtgacagtgaggaggagcaggagcgagggggtcctgagcgggaagaaaagctcacagactggcagaagctagcctgtctgctctgccgccgccagtttcccagcaaggaggcgctcatccggcaccagcagctctctggactccacaagcaaaaccttgagattcatcgacgggcccacttgtcagaaaatgaattggaagcactagaaaagaatgacatggagcaaatgaagtatcgagaccgtgcagctgaacgcagagagaagtatggtatccctgagccaccagagcccaaacggaggaagtacggtggcatatctacagcctctgtggactttgaacagcccactcgggatggattaggcagtgacaacattggtagtcgaatgctccaggccatgggctggaaagaaggcagtggtctgggccgcaagaagcagggcattgtgacacccattgaagcccaaacacgtgttcgaggttctggcctgggtgcccggggaagttcctatggggtcacctcaacagaatcctacaaggagacactgcacaagacaatggtgacccgcttcaatgaagcccagtgaacaactttgaaagcagtttctacagacaaggggtattcatccagggacagagaagatgaggtctggaatggtctgaggaaggctcttctatctaccagcctgctgcccaaccagagaggccctcaccaaattagacttggagttgctgacttttgctgggaaattgggctcaaatcatgtttcttttgtaataaaatctaaaaagcctgcatcttccatt

SEQ ID NO: 2204 - protein, 852 aa, Rattus norvegicus
  ref <308>: DATABASE ACCESSION NUMBER: SWISS-Prot / P70501
  ref <309>: DATABASE ENTRY DATE: 2002-06-15
MEYERRGGRGDRTGRYGATDRSQDDGGENRSRDHDYRDMDYRSYPREYGSQEGKHEYDDSSEEQSAEIRGQLQSHGVQAREVRLMRNKSSGQSRGFAFVEFSHLQDATRWMEANQHSLNILGQKVSMHYSDPKPKINEDWLCNKCGVQNFKRREKCFKCGVPKSEAEQKLPLGTRLDQQALPLGGRELSQGLLPLPQPYQAQGVLTSQALSQGSEPSSENANDTIILRNLNPHSTMDSILGALAPYAVLSSSNVRVIKDKQTQLNRGFAFIQLSTIVEAAQLLQILQALHPPLTIDGKTINVEFAKGSKRDMASNEGSRINAASVASTAIAAAQWAISQASQGGESTWAAPEEPPVDYSYYQQDEGYGSSQGTDSLYAHGYLKNTKGPGMTGTKGDTSGAGPETSLEGGTDSVSLQAFSRAQPGAAPGLYQQSAEGSSGQGTATNSQSYTIMSPAVLKSELQSPTHPSSALPPATSPTAPESYSQYPVPDVSTYQYDETSGYYYDPQTGLYYDPNSQYYYNAQSQQYLYWDGERRTYIPALEQSADGHKDTGASSKEGKEKKEKHKTKTAQQIAKDMERWARSLNKQKENFKNSFQPISALRDDERRESATADAGYAILEKKGALAERQHTSMDLPKLASDDRPSPPRGLVAAYSGESDSEEEQERGGPEREEKLTDWQKLACLLCRRQFPSKEALIRHQQLSGLHKQNLEIHRRAHLSENELEALEKNDMEQMKYRDRAAERREKYGIPEPPEPKRRKYGGISTASVDFEQPTRDGLGSDNIGSRMLQAMGWKEGSGLGRKKQGIVTPIEAQTRVRGSGLGARGSSYGVTSTESYKETLHKTMVTRFNEAQ

SEQ ID NO: 2205 - DNA, 1451 bp, Homo sapiens
  ref <308>: DATABASE ACCESSION NUMBER: EMBL / AK000962
  ref <309>: DATABASE ENTRY DATE: 2002-08-06
tcccttctcgtcgtcgccattttgagctggtgactgtggccggctgggagtaggcggcagtgagtttccctgggagggcagcgcgcttggcgcttctcccctccccccgatctgcctccagtctcggacttggttgttgcgcgctccggctccggctgagctgggagagttggaggaggtggcggcgggcagaggtgatgtctgggagcccttccttgacagcccgggccgagaagagtccctgcgggaagcatcacccaggctggcagatcatggtagcagcagcgggggtggctgggaagtgaaacggagccagcggctgaggaggggccccagcagcccccgaaggccctatcaggacatggagtatgaaagacgtggtggttgtggtgacaggactggccgctatggagccactgaccgctcgcaggatgatggtggggagaaccgcagccgagaccacgactaccgggacatggactaccgttcatatcctcgcgagtatggcagccaggagggcaagcatgactatgacgactcatctgaggagcagagtgcggaggattcctacgaggcctccccgggctccgagactcagcgtaggcggcggcggcggcacaggcttcccccgagacggcgactatcgggaccaggactatcggaccgagcaaggggaggaggaggaggaggaggaggatgaggaggaggaggagaaggccagtaacatcgtcatgctgaggatgctgccacaggcagccactgaggatgacatccgtggccagctgcagtcgcacggcgtgcaagcacgggaggttcggctgatgcggaacaaatcttcagcactccctcaacatcctgggccagaaggtgtcgatgcactacagtgaccccaagcccaagatcaatgaggactggctgtgcaataagtgtggcgtccagagcccaagaggaggaagtacggcggcatatccacagcctctgtagacttcgagcagcctactcgggacgggctgggcagtgacaacattggcagtcggatgctgcaggccatgggctggaaagagggcagcggcctgggccgcaagaagcagggcattgtaacgcctatcgaggcccaaacacgggtgcggggctccggcctgggtgcacggggcagctcctacggggtcacctcaaccgagtcctacaaggagacactgcacaagacaatggtgacccgcttcaacgaggcccagtgagcagcttcaagagcaacttctccacatgttgggtgtccatcctggggcagggcaggacagagtgttggatggctgggacggggccttgctcttgtcggccagcccactccccagccagagagggcttgaccaaatcaaattgaggtggtgacttttgttggaaaattgggctgggatcacgtcctgttttgtaataaaagctgaaaagtctgc

SEQ ID NO: 2206 - protein, 173 aa, Homo sapiens
  misc_feature (1)..(173): Xaa=Unknown amino acid
MKDVVVVVTGLAAMEPLTARRMMVGRTAAETTTTGTWTTVHILASMAARRASMTMTTHLRSRVRRIPTRPPRAPRLSVGGGGGTGFPRDGDYRDQDYRTEQGEEEEEEEDEEEEEKASNIVMLRMLPQAATEDDIRGQLQSHGVQAREVRLMRNKSSALPQHPGPEGVDALQX

SEQ ID NO: 2207 - DNA, 3387 bp, Rattus norvegicus
  ref <308>: DATABASE ACCESSION NUMBER: EMBL / D84346
  ref <309>: DATABASE ENTRY DATE: 1997-05-06
atgtcgcgctccgtgctgcagcccagtcagcagaagctggcggagaagctcaccatcctcaacgaccggggcgtcggcatgctcacgcgcctctacaacatcaagaaggcatgtggagatcccaaggctaaaccatcctaccttattgacaaaaacctggaatctgctgtgaaattcatagtcagaaaatttcctgctgtagaaacacgcaacaacaatcaacagcttgcacaactacagaaagaaaaatcagagattctgaaaaatctggcattatattactttacatttgtagatgttatggaatttaaggaccatgtctgtgacttgctgaatactatcgacgtctgccaagtcttctttgatattactgtgaactttgatttaacaaagaactacttagacttgactgtgacctacacaacattaatgatactgctgtcccggattgaagaaaggaaggccatcattggactgtacaattatgcacatgaaatgacccacggagcaagtgaccgagaatacccacgccttggtcagatgattgtggactatgaacaccctttaaagaagatgatggaagaattcgtaccccacagcaagtctctttcagatgcgctaatttctcttcagatggtgtatcctagacggaatctttcagcagatcagtggaggaatgcccagttgttgagtctcatcagtgcacccagtacaatgcttaatcctgcacagtctgacaccatgccttgtgaatatctctctttggatgcaatggagaaatggattatctttggctttattctgtgccatgggatgctaaataccgaggctacagcactgaacctttggaagctagctcttcagagtagctcctgcctctctctctttcgggatgaagttttccacattcacaaagctgcagaagatttatttgtaaacattcggggctataataaacggattaacgacataagagaatgtaaggaggcggctgtatcccacgctggctcaatgcacagagagagacgcaagtttttacggtctgcactgaaagaactggcaactgtcctctcggatcagcctggcctgcttggtcccaaggcactttttgttttcatggcattatcttttgcccgtgatgaaattatctggctactccgtcatgcagacaacatgccaaagaagagtgcagatgactttatagataagcacattgctgagctgatcttttacatggaggagctcagagcacatgtcaggaagtacgggcctgtcatgcagaggtactacgtgcagtacctctccggcttcgatgctgttgtccttaacgagcttgtgcagaatctctctgtttgccctgaagatgaatcaatcatcatgtcctcctttgttaacaccatgacttccctaagtgtgaaacaagttgaagatggggaagtgtttgatttcagaggaatgagattagattggtttaggttacaggcatacactagtgtctccaaagcttcacttagccttgcagatcaccgagaactcggaaagatgatgaacacaataatattccatacaaagatggtcgattccttggtggaaatgttggtggaaacatccgatctctccatattttgtttttatagccgtgcttttgagaagatgtttcagcagtgcttggagttgccttctcagtcgcgatactccatcgcctttcctctgctctgcactcacttcatgagctgcacacatgagctgtgtcccgaagagcgccatcatataggggatcgtagcctttccctgtgtaatatgttccttgatgagatggccaaacaagctcggaacctcatcactgatatttgcacagaacagtgtactcttagtgaccagttactgccgaagcattgtgccaaaaccatcagtcaagcagtgaataagaagtcaaaaaaacagactggcaagaaaggggaacctgaaagggaaaagccgggtgtcgagagcatgaggaaaaacaggctggtagtgaccaaccttgataagttgcacactgcactttcggagttatgcttctccataaattatgttccaaacatggcagtgtgggaacacaccttcacaccgcgggagtacttgacttctcatctggaaatccgattcactaaatcaattgttggaatgaccatgtataatcaggctacacaggagattgcaaagccatcagaacttctgacaagcgtaagagaatatatgactgtactccagtccatagagaactatgtgcagattgatatcaccagagtatttaataatgtccttcttcagcaaacacaacacttagacagccatggagaaccaaccatcacgagtctgtatacaaactggtacttggaaacgttattaagacaagtcagcaatggccatatagcttattttcctgcaatgaaagcatttgtgaatttacccacagaaaatgaattaacattcaatgcagaggaatactctgatatatcagaaatgaggtcgttgtcagagctcttaggcccatatgggatgaagttcctaagcgagagtcttatgtggcatatttcatcacaagttgctgaacttaagaaacttgtggtggagaatgttgatgttctaacacaaatgaggaccagctttgacaaaccagaccagatggctgcactctttaaaagattatcatctgttgacagtgtcttgaaaaggatgacgataattggtgttattttatccttccggtcactggcacaagaagcactgagagatgttttgtcctaccacattccttttctcgtgagctccattgaggatttcaaggaccacattccacgggaaaccgatatgaaggttgcaatgaatgtgtatgagctgtcatctgctgctggattaccatgcgagattgatcctgccttagtagtagctctttcctcacaaaaatcagagaacattagtccagaagaagaatataagatcgcttgcctcctgatggtctttgtagcagtttccctgcctacactggccagcaatgtgatgtcccagtacagccctgcaatagaaggacactgcaacaatattcattgtctggccaaagcaatcaaccaaattgctgctgctttgtttacaattcacaaaggaagcattgaagacagacttaaagaattcctggcgcttgcgtcctccagtctactgaaaatcggccaagagacagataaaactacaacgagaaatagagaatctgtttatttgctactggatatgattgtacaagaatcaccgttcctgacaatggatctcttggaatcttgttttccttatgtgttgctgagaaatgcataccacgctgtctacaaacaaagtgtcacatcctctgcatag

SEQ ID NO: 2208 - protein, 1128 aa, Rattus norvegicus
  ref <308>: DATABASE ACCESSION NUMBER: SWISS-Prot / P55161
  ref <309>: DATABASE ENTRY DATE: 2001-10-16
MSRSVLQPSQQKLAEKLTILNDRGVGMLTRLYNIKKACGDPKAKPSYLIDKNLESAVKFIVRKFPAVETRNNNQQLAQLQKEKSEILKNLALYYFTFVDVMEFKDHVCDLLNTIDVCQVFFDITVNFDLTKNYLDLTVTYTTLMILLSRIEERKAIIGLYNYAHEMTHGASDREYPRLGQMIVDYEHPLKKMMEEFVPHSKSLSDALISLQMVYPRRNLSADQWRNAQLLSLISAPSTMLNPAQSDTMPCEYLSLDAMEKWIIFGFILCHGMLNTEATALNLWKLALQSSSCLSLFRDEVFHIHKAAEDLFVNIRGYNKRINDIRECKEAAVSHAGSMHRERRKFLRSALKELATVLSDQPGLLGPKALFVFMALSFARDEIIWLLRHADNMPKKSADDFIDKHIAELIFYMEELRAHVRKYGPVMQRYYVQYLSGFDAVVLNELVQNLSVCPEDESIIMSSFVNTMTSLSVKQVEDGEVFDFRGMRLDWFRLQAYTSVSKASLSLADHRELGKMMNTIIFHTKMVDSLVEMLVETSDLSIFCFYSRAFEKMFQQCLELPSQSRYSIAFPLLCTHFMSCTHELCPEERHHIGDRSLSLCNMFLDEMAKQARNLITDICTEQCTLSDQLLPKHCAKTISQAVNKKSKKQTGKKGEPEREKPGVESMRKNRLVVTNLDKLHTALSELCFSINYVPNMAVWEHTFTPREYLTSHLEIRFTKSIVGMTMYNQATQEIAKPSELLTSVREYMTVLQSIENYVQIDITRVFNNVLLQQTQHLDSHGEPTITSLYTNWYLETLLRQVSNGHIAYFPAMKAFVNLPTENELTFNAEEYSDISEMRSLSELLGPYGMKFLSESLMWHISSQVAELKKLVVENVDVLTQMRTSFDKPDQMAALFKRLSSVDSVLKRMTIIGVILSFRSLAQEALRDVLSYHIPFLVSSIEDFKDHIPRETDMKVAMNVYELSSAAGLPCEIDPALVVALSSQKSENISPEEEYKIACLLMVFVAVSLPTLASNVMSQYSPAIEGHCNNIHCLAKAINQIAAALFTIHKGSIEDRLKEFLALASSSLLKIGQETDKTTTRNRESVYLLLDMIVQESPFLTMDLLESCFPYVLLRNAYHAVYKQSVTSSA

SEQ ID NO: 2209 - DNA, 4982 bp, Homo sapiens
  ref <308>: DATABASE ACCESSION NUMBER: EMBL / AB011159
  ref <309>: DATABASE ENTRY DATE: 1998-04-10
gcggcgagcgcctgtcaagcagtgggaggaaaaagcgcttggagccaccagcccactcttaagcgaaactcgcctggaaaacaccccgcctcccagcagagtttctgccggtttctttagaagggtggtgcggaaaagcaacttttgggaacttgaaggagtggggtgtggggcgaagtggaaagagcacacaacgcgaccccactcagtccccgcttgggactcccatcccggcatcaggcgtagtgggcggtccgggccagggccagggccagagcggcggcggcgaggccatgccgagggcccgtcggccgcagttccccgtccggcctcgcgggggcgccggcgctgccgatcaggtgaccgagggcccgttcggggctgcgggaagcggcctcgttctcagccgccggagacgccgccgccgccgccgccgccgccacacctagtggagcagccggggaaggcggctcgttgggggctggggcggagagcgccgggggtgggggcggaagggcggcgggcggaaggcaggaggctgccggggcgcgggctgctgcgggagaaggggctccgaggagtccgccgcggctcgctctgtcgccggcgcgggattggggcgcgagggccatgggcgcgctctcctaaggcggaggtcgcgggcgggaggggaggaggcccgagagaggctgctgcgaaggccgcgggcccgtgactgggcgcgaggcggccggcggcggcggcggcaccagcaccaccatgtcgcgctcagtgctgcagcccagtcagcagaagctggcggagaagctcaccatcctcaacgaccggggcgtcggcatgctcacccgcctctacaacatcaagaagcaaggacaagtttggaaggcatgtggagaccccaaggcaaaaccatcctatcttatcgacaaaaacctggaatctgctgtgaaattcatagtcagaaaattccctgctgtagaaacccgcaacaacaatcaacagcttgcacaactacagaaagaaaaatcagagattctgaaaaatctggcattatattacttcacatttgtagatgttatggaatttaaggaccatgtttgtgaattgctgaatactattgacgtttgccaagtcttctttgatattactgtaaactttgatttaacaaagaactacttagatttaattataacctatacaacactaatgatactgctgtctcgaattgaagaaaggaaggcaatcattggattatacaactatgcccatgaaatgactcatggagcaagtgacagagaatacccacgccttggccagatgattgtggattatgaaaaccctttaaagaagatgatggaagaatttgtaccccatagcaagtctctttcagatgcactaatttctcttcaaatggtatatcctcgaaggaatctttcagctgaccagtggagaaatgcccagttattgagcctcatcagtgcacctagtacaatgcttaatccagcacagtccgacactatgccttgtgaatacctctctttggatgcaatggaaaagtggattatctttggctttattttgtgccatgggatcctaaatactgacgctacagcactgaacctttggaaactagctcttcaaagtagctcttgcctctctctctttcgggatgaagttttccacattcacaaagctgcagaagacttatttgtaaacatacgaggctataataaacgtattaatgacataagagaatgcaaggaggcagccgtgtcacatgctggttcaatgcacagagaaagacgcaagtttttaagatctgcactgaaggaattggctactgtcctctctgatcaacctggattgctaggtcccaaggcactttttgtttttatggcattatcctttgcccgtgatgaaatcatctggctacttcgtcatgcagataacatgccaaagaagagtgcagacgactttatagataagcacattgctgaattaatattttacatggaagaacttagagcacatgtgaggaaatacggacctgtaatgcagaggtattacgtgcagtacctttctggctttgatgctgttgtcctcaatgaactcgtgcagaatctttctgtttgccctgaagatgaatcaatcatcatgtcctcttttgttaacactatgacttccctaagtgtaaaacaagttgaagatggggaagtatttgatttcagaggaatgagattagattggtttaggttacaggcatatactagtgtctcaaaggcttcacttggccttgcagatcacagagaacttggaaagatgatgaatacaataatttttcatacaaaaatggtagattccttggtggaaatgttggtggaaacatcagatctctccatattttgtttttatagtcgtgcttttgagaagatgtttcaacagtgtttggagttaccctctcaatcaagatactcaattgcatttccactactttgcactcattttatgagttgcacgcatgaactatgtccagaagagcgacatcatattggagatcgcagtctttccttatgtaatatgttcctagatgaaatggccaaacaagctcgaaatctcatcactgatatttgcacagaacagtgtacccttagtgaccagttgctacccaagcattgtgccaaaactatcagtcaagcagtgaataagaaatcaaaaaagcagactggtaagaaaggggaacctgaaagggagaaaccaggtgttgagagcatgaggaaaaacaggctggttgtgaccaaccttgataaattgcacactgcactttctgagttatgcttctctataaattatgtaccaaacatggtggtatgggaacatacctttaccccacgagaatatttgacttctcatctggaaatacgctttaccaagtcaattgttgggatgactatgtataatcaagccacacaggaaattgcaaaaccttcagaacttctaacaagtgtaagagcatacatgaccgtactccagtcaatagaaaactatgtgcagattgatattacaagagtatttaataatgtgcttcttcaacaaacacaacatttagacagtcatggagagccaaccattacaagtctatacacaaattggtatttggaaactttgttacgacaagtcagcaatggccatatagcatattttcctgcaatgaaagcgtttgtgaacttacctacagaaaatgaattaacattcaatgcagaggaatattctgacatatcagaaatgaggtcattatcagaactactaggcccatatggtatgaagtttctaagtgaaagccttatgtggcatatttcatcacaagttgctgaacttaagaaacttgtggtggagaatgttgatgtgttaacacaaatgaggaccagctttgacaaaccagaccagatggctgcactgtttaaaagattatcatctgttgacagtgtcttgaagaggatgacaataattggtgtaattttatccttccgatcattggcacaagaagcacttagagatgtgttatcctaccacattccttttcttgtaagttcaattgaagattttaaggatcacattccaagggaaactgatatgaaggttgcaatgaatgtgtatgagttatcatcagctgccggattaccttgtgagattgatcctgcattggtcgtagctctttcttcacaaaaatcggaaaacattagtccagaagaagagtataaaattgcctgccttctcatggtgtttgtggcagtttctttgccaacactggccagtaatgtgatgtctcagtacagccctgctatagaagggcattgcaacaacatacattgcttggccaaagccatcaaccagattgctgcagctttgtttacaattcacaaaggaagcattgaagaccgtcttaaagaatttctggcgcttgcatcctccagtctactgaaaattggccaggagacagataaaactacaacaagaaatagagaatctgtttatttactgctagatatgattgtacaagaatctccattccttacaatggatcttttggaatcttgttttccttatgtcttgctgagaaatgcataccatgctgtctacaaacaaagtgttacatcttctgcataaaattacctacttaatcaagataagcacgcatttttgttgccttggttttacctgtagactgtggaactattttaccttaagacctgaaaaagttttgtggattataaatttctttcatacggttgtattttctgatcattggtttcttaatatggttgtactacagtatacttggttgatttaggttgcacattcactgaattcactgagattattcctataattttaaagtatcatttatttgaaaaacatacattatcaacatgtttttgatatttgataatgaaaaaaatctttgcttgtttatttctgaaaaagaactgtatttagtgattattttagatagtgatattatagcattcatctgtgtgtaaattatttcatatagggaagagttctgatctgtacctatggttcttattgaaaacaacattggatgtgcatttctgtgatgttatgaatacatttctactttattttgaaacatttgccaaactaaatactgtaacactgtataacatttaaaaatgttaaagaactgcttagtattagaagcagatcatttcccaaaattctaagagcagcagcatatgttgttgcttgtataaagcctagcgataatttttagactaacttccatggtgccctgttggcattagcactaccattgtaccctgctgtataataaacaatcttagacatttatcaactgttgatacaaatgttagtccctaaccactttttatatatgttttaaatttttgaaattcaagtgtaccttccataacataaaataaacactagactgtatcacactt

SEQ ID NO: 2210 - protein, 1128 aa, Homo sapiens
  ref <308>: DATABASE ACCESSION NUMBER: SWISS-Prot / Q9Y2A7
  ref <309>: DATABASE ENTRY DATE: 2001-10-16
MSRSVLQPSQQKLAEKLTILNDRGVGMLTRLYNIKKACGDPKAKPSYLIDKNLESAVKFIVRKFPAVETRNNNQQLAQLQKEKSEILKNLALYYFTFVDVMEFKDHVCELLNTIDVCQVFFDITVNFDLTKNYLDLIITYTTLMILLSRIEERKAIIGLYNYAHEMTHGASDREYPRLGQMIVDYENPLKKMMEEFVPHSKSLSDALISLQMVYPRRNLSADQWRNAQLLSLISAPSTMLNPAQSDTMPCEYLSLDAMEKWIIFGFILCHGILNTDATALNLWKLALQSSSCLSLFRDEVFHIHKAAEDLFVNIRGYNKRINDIRECKEAAVSHAGSMHRERRKFLRSALKELATVLSDQPGLLGPKALFVFMALSFARDEIIWLLRHADNMPKKSADDFIDKHIAELIFYMEELRAHVRKYGPVMQRYYVQYLSGFDAVVLNELVQNLSVCPEDESIIMSSFVNTMTSLSVKQVEDGEVFDFRGMRLDWFRLQAYTSVSKASLGLADHRELGKMMNTIIFHTKMVDSLVEMLVETSDLSIFCFYSRAFEKMFQQCLELPSQSRYSIAFPLLCTHFMSCTHELCPEERHHIGDRSLSLCNMFLDEMAKQARNLITDICTEQCTLSDQLLPKHCAKTISQAVNKKSKKQTGKKGEPEREKPGVESMRKNRLVVTNLDKLHTALSELCFSINYVPNMVVWEHTFTPREYLTSHLEIRFTKSIVGMTMYNQATQEIAKPSELLTSVRAYMTVLQSIENYVQIDITRVFNNVLLQQTQHLDSHGEPTITSLYTNWYLETLLRQVSNGHIAYFPAMKAFVNLPTENELTFNAEEYSDISEMRSLSELLGPYGMKFLSESLMWHISSQVAELKKLVVENVDVLTQMRTSFDKPDQMAALFKRLSSVDSVLKRMTIIGVILSFRSLAQEALRDVLSYHIPFLVSSIEDFKDHIPRETDMKVAMNVYELSSAAGLPCEIDPALVVALSSQKSENISPEEEYKIACLLMVFVAVSLPTLASNVMSQYSPAIEGHCNNIHCLAKAINQIAAALFTIHKGSIEDRLKEFLALASSSLLKIGQETDKTTTRNRESVYLLLDMIVQESPFLTMDLLESCFPYVLLRNAYHAVYKQSVTSSA

SEQ ID NO: 2211 - DNA, 1072 bp, Rattus norvegicus
  ref <308>: DATABASE ACCESSION NUMBER: EMBL / D84418
  ref <309>: DATABASE ENTRY DATE: 1997-04-25
ggcacgagggaaggaagtctctctgtggaggtctgagggaagagctcgcgccaggtagacgctgcgccgtcatcatgggcaagggggaccccaacaagccgcggggcaagatgtcctcgtacgccttcttcgtgcagacctgccgggaggagcacaagaagaagcatcccgactcgtcggtcaacttcgccgagttctcgaagaaatgttcggagagatggaagaccatgtctgccaaggaaaagtcgaagtttgaggatttggccaagagcgacaaagctcgttatgacagggagatgaagaactatgttcctcccaaaggtgataagaaaggaaagaaaaaagatccaaatgctcccaagagaccaccgtctgccttcttcctgttttgctctgaacatcgcccaaagatcaaaagtgaacaccccggcctgtctattggagatactgcaaagaaactgggggagatgtggtctgagcaatctgccaaagataaacaaccgtatgagcagaaagcagctaaactaaaggagaagtatgaaaaggatattgctgcataccgtgccaagggcaaaagtgaagtaggaaagaagggtcctggtaggccaacaggctcaaagaagaagaatgaaccagaagatgaggaagaggaggaggaggaagaagatgatgaagatgaagaggaggaagatgaggatgaagaataagtatctgtcctaaagtgtggagtatatgtgctcaggcaattattttgctaagaatgtgaaattcaagtgcagctcaacattagcttcagtataaaaactgtacagatttttgtatagctgatgagattctttgtagagaaaatactttttaaaaagggtttgtagctttttcaggggctacaacgtacagttagatttaaagcttttgatgttgaatgtttctaaatatttaatggtttctttaatttcttatgatagcaaaaaaaaaaacttcataggaatttctattaccagtaaaagaattttttttttaggatgttgcatttttgtttttttttaaaatttgtaataaaataatgtatatt

SEQ ID NO: 2212 - protein, 209 aa, Rattus norvegicus
  ref <308>: DATABASE ACCESSION NUMBER: SWISS-Prot / P52925
  ref <309>: DATABASE ENTRY DATE: 2002-06-15
GKGDPNKPRGKMSSYAFFVQTCREEHKKKHPDSSVNFAEFSKKCSERWKTMSAKEKSKFEDLAKSDKARYDREMKNYVPPKGDKKGKKKDPNAPKRPPSAFFLFCSEHRPKIKSEHPGLSIGDTAKKLGEMWSEQSAKDKQPYEQKAAKLKEKYEKDIAAYRAKGKSEVGKKGPGRPTGSKKKNEPEDEEEEEEEEDDEDEEEEDEDEE

SEQ ID NO: 2213 - DNA, 1066 bp, Homo sapiens
  ref <308>: DATABASE ACCESSION NUMBER: EMBL / Z17240
  ref <309>: DATABASE ENTRY DATE: 1995-07-28
cgggaagagcacaagaagaaacacccggactcttccgtcaatttcgcggaattctccaagaagtgttcggagagatggaagaccatgtctgcaaaggagaagtcgaagtttgaagatatggcaaaaagtgacaaagctcgctatgacagggagatgaaaaattacgttcctcccaaaggtgataagaaggggaagaaaaaggaccccaatgctcctaaaaggccaccatctgccttcttcctgttttgctctgaacatcgcccaaagatcaaaagtgaacaccctggcctatccattggggatactgcaaagaaattgggtgaaatgtggtctgagcagtcagccaaagataaacaaccatatgaacagaaagcagctaagctaaaggagaaatatgaaaaggatattgctgcatatggtgccaagggcaaaagtgaagcaggaaagaagggccctggcaggccaacaggctcaaagaagaagaacgaaccagaagatgaggaggaggaggaggaagaagaagatgaagatgaggaggaagaggatgaagatgaagaataaatggctatcctttaatgatgcgtgtggaatgtgtgtgtgtgctcaggcaattattttgctaagaatgtgaattcaagtgcagctcaatactagcttcagtataaaaactgtacagatttttgtatagctgataagattctctgtagagaaaatacttttaaaaaatgcaggttgtagctttttgatgggctactcatacagttagattttacagcttctgatgttgaatgttcctaaatatttaatggtttttttaatttcttgtgtatggtagcacagcaaacttgtaggatttagtatcaatagtaaattttgggttttttaggatgttgcatttcgtttttttaaaaaaaattttgtaataaaattatgtatattaaaagcagggagcagaatgttaaagaagctcctatttgaccccttgtattttcctagtgaaagcggaggtatttactggttaaaaatatatggaatgggcagggagcagtggctcacacctgaattc

SEQ ID NO: 2214 - protein, 208 aa, Homo sapiens
  ref <308>: DATABASE ACCESSION NUMBER: SWISS-Prot / P26583
  ref <309>: DATABASE ENTRY DATE: 2002-06-15
GKGDPNKPRGKMSSYAFFVQTCREEHKKKHPDSSVNFAEFSKKCSERWKTMSAKEKSKFEDMAKSDKARYDREMKNYVPPKGDKKGKKKDPNAPKRPPSAFFLFCSEHRPKIKSEHPGLSIGDTAKKLGEMWSEQSAKDKQPYEQKAAKLKEKYEKDIAAYRAKGKSEAGKKGPGRPTGSKKKNEPEDEEEEEEEEDEDEEEEDEDEE

SEQ ID NO: 2215 - DNA, 3205 bp, Rattus norvegicus
  ref <308>: DATABASE ACCESSION NUMBER: EMBL / D84667
  ref <309>: DATABASE ENTRY DATE: 1999-01-21
ttactatggcatcggtagtgtcctgacagttcggaaagcaggaaagcaagcgccgagaagaaaggctcgggcccagcggactcttacatcgcaacccatcaaggaattgttattttgggtcctgcaagtggggtccggtccaacttgaggtagcgtgaaggccccttcaggcggcgccgcgggcagccccgcagccggggcctggtgcagccgccgcggccgctgtcagggaagcgcaggcggccaatggaacccgggagcggccgctgctgctgaggcggcggtgtcggcagtccgaccccgaccgcctgcaccccctccgcgagggtcccccggagcttggaagctcgaagtctggctgtagccatgggagacatggtagtggagcctgccaccctgaagccaacttctgagcctactcctagcccatcagggaataacgggggctccctactaagcgtcatcacggagggggtcggggaactgtcagtgattgaccctgaggtggcccagaaggcctgccaggaggtactggagaaagtcaagcttttgcatggaggtgtagccatctctagcaaaggcagcccactggagttggttaatggggatggtgtggacaatgagatccgttgcctagatgatccacctaccgagatcagggaggaagaagatgagatggagcctggtgtggtctctggcacagccaaaggaacaagaagaagacgacagaacaactcagccaaacagtcttggctcctgaggctgtttgaatcaaaactatttgacatctctatggccatttcatacttgtataactccaaggagccgggagtgcaagcctacattggcaaccggctcttctgctttcgcaatgaggatgtggacttctatttgccccagttgcttaacatgtatatccatatggatgaggatgtgggtgatgccattaaaccctacatagtccaccgttgtcgccagagcatcaacttttccctccagtgtgccctgttgcttggggcctactcttcagacatgcacatttccactcaacgacactcccgagggaccaagttacggaagctaatcctctcagatgagctgaagccagctcaccgaaagagggagctgccaactttaagcccagcccctgacacaggactgtctccctctaaaaggactcaccagcgctctaagtcagatgccacggccagcataagtctcagcagcaacctgaaacgaacagccagcaaccctaaagtggagaatgaggatgaggagctctcctccagcaccgagagtattgataattcattcagttcccctgtccggctggcccctgagcgagaattcatcaagtccttgatggcaatcggcaaacggctggccacgctccccactaaagagcaaaaaacacaaaggctgatctcagaactttccctgctcaaccataagctccctgcccgagtctggctgcccacagctggctttgaccaccacgtggtccgtgtgccccacacacaagctgttgtcctcaattccaaggataaggctccctacctgatctatgtggaagttcttgaatgtgaaaacttcgacacaactaatgttcctgcccggattcctgaaaaccgaattcggagtacgaggtctgtggagaacctgccggaatgtggtatcactcacgagcagcgggctggcagcttcagcactgtgcccaattatgacaatgacgatgaagcctggtcggtggatgacataggcgagctgcaggtggagctcccagaagtgcacaccaacagctgtgacaacatctctcagttctcggtggacagcatcaccagccaggagagcaaggagcctgtgttcattgcggcaggggacatcagacggcgcctttcagaacagctggctcacactcccacagccttcaaacgagaccctgaagacccttctgcagtcgccctcaaagagccctggcaggagaaagtgcggaggatcagagaaggttccccgtatggccatcttcccaattggcgactcctttcagtcattgtcaagtgtggagatgaccttcgccaggagctgctggctttccaggtgttgaaacaactgcagtccatttgggaacaggagcgagtgcctctttggatcaagccatataagattcttgtgatttcagctgacagtggcatgattgaaccagtagtcaacgctgtgtccatccaccaggtgaagaaacagtcacagctctccttgctcgattacttcctgcaggagcatggcagttacaccactgaggcattcctcagtgcccagcgcaattttgtgcaaagttgtgctggctactgcttggtctgctacctattacaagtcaaggacaggcacaatgggaacatccttctggacgcagaaggtcacatcatccacatcgactttggcttcatcctttccagctcaccccgaaacctgggcttcgagacgtcagcctttaagctgaccacagaatttgtggatgtaatgggcggcctgaacggtgatatgttcaactactataagatgctcatgctgcaagggctgatcgctgctcgcaaacacatggacaaggtggtacagattgtggagatcatgcagcaaggttctcagcttccttgcttccatggctccagcaccattcgcaacctcaaagagaggttccacatgagcatgactgaggagcagctgcagctgctggtggagcagatggtggacggcagcatgaggtccatcaccaccaaactctacgatggcttccagtacctcaccaatggcatcatgtgacaccactttcaggcccagaagtggtgggattgaaggcaccctccttaggaggacccttgcctaagaaaacctaaatcacaaaatcccacctacctaaccacctacccaagggaaatggaaggcaaaaaacacaaaggatcatgtggtaaccatgagagctggccaaagggtaggagagccaaccatggggtccagacttgctggggcttccccacctcttgctgtgtcagtattgccacctgacagatcccaggactcactgccctccagagaacagagatgatgaacatgaggaggactggaaccttcttcccctcggggatctcatcttttactatccctgggtcccagcaagatgggaggagtgggttcttggtacttaggactt

SEQ ID NO: 2216 - protein, 816 aa, Rattus norvegicus
  ref <308>: DATABASE ACCESSION NUMBER: SWISS-Prot / BAA18969
  ref <309>: DATABASE ENTRY DATE: 2002-10-01
MGDMVVEPATLKPTSEPTPSPSGNNGGSLLSVITEGVGELSVIDPEVAQKACQEVLEKVKLLHGGVAISSKGSPLELVNGDGVDNEIRCLDDPPTEIREEEDEMEPGVVSGTAKGTRRRRQNNSAKQSWLLRLFESKLFDISMAISYLYNSKEPGVQAYIGNRLFCFRNEDVDFYLPQLLNMYIHMDEDVGDAIKPYIVHRCRQSINFSLQCALLLGAYSSDMHISTQRHSRGTKLRKLILSDELKPAHRKRELPTLSPAPDTGLSPSKRTHQRSKSDATASISLSSNLKRTASNPKVENEDEELSSSTESIDNSFSSPVRLAPEREFIKSLMAIGKRLATLPTKEQKTQRLISELSLLNHKLPARVWLPTAGFDHHVVRVPHTQAVVLNSKDKAPYLIYVEVLECENFDTTNVPARIPENRIRSTRSVENLPECGITHEQRAGSFSTVPNYDNDDEAWSVDDIGELQVELPEVHTNSCDNISQFSVDSITSQESKEPVFIAAGDIRRRLSEQLAHTPTAFKRDPEDPSAVALKEPWQEKVRRIREGSPYGHLPNWRLLSVIVKCGDDLRQELLAFQVLKQLQSIWEQERVPLWIKPYKILVISADSGMIEPVVNAVSIHQVKKQSQLSLLDYFLQEHGSYTTEAFLSAQRNFVQSCAGYCLVCYLLQVKDRHNGNILLDAEGHIIHIDFGFILSSSPRNLGFETSAFKLTTEFVDVMGGLNGDMFNYYKMLMLQGLIAARKHMDKVVQIVEIMQQGSQLPCFHGSSTIRNLKERFHMSMTEEQLQLLVEQMVDGSMRSITTKLYDGFQYLTNGIM

SEQ ID NO: 2217 - DNA, 334 bp, Homo sapiens
  ref <308>: DATABASE ACCESSION NUMBER: EMBL / AI205643
  ref <309>: DATABASE ENTRY DATE: 2000-03-03
ttctcaggaatcctttattcttgtagtaataataatactaacaaacagttggggaactagggagaaaaccagaccattaaaactgttgtggtcgaatctccattcaggcctctctttttctgtgacttggacaatgtggagttgaagcgggtgagagaacatggaaggaaaagttaatgctctggcggcaacggtggactatgtagggcttaatggcatcacccacgtcctcatccatgtggatgtacatgttaagcaactggggcagatagaagtccacgtcctcgttgcgaaagcagaagagccggttgccaatggtagcttgtactccagc

SEQ ID NO: 2218 - protein, 801 aa, Homo sapiens [sequence omitted]

SEQ ID NO: 2219 - DNA, 3709 bp, Rattus norvegicus
  ref <308>: DATABASE ACCESSION NUMBER: EMBL / D85183
  ref <309>: DATABASE ENTRY DATE: 1998-10-27
cgcgctcaccgccgatctcccatccttgctctgcagccgcggcccatggagcccgccggcccggcccctggccgcctagggccgctgctgttctgcctgctgctctccgcgtcctgtttctgtgcaggagccagcgggaaagaactgaaggtgactcaggctgacaaatcagtgtctgttgctgctggagattcggccactctgaactgcactgtgtcctccctgacgcctgtgggacccattaagtggttcaaaggagaagggcaaaatcggagcccgatctacagtttcataggaggagaacactttcctcgaattacaaatgtttcagatgctactaagagaaacaatatggactttagcatctgtatcagtaatgtcacccctgaagatgctggcacctactactgtgtgaagttccagaaaggaatagtagagcctgacacagaaattaaatctggagggggaacaacgctctatgtactcgccaaaccttcttcaccggaagtatcgggcccagactccaggggctctcctggacagacagtgaacttcacctgcaagtcttacggcttctctccccggaatatcaccctgaagtggctcaaagatgggaaagaactctcccatttggagaccaccatctccagtaaaagcaatgtctcctacaacatctccagcacagtcagcgtgaaactaagccccgaggacattcattctcgggtcatctgcgaggtagcccacgtcaccttggaaggacgcccgcttaatgggaccgctaacttttctaacatcatccgagtttcacccaccttgaagatcacccaacagcccctgacgcccgcgagccaggtgaacctcacctgccaggtgcagaagttctaccccaaggctctccagctgaactggctggagaatggaaacttatcacggacggacaagcccgagcatttcacagacaacagggatgggacctataattacacaagcctgttcctggtgaactcatctgctcacagagaggatgtggtattcacgtgccaggtggagcatgacagtcagccagcgatcaccgaaaaccataccgtgcgggcatttgcccactcgagtagtggaggcagcatggaaaccatccctgataataatgcttactacaactggaacgtcttcatcggtgtgggtgtggcgtgtgctttgctagtagtcctgctgatggctgccctctacctcctccgaatcaaacagaagaaagccaagggctcaacttcttccacacggttgcacgagcccgagaagaatgccagggaaataacccagatccaggacacaaatgacatcaacgacatcacatacgcagacctgaatctgcccaaagagaagaagcccgccccccgggtccccgagcccaacaaccacacagaatatgcaagcattgagacaggcaaactgcctaggccagaggataccctcacctatgctgacctggacatggtccacctcaaccgggcacagccaacccccaagcctgagccatccttctcagagtatgccagtgtccaagtccagaggaagtgaatggggctgtggttggctctaggccccatccccacaagttttcttgtcctacatggagtggccatgatgaggacaaccagccagccagccctgtctccagaaggccaggtggcacaggtcctaggaccaggggtaagggtggcttctgtcttccctccgtggctctccaacacctcttggacacccatgtccccttcttctggagctgggtgttgcagaaccagagggggaactggagaaagctgcctagaatccaagaagcgttgtgcctcagcccatcacactgggtctggatcctggtcttggcaacccccaggttgcttccttgatgctccagcgcctggtcttctgtgtggagaagagttcaccatctccatccaacttgagcttcggggccagactccctttagatcagaccgccccatgtgtggaagaactacaccaggagtcaacaagttttcacatgtgtgaagaactacaccaggagtcaacaagtttacgccaacagtgctagcctccccacctcccaggctgacgagccctgaggagaaggaaccctcttccccctagaccagcagagactccctgggcatgttcagtgtggccccacccttccagtcccagctcgcttcctccagctagcactaactcaacagcattgctctgtggacgcctgtaaattattgagaaatgtgaactgtgcagtcttgaagctaaggtgttagaaaatttgatttgtgctgtttagttgttgttgggtttcttttcttttcttttttttcttcctttttctttcttctttttttcttttcccccttaaaacaacagcagcagcatcttggctctttgtcatgtgttgaatggttgggtcttgtgaagtctgaggtctaacagtttattgtcccggaaggattttcttatagcagaaacagattttttttccaattcccagcaccctgaggaccaagaaggatccctctgttgtcattttcagcactcagcgtcactgggatgagccaggctctgtccccacagctggcccttggcctccatggctactgtggtaagtgcagccttgtctaatccagtgctgacgttggccattcctcattgaggagagaaggtcagtgacaaactcacaagcactgcagaggcatacggagagaagggacgctcggccagcacccggtattccagcgctctgaggtaatcagtgcaaggagtctgttattaccatcagacctcagcaggatcatactggaacagaacctgatcatacctgtgacaacacagctgtcagccagggcaaaccaccccactgtcccagagtctgggcagaggctctgacccccacccttcaaactggatgtcggggcctggctgggcccaatggcaagcagatgttgcaaccctagctatctggtcttaacatgcagctcagtaagttgaggcgctaatgtccccccatgccgggggattcctggttccggctcttcaagtaagaagctgattcaacctgcctgtttctgtaggtgtgacagggatgtcaggaaaacagccaggactcatctctatagggctggtgacctgatacttcccataaaggcatccaggagttagctgacccaatagtcagagttgacctcactggcctagcaaaccgtaacttgtctttggcccagccatggtcttgggctgtcttctaattccaaagggttggtaggtaaagatccatcctcttcccctctgccaagagacatcacgtgtgtacacacacacatgcgcgcgcgcgcacacacacacacacacacacacacacacacacacacacacacacgggtgtataggtgagttaaaaggatgtcctcgctgacatcctaattttgtcttaagtttttttggagggagaaaggaaagaggcagggaagatacgtagctctagctttagtcaggcagcctggggggatccccaagcctatgtatggaaccctggtacgaaagcgccctgtgaggagtgggatttcagttttatctgtagaccagatgagaaggagaaaggccccattttgtacatagttgcaacttaaaatttttggcttgcaaaatatttttgtaataaagatttctgggtaac

SEQ ID NO: 2220 - protein, 509 aa, Rattus norvegicus
  ref <308>: DATABASE ACCESSION NUMBER: SWISS-Prot / BAA12734
  ref <309>: DATABASE ENTRY DATE: 2003-02-01
MEPAGPAPGRLGPLLFCLLLSASCFCAGASGKELKVTQADKSVSVAAGDSATLNCTVSSLTPVGPIKWFKGEGQNRSPIYSFIGGEHFPRITNVSDATKRNNMDFSICISNVTPEDAGTYYCVKFQKGIVEPDTEIKSGGGTTLYVLAKPSSPEVSGPDSRGSPGQTVNFTCKSYGFSPRNITLKWLKDGKELSHLETTISSKSNVSYNISSTVSVKLSPEDIHSRVICEVAHVTLEGRPLNGTANFSNIIRVSPTLKITQQPLTPASQVNLTCQVQKFYPKALQLNWLENGNLSRTDKPEHFTDNRDGTYNYTSLFLVNSSAHREDVVFTCQVEHDSQPAITENHTVRAFAHSSSGGSMETIPDNNAYYNWNVFIGVGVACALLVVLLMAALYLLRIKQKKAKGSTSSTRLHEPEKNAREITQIQDTNDINDITYADLNLPKEKKPAPRVPEPNNHTEYASIETGKLPRPEDTLTYADLDMVHLNRAQPTPKPEPSFSEYASVQVQRK

SEQ ID NO: 2221 - protein, 503 aa, Homo sapiens
  ref <308>: DATABASE ACCESSION NUMBER: Refseq / NP_004639
  ref <309>: DATABASE ENTRY DATE: 2002-11-04
MEPAGPAPGRLGPLLCLLLAASCAWSGVAGEEELQVIQPDKSVSVAAGESAILHCTVTSLIPVGPIQWFRGAGPARELIYNQKEGHFPRVTTVSESTKRENMDFSISISNITPADAGTYYCVKFRKGSPDTEFKSGAGTELSVRAKPSAPVVSGPAARATPQHTVSFTCESHGFSPRDITLKWFKNGNELSDFQTNVDPVGESVSYSIHSTAKVVLTREDVHSQVICEVAHVTLQGDPLRGTANLSETIRVPPTLEVTQQPVRAENQVNVTCQVRKFYPQRLQLTWLENGNVSRTETASTVTENKDGTYNWMSWLLVNVSAHRDDVKLTCQVEHDGQPAVSKSHDLKVSAHPKEQGSNTAAENTGSNERNIYIVVGVVCTLLVALLMAALYLVRIRQKKAQGSTSSTRLHEPEKNAREITQDTNDITYADLNLPKGKKPAPQAAEPNNHTEYASIQTSPQPASEDTLTYADLDMVHLNRTPKQPAPKPEPSFSEYASVQVPRK

SEQ ID NO: 2222 - DNA, 4862 bp, Rattus norvegicus
  ref <308>: DATABASE ACCESSION NUMBER: EMBL / D85189
  ref <309>: DATABASE ENTRY DATE: 1997-09-11
gccgaggctcgcccctccttgcaaggctgctccagagctagcgggcacgcgagctcctctccgggagcttccttccccgaaaggccgggacccagtggcggactcgtggtgagcgaggcagcaccttcgatcccaggagattgacctgttcttaaaagtgaaagaagaaatctaagaaaaacgctatggcaaagagaataaaagctaagcccacttcagacaaacccggaagtccatatcgctctgtcacgcacttcgactcactagctgtcatagacatccctggagcagatactctggataaattatttgaccatgctgtagccaagtttgggaagaaggacagcctggggacccgggagatcctgagcgaagaaaatgaaatgcagccaaatggaaaggtttttaagaagttaattcttgggaattataaatggataaactatcttgaagtgaactgccgagtgaataactttggaagtggcctcactgcactgggactgaaaccaaagaacaccattgccattttctgtgagaccagggcggagtggatgattgcagcgcagacctgctttaagtacaactttccgcttgtgactttatatgctacccttggcaaagaagctgtcgttcatggattaaatgagtctgaggcttcctatctgattactagtgttgaacttctggaaagcaaactgaaggcggcattattagatatcaattgtgttaaacatatcatttatgtggataacaagactatcaatagagcggagtaccccgaggggcttgagattcacagcatgcagtcagtagaggagctgggatccaagccagaaaactcaagcattcctccaagtagaccaactccttcggacatggccattgtcatgtacaccagtggctctactggccgccccaagggagtgatgatgcaccatagcaatctgatagctgggatgacaggccagtgtgagcgcatacctggattaggaccaaaggacacatatattggctacttacctttggctcatgtgctggaactgacagcagagatctcctgctttacctacggctgtaggattggatattcgtcaccactcacactgtctgaccagtccagcaaaatcaagaagggaagcaagggtgattgtactgtactgaaacctacacttatggcggccgttccggaaatcatggatagaatttacaagaatgttatgagcaaggttcaagagatgaattatattcagaagactctatttaaaattgggtatgattataaattagagcaaatcaagaaaggatatgatgcccctctttgtaatctgatactgtttaagaaggtgaaggctcttctaggaggaaatgtccgcatgatgctgtccggcggtgccccactgtccccccagacacaccgattcatgaatgtctgcttctgctgccccattggtcagggctatgggctgacagaatcatgcggtgctggaacagttactgaagttaccgactacactactggaagagttggcgctcctcttatttgctgtgaaattaaactgaaggactggcaggaaggtggttatacagttcatgataagccaaaccccagaggtgaaattgtgattggaggccagaatatctccatgggatattttaaaaatgaagagaaaacagcagaagattattctgtggatgaaaatggacaaaggtggttttgcactggtgatattggagaattccaccctgatggatgcttacagattatcgatcgtaagaaagatctggtgaagctgcaagccggagagtacgtgtctcttgggaaagtcgaagccgcactgaagaattgtccactgatcgacaacatctgtgcttttgccaaaagtgaccagtcttatgtgatcagttttgtggttcccaaccagaaaaagttgactcttttggcacaacagaagggggtagaaggatcttgggttgatatttgcaataatcctgccatggaagctgaaatactgaaagaaattcgagaagctgcaaatgccatgaaattggaacgatttgaaattccaatcaaagttcgattgagcccagagccatggacccctgaaactggtttggtaacagatgccttcaagctgaaaaggaaggaactgaagaaccattatcttaaagacattgagcggatgtatgggggcaaataaaaggcaactgtctacttcacatttgcacaggaggtggcctgatggtttttttagttctagagtttaagcctttgttgatctctctgttaaaatgtaaggtgaatcttctaaagacatgaaacaaaaaaacaaccaaaagtggttacaataaattgcatagtcctagagaagctgaaattgaagacatttccctttagctgtgttattaagtttagagcaaaaattctgttttagaatattagccttagctacacttgtttttctaaagatactccatgctaaagtaaacaaattggacttggactaggtgtagttgaagaaatctacagcttccagtgtctatgtcttcctagttcagaagtttctatcgtaatcattaggacaaaattacgtattaacactactcaaagccgaagttccaccaggctttgaaatcctcttccaaccatttctcttgaagggaaaaaaatcagttgtaataaatggattcagtatcttagaaggtattattttaagctcataattgccatgtaggtgagacatagaatcattataatattgtgaataattacagtgcctgaagttaaaactaaaacaacacacacataccaaaaatatctcataatgtatttgaagggaggctgaattgctcctttggatgtctaagaacttaaatcagcaactgtaattattgaaatgtcttcagaaaaatgtccactttgtaaaagtgacctttctgtgtgtgatctagtcaaaggctgagaccaaggggaacatgttagaaagtcaatcagaattcaataagatacattgcttttctgttagaaagttcatggcatcctaagcattcagaattaggatcctggcatagcactgagcctgggaaagagatttagcctctttaactttgataccagggcttgattttaaaatgtgcttgtattaaattacatttgtaatttatggtctgtttgctgttgctgattgattcttgatcagtagtgtgcatttcagagagcctttcattttgctttaatttcagcaaagcgggttatgataaatgacttcctcgaatcttgttcaaacctacgggtgattaagtgtcttggatgagtctgaggaagttaaagggaagaaaacactgttaacacttttcctgtttgtgaagagtttagaaactggaaatgctagatttgggagaagggcagagttacttgattaaggactgtctgtgcagtaacttgggagtgtgagtttctttttaaatcttcagctaaaatctggaattatatattcttgatagatattcgcacttgaaccatagttactgtatgtaaaaagcaaaaattcttaatactgttattctttgcacttttttcatagtcattttatacacacacacacacacatgcatgtgtatgtgtgtgtgtatatataatatatatatgttgcttacattgtgttgtacagatgtgggccaccactacaacaaaatgagttctttgtgctctaaaatatttataaagaaattatttaaatgttatgtatatggtggtaatattgagaaaaaaaatcatctggtattctgagcaacagcgaaggtttttgtaaaagtttcttttcagtgttgtgcaaactaaaatttgaggcaagttttccctgaagttctatgtgagtattctcatgcttcccatcttgcctttgaagtgtgaaaagacatcaagtagactactagtcagcttctacctactcctagtgcactgtttatccgtttttttttaaaggcttttccaatatatgtatcccatttggaatggtgattttaaaatgtgagtgcatgcagactatcttacttaagatacttgcaccccacccacagccatctcccaaagctggaacactgccaactaggtccttaagaatcacgcattgaatacaaggtcgggtgctgctaattcttcatgaaaatcctaacacacacgttaagggaccagggagatgccactgccctctgacttttcatcaaaaaaaaaatatatatatacatgtttatgtaaacagaactattttccatattcatagtgactttttaagtatttgagcctaaaggttttgatctccattttatacctatttaaatcgttcacaatttcatgtcagccatcaattaaagctgtgcttactgttgattgtgtgtgcatttctaaggtgaacgctcctaattttttgctttaattacatgaaagggtcttatttctttgatatttgtgctcttttttttaatgtagactgaaggtatgattgtgtgacttttaagaaatgaaataccgatgaatgatccatagagtccaaagtgagggagaatgctgtttctttgttcatagagactgactagtaatctttgcctatattttcctggtagcagatgacaaatgtttctacagtgacaagctgagaagaggttaaaggttaaagattgtgtggcattcgggaactggagagatacgttttaattttgaatgtagttacaaattttatattcatatttgtactttctgttaatgcacgattgtagaattgttctgtagattttttgtgtttactcttgaaaggctttgtttgttcttctttttaagtttgcacttgaatcttataaaataaatc

SEQ ID NO: 2223 - protein, 670 aa, Rattus norvegicus
  ref <308>: DATABASE ACCESSION NUMBER: SWISS-Prot / O35547
  ref <309>: DATABASE ENTRY DATE: 2001-10-16
MAKRIKAKPTSDKPGSPYRSVTHFDSLAVIDIPGADTLDKLFDHAVAKFGKKDSLGTREILSEENEMQPNGKVFKKLILGNYKWINYLEVNCRVNNFGSGLTALGLKPKNTIAIFCETRAEWMIAAQTCFKYNFPLVTLYATLGKEAVVHGLNESEASYLITSVELLESKLKAALLDINCVKHIIYVDNKTINRAEYPEGLEIHSMQSVEELGSKPENSSIPPSRPTPSDMAIVMYTSGSTGRPKGVMMHHSNLIAGMTGQCERIPGLGPKDTYIGYLPLAHVLELTAEISCFTYGCRIGYSSPLTLSDQSSKIKKGSKGDCTVLKPTLMAAVPEIMDRIYKNVMSKVQEMNYIQKTLFKIGYDYKLEQIKKGYDAPLCNLILFKKVKALLGGNVRMMLSGGAPLSPQTHRFMNVCFCCPIGQGYGLTESCGAGTVTEVTDYTTGRVGAPLICCEIKLKDWQEGGYTVHDKPNPRGEIVIGGQNISMGYFKNEEKTAEDYSVDENGQRWFCTGDIGEFHPDGCLQIIDRKKDLVKLQAGEYVSLGKVEAALKNCPLIDNICAFAKSDQSYVISFVVPNQKKLTLLAQQKGVEGSWVDICNNPAMEAEILKEIREAANAMKLERFEIPIKVRLSPEPWTPETGLVTDAFKLKRKELKNHYLKDIERMYGGK

SEQ ID NO: 2224 - DNA, 5356 bp, Homo sapiens
  ref <308>: DATABASE ACCESSION NUMBER: Refseq / NM_022977
  ref <309>: DATABASE ENTRY DATE: 2001-02-06
cgggattcggctggctctgccacaccaccgcgcgcccccgctccgcccgcccctccgggcgcgtcttttccgggctcgcgctgagtcccgcctccgccggctgtccgggtgcgcgcgcgccgctgcggctttttctctggcctccgccgcgcgctcctcctcgtcccagcgctagcgggcacgcggttcctttttgcgagctttccgagtgccaggcgccggccggctgcgaagacgcggtgggccgcccctccgattgaaatcacagaagatattcgtgttcttcttaagagaaaaagaggacattttagctttctcagttgaaggcgtactttattgtcggcttccaaagattactaacttttatctgtatcactaagattgaactgccttggctgtactgctattcttactgctgcttctattattgccttcttcagcacaataaggctttcaaaagccaaagaataacaagaaataagcaccattttagaagcctttccactatgaaacttaagctaaatgtgctcaccattattttgctgcctgtccacttgttaataacaatatacagtgcccttatatttattccatggtattttcttaccaatgccaagaagaaaaacgctatggcaaagagaataaaagctaagcccacttcagacaaacctggaagtccatatcgctctgtcacacacttcgactcactagctgtaatagacatccctggagcagatactctggataaattatttgaccatgctgtatccaagtttgggaagaaggacagccttgggaccagggaaatcctaagtgaagaaaatgaaatgcagccaaatggaaaagtttttaagaagttaattcttgggaattataaatggatgaactatcttgaagtgaatcgcagagtgaataactttggtagtggactcactgcactgggactaaaaccaaagaacaccattgccatcttctgtgagaccagggccgaatggatgattgcagcacagacctgctttaagtacaactttcctcttgtgactttatatgccacacttggcaaagaagcagtagttcatgggctaaatgaatctgaggcttcctatctgattaccagtgttgaacttctggaaagtaaacttaagactgcattgttagatatcagttgtgttaaacatatcatttatgtggacaataaggctatcaataaagcagagtaccctgaaggatttgagattcacagcatgcaatcagtagaagagttgggatctaacccagaaaacttgggcattcctccaagtagaccaacgccttcagacatggccattgttatgtatactagtggttctactggccgacctaagggagtgatgatgcatcatagcaatttgatagctggaatgacaggccagtgtgaaagaatacctggactgggaccgaaggacacatatattggctacttgcctttggctcatgtgctagaactgacagcagagatatcttgctttacctatggctgcaggattggatattcttctccgcttacactctctgaccagtccagcaaaattaaaaaaggaagcaaaggagactgtactgtactgaagcccacacttatggctgctgttccggaaatcatggatagaatttataagaatgttatgagcaaagtccaagagatgaattatattcagaaaactctgttcaagatagggtatgattacaaattggaacagatcaaaaagggatatgatgcacctctttgcaatctgttactgtttaaaaaggtcaaggccctgctgggagggaatgtccgcatgatgctgtctggaggggccccgctatctcctcagacacaccgattcatgaatgtctgcttctgctgcccaattggccagggttatggactgacagaatcatgtggtgctgggacagttactgaagtaactgactatactactggcagagttggagcacctcttatttgctgtgaaattaagctaaaagactggcaagaaggcggttatacaattaatgacaagccaaaccccagaggtgaaatcgtaattggtggacagaacatctccatgggatattttaaaaatgaagagaaaacagcagaagattattctgtggatgaaaatggacaaaggtggttttgcactggtgatattggagaattccatcccgatggatgtttacagattatagatcgtaagaaagatctagtgaagttacaagcaggagagtatgtatctcttgggaaagtagaagctgcactgaagaattgtccacttattgacaacatctgtgcttttgccaaaagtgatcagtcctatgtgatcagttttgtggttcctaaccagaaaaggttgacacttttggcacaacagaaaggggtagaaggaacttgggttgatatctgcaataatcctgctatggaagctgaaatactgaaagaaattcgagaagctgcaaatgccatgaaattggagcgatttgaaattccaatcaaggttcgattaagcccagagccatggacccctgaaactggtttggtaactgatgctttcaaactgaaaaggaaggagctgaggaaccattacctcaaagacattgaacgaatgtatgggggcaaataaaatgttgttgtcttattgacagttgtgcaggaggtagcctggtggttttcaacctctagaattttaagcctttgttgaactgttagaatgtaaggtatatcattctaaagatagagtaaaaagaaaacaaaaccaaaagttattaaaattgttgtccggtttactttaacttagttttgcatagttctagtgcagctgaaattgaaaagttatttccctttagctgtgttattatagagcagaaattctgtttttaaaaattagcctaagatatacttgtttttgtaaagaaaaatatttaatgttgaacaaaataaattggagttggagtagaatgtagtttgaggaaatttgcagcttccaatgcctcttgtcttcctatttcagaagtttaaatattaagcatgacagaaaatatgtattaacactactcaaagcaaaagtgctgcagggctttaaaattctcttccaaccatttatcttgaaggaaaaattcaatagtaatataatacacaaaatcaaataataccttagaaggtattaagattataattgttgcataggttagatatagagtcattgtaatgttgtgaataattacagtgcctaaaataagaatagaacaacatatacaacaccaaaaaatatctagtaatatatttaaagggaaattgagctgctttttttgaaactttgagatctaaaaataactgtaattatttgaatgactaagaggaaagtacattttttgaaatgctgaaaattgcctttctgtgtttattcaaactgaaaagctgagaccaagagcaaggaaggtaaaaagttaacaggcaaacattttctcttagaaaaggtgataaaatcataagtatttggaattagaacccttgcacagcactgaacctgggaaagagatttaaactctgaatttatctttgataacagggattgattttaaaatgtacatgtattaaattacatttgtaatttaaggtctgtttgctgttgctgattttattcttgatcagtagtttgcatttcagaaagcctttcattttgctttaagtttagcaaagcggggttataatgaatgacttccccaatatcttgcttgaacttacagtgattaacttggatgagttttgggaagttaaagggaagaaaacactgttatcattttttcctgtttgggaagagcttagaaactggaaatactagatttgggagaagggcagagttacttgataagggacttgatgtttgtgcagtaacttgggagtgtggtttctttttgaatctttaattaaaacctgggattatatatccctgataaatattcacacttgaaccatagttactgtaaaatgcaaaaaatcttaatactgttattctttgcactttttcttaatcattttttatatatatgcatatatatatgtgtgtgtgtgtgttgcttatgttgttttgtacagatgtgggccaccattgcaacaaaatacattctttttgctctaaaatatttatgaagaaaatacttaaatgttatgtatatggtggtaataagggaaaaatcaagtattataaacaagaatgaaggtttttgtaaagatttctgttcagcgttttgcaaggtaaaattttaggcaagttttccctgaagttatgtgtatgtgagtattctcattcttcccaacttgcctttgaagagtgaaataccattattatcaagtagactactgttcagcttttattccttccctggttgtttatcccttaggaatgagtttcttagactttcccaatatgtgattttttttcccatttagaatggtgattttaaatgtgtgagtgcatgtactatcttatctcagatatttgcacccccaatctgcccccaactcccaaaagctagaacactgccaactgatctgttataggtcctttagaaacacataattaacacttaaggttgggtgctgctaattctttgcaaaaatccaaatattgttaagggaccagggagatgccactaccccttgattttccatctaaaaatatacatgtttatgtaaacaaatctttccatatccatagtgacttttcaagtatttaagcctaaagattttgatctcacatttttatacctgtttaaattgctcacagttattacatacacatcagccatcaactaaagttgtactttaaaaatttactacaatatgtacatttctaagtcaaacacttgtgacttttgctttaattccatgaatgttcctgcctccttgatatttgtatttattctttttttctctagagtagaggtataattgtgtgatatttcagaaatacagataaatgattcaaaaagtcacagttaaggagaatcatgtttctttgatcatgaataactgattagtaagtcttgcctatattttcctgatagcatatgacaaatgtttctaaggtaacaagatgagaacagataaagattgtgtggtgttttggatttggagagaaatattttaatttttaaatgcagttacaaattataatgtattcatatttgtactttctgttaaaatgcatgattgcagaattgtttagattttgtgtttattcttgatgaaaagctttgtttgttcttgtttttaagtttgcactcaaatcttaagaaataaatccacccatgttatcaaaaaaaaaaaaaaaaaaaa

SEQ ID NO: 2225 - protein, 711 aa, Homo sapiens
  ref <308>: DATABASE ACCESSION NUMBER: SWISS-Prot / O60488
  ref <309>: DATABASE ENTRY DATE: 2002-06-15
MKLKLNVLTIILLPVHLLITIYSALIFIPWYFLTNAKKKNAMAKRIKAKPTSDKPGSPYRSVTHFDSLAVIDIPGADTLDKLFDHAVSKFGKKDSLGTREILSEENEMQPNGKVFKKLILGNYKWMNYLEVNRRVNNFGSGLTALGLKPKNTIAIFCETRAEWMIAAQTCFKYNFPLVTLYATLGKEAVVHGLNESEASYLITSVELLESKLKTALLDISCVKHIIYVDNKAINKAEYPEGFEIHSMQSVEELGSNPENLGIPPSRPTPSDMAIVMYTSGSTGRPKGVMMHHSNLIAGMTGQCERIPGLGPKDTYIGYLPLAHVLELTAEISCFTYGCRIGYSSPLTLSDQSSKIKKGSKGDCTVLKPTLMAAVPEIMDRIYKNVMSKVQEMNYIQKTLFKIGYDYKLEQIKKGYDAPLCNLLLFKKVKALLGGNVRMMLSGGAPLSPQTHRFMNVCFCCPIGQGYGLTESCGAGTVTEVTDYTTGRVGAPLICCEIKLKDWQEGGYTINDKPNPRGEIVIGGQNISMGYFKNEEKTAEDYSVDENGQRWFCTGDIGEFHPDGCLQIIDRKKDLVKLQAGEYVSLGKVEAALKNCPLIDNICAFAKSDQSYVISFVVPNQKRLTLLAQQKGVEGTWVDICNNPAMEAEILKEIREAANAMKLERFEIPIKVRLSPEPWTPETGLVTDAFKLKRKELRNHYLKDIERMYGGK

SEQ ID NO: 2226 - DNA, 4862 bp, Rattus norvegicus; identical to SEQ ID NO: 2222
  ref <308>: DATABASE ACCESSION NUMBER: EMBL / D85189
  ref <309>: DATABASE ENTRY DATE: 1997-09-11

SEQ ID NO: 2227 - protein, 670 aa, Rattus norvegicus; identical to SEQ ID NO: 2223
  ref <308>: DATABASE ACCESSION NUMBER: SWISS-Prot / O35547
  ref <309>: DATABASE ENTRY DATE: 2001-10-16

SEQ ID NO: 2228 - DNA, 5356 bp, Homo sapiens; identical to SEQ ID NO: 2224
  ref <308>: DATABASE ACCESSION NUMBER: Refseq / NM_022977
  ref <309>: DATABASE ENTRY DATE: 2001-02-06

SEQ ID NO: 2229 - protein, 711 aa, Homo sapiens; identical to SEQ ID NO: 2225
  ref <308>: DATABASE ACCESSION NUMBER: SWISS-Prot / O60488
  ref <309>: DATABASE ENTRY DATE: 2002-06-15

SEQ ID NO: 2230 - DNA, 1899 bp, Rattus norvegicus
  ref <308>: DATABASE ACCESSION NUMBER: EMBL / D86297
  ref <309>: DATABASE ENTRY DATE: 1999-01-21
gactttgggctcaggatggtggcagcagctatgttgctacggtcctgtccagtgctctctaagggccccacaggcctcctaggcaaagtggctaaaacttaccagttcctatttggtattggacgctgccccatcctggccactcaaggaccaacctgttctcaaatccatcttaaggcaaccaaggctggagcagactctccgtcttggactaagagccattgtcctttcatgctgtcagaactccaagacaggaagagcaagattgtgcagagggcagctccagaagtccaagaggatgtcaagactttcaagacagacctgctgagcttcatggagtcaactacccgaagccaatcagtgcctcgtttccaggatccagagcagactggaggggcacctcccctgctgattcagaataatatgactggaagccaggcttttggttatgaccaattttttagagacaagatcatggaaaagaagcaggaccacacataccgtgtgttcaagactgtgaatcgctgggctaatgcctacccctttgcccaacacttctccgaggcatctatggactcaaaggatgtttctgtctggtgcagtaatgactatttgggcataagcaggcaccctcgtgtcttgcaggccatagaggagaccctgaagaatcatggagctggagctgggggcactcgcaatatctcaggtacaagcaagtttcatgtggagcttgaacaggagctggctgaactacatcataaggactcggctctgctcttctcctcctgttttgtggccaatgattctactctctttacactggccaagcttctgccagggtgtgagatctactcagacgcaggcaatcatgcctccatgatccaaggcattcgtaacagtggtgcagtcaagtttgtcttcagacacaatgacccaggccacctgaagaaacttcttgagaagtccgatcccaagacaccaaaaattgtggcttttgagactgttcactccatggatggtgccatctgtcctctggaggaattgtgtgatgtggcccaccagtacggggccctgaccttcgtggatgaagtccatgccgtaggactatatggaacccggggtgcagggatcggggagcgtgatggaattatgcacaagcttgacatcatctctggaactcttggcaaggcctttggctgtgtcggtggctatatcgccagcactcgggacttggtggacatggtgcgctcctacgctgcaggcttcatctttaccacttcactgcctcccatggtgctctctggagctctagagtctgtgcgtctactcaagggagaggagggtcaagccctgaggcgtgcacaccagcgcaacgtcaaacatatgcgccagctactaatggacaggggctttcctgttatcccctgtcccagccacatcatccccataagggtgggtaatgcggcactcaacagcaagatctgtgatcttctgctcgccaagcacagcatctatgtgcaggccatcaactacccaactgtgcctcgtggtgaggagctgctgcgcttggccccctccccccaccacagccctcagatgatggaaaactttgtggagaagttgctgctggcctggactgaggtggggttgcccctccaagatgtgtctgtggctgcatgcaacttctgccgtcgtcctgtgcactttgagcttatgagcgagtgggagcgatcctactttgggaacatgggaccccaatatgttactacctatgcctaaggagccagctgccttagatgccaaccccacctgcactccccctggggatggtcttcctcctactctctgctttgctgtgtgcttctagctgacttgattctaaaaataaagagcaacctg

SEQ ID NO: 2231 - protein, 587 aa, Rattus norvegicus
  ref <308>: DATABASE ACCESSION NUMBER: SWISS-Prot / Q63147
  ref <309>: DATABASE ENTRY DATE: 1999-07-15
MVAAAMLLRSCPVLSKGPTGLLGKVAKTYQFLFGIGRCPILATQGPTCSQIHLKATKAGADSPSWTKSHCPFMLSELQDRKSKIVQRAAPEVQEDVKTFKTDLLSFMESTTRSQSVPRFQDPEQTGGAPPLLIQNNMTGSQAFGYDQFFRDKIMEKKQDHTYRVFKTVNRWANAYPFAQHFSEASMDSKDVSVWCSNDYLGISRHPRVLQAIEETLKNHGAGAGGTRNISGTSKFHVELEQELAELHHKDSALLFSSCFVANDSTLFTLAKLLPGCEIYSDAGNHASMIQGIRNSGAVKFVFRHNDPGHLKKLLEKSDPKTPKIVAFETVHSMDGAICPLEELCDVAHQYGALTFVDEVHAVGLYGTRGAGIGERDGIMHKLDIISGTLGKAFGCVGGYIASTRDLVDMVRSYAAGFIFTTSLPPMVLSGALESVRLLKGEEGQALRRAHQRNVKHMRQLLMDRGFPVIPCPSHIIPIRVGNAALNSKICDLLLAKHSIYVQAINYPTVPRGEELLRLAPSPHHSPQMMENFVEKLLLAWTEVGLPLQDVSVAACNFCRRPVHFELMSEWERSYFGNMGPQYVTTYA

SEQ ID NO: 2232 - DNA, 2149 bp, Homo sapiens
  ref <308>: DATABASE ACCESSION NUMBER: Refseq / NM_001695
  ref <309>: DATABASE ENTRY DATE: 2002-11-05
gttctgtgttcgcttgggtagaggaagccgtgaggccggagcttaggtcgggaagggatggatcgctgagccgatagcgtccgctaggctgtctgcctcggtacctgttactgctgctacttcctcgtttgacaccttcctggaatctctcttgatttttgaggaaatacctagtaacaaacatgactgagttctggcttatatctgctcctggggagaaaacctgtcagcaaacatgggagaaattgcatgcggcaacttcaaagaacaataatcttgctgtcacttccaagttcaatattcctgacttaaaggttggcacgttggatgtcttggttggcttgtcagatgaactggctaaactggatgcatttgtagaaggagtggttaagaaagtagctcaatacatggctgatgtattggaagatagcaaagacaaagttcaagagaatctgttggctaatggagtggacttggttacttatataacaaggttccagtgggacatggccaaatatccaatcaagcagtccctgaaaaatatttctgaaataattgccaagggagtaactcagattgataatgacctgaaatctcgagcatctgcatacaataacctgaaaggaaatcttcagaatttggaacgaaagaatgcaggaagtttgctaactagaagtctagcagaaattgtgaagaaggatgactttgttcttgattcagagtatctcgtcacattactggtagtagttcccaagttaaaccacaacgactggattaagcagtatgaaacactagccgaaatggtagttccaaggtctagcaatgttctttcagaggaccaagacagttacctgtgtaatgtcaccttgtttaggaaggcagttgatgacttcagacacaaagccagagaaaacaaattcattgttcgtgacttccagtataatgaagaggagatgaaagcagataaagaagaaatgaacaggctttctactgataagaaaaaacaatttggaccacttgtacggtggctgaaagtgaattttagtgaagcatttattgcatggattcacgtgaaagcattacgggttttcgttgagtctgttttaaggtatggcttgccagtgaacttccaagcaatgctacttcagcccaataagaaaactttgaagaaactgagagaagtattacatgaattgtataaacatctagacagcagtgcagcagctattattgatgctcctatggatattccaggtttaaacctgagtcaacaagaatactacccctatgtgtactacaagattgattgcaacttgctggaattcaagtgaaaatgggctcctcccccgacaatcctgtccttgtgtttgtgtgtgctaacagaaataagttgcagtatggtcgtacttttaactctagtatcctttgcttgcttcttaccccctttcctaggtgaattctcccacagtggtctgtatctcaacattttctttttaaaggaaaaaatatatatatatagtttctttttattgatcaggtctgtaaatgtgtactaaaaaaatcagagtttatttataaacagaatagtttatttaaagagaaggtctcttccttattgatatcatggtatgcattaattccatttgttactattgtgcacaaaagccctgttcacaggggaatggtgtaaacatttatactgttttgttcactgtatttagtagacataactgttgaatagttactgaatcatgatgtaaagaatatgtgaccatcttcaggtatgggatttctgaacgtttcaaatttcaatcaatgagcactgtcaacacccacaggagagaataaaattacctgtgcaaaggtgtattgtggtgtgtgtaacttaagattacagttctgtttgagagttaaatgatgtcatagctcacttgctatgctgcttccaggattttgttatatgctgaggtgtaaccatttgtgttgtctgactttcgtatgatttaattgagccaaatttgggtcagaacacaaatttgaagatgacttttcagtatatgatgggtatttacatttgaacactagaattttaggtctctcaaataattaagaatagagccagttttgaataaagtctagcagaactatg

SEQ ID NO: 2233 - protein, 382 aa, Homo sapiens
  ref <308>: DATABASE ACCESSION NUMBER: SWISS-Prot / P21283
  ref <309>: DATABASE ENTRY DATE: 2002-06-15
MTEFWLISAPGEKTCQQTWEKLHAATSKNNNLAVTSKFNIPDLKVGTLDVLVGLSDELAKLDAFVEGVVKKVAQYMADVLEDSKDKVQENLLANGVDLVTYITRFQWDMAKYPIKQSLKNISEIIAKGVTQIDNDLKSRASAYNNLKGNLQNLERKNAGSLLTRSLAEIVKKDDFVLDSEYLVTLLVVVPKLNHNDWIKQYETLAEMVVPRSSNVLSEDQDSYLCNVTLFRKAVDDFRHKARENKFIVRDFQYNEEEMKADKEEMNRLSTDKKKQFGPLVRWLKVNFSEAFIAWIHVKALRVFVESVLRYGLPVNFQAMLLQPNKKTLKKLREVLHELYKHLDSSAAAIIDAPMDIPGLNLSQQEYYPYVYYKIDCNLLEFK

SEQ ID NO: 2234 - DNA, 1750 bp, Rattus norvegicus
  ref <308>: DATABASE ACCESSION NUMBER: EMBL / D86373
  ref <309>: DATABASE ENTRY DATE: 1998-06-17
gcgaagggacaccctaacgcagcgaccctcccgcggccgcccagcctaccgcctagaccgctgcagctgtcctcgggtcgcaggaagctccatggtgggagaagaaacgtctctgagaaaccggctgtcaagatctgctgagaatcctgagcaagatgaagcccagaaaaatctcttggacacacacagaaatggtcacattaccatgaaacagttgatagccaagaagaggcagttggcggcagaggcagaggagctgaagccactgtttctgaaggaagttgggtgtcactttgatgactttgtgaccaatctcattgacaagtctgcatctctggacaatggcgggtgtgcgctcacgaccttctccattcttgaagaaatgaaaaacaaccacagagccaaagatctgagagcacctccagaacaagggaagatatttatttcaaggcggtctcttttagacgagctgtttgaagtggaccacatcagaacaatttaccacatgttcattgccctcctcatcatcttcatccttagcacgctcgtggtggattacatcgatgaaggaaggctggtccttgagttcagtctcctggcttatgcttttggccaatttcctattgttatttggacatggtgggccatgttcctgtctacactggcaatcccctatttcctgttccagcgttgggcccatggttacagcaagagttcccacccactcatctattcccttatccatggcgcattcttcttggtctttcaacttggaatcctcggttttataccaacatatgttgtcttagcatacacgctgcccccagcctcccggttcattctgatacttgagcagattcgtttggtaatgaaggctcactcatatgtcagagagaatgtgccacgagttctaagtgcagccaaggagaaatcgagcacggttccagtacccacagtcaaccagtacctgtacttcctgtttgctcctacacttatttaccgagacagctaccccaggactcctactgtaagatggggttatgttgctatgcagtttttacaggtttttggttgcctgttttatgtgtactacatctttgagagactctgtgcccctctgttccggaatatcaaacaggagccctttagtgctcgtgtcctggtcctgtgtgtatttaactccatcttgccaggtgtgctgatgctgttcctttcgttctttgcctttttgcactgctggctcaatgcctttgctgaaatgttacgctttggtgacaggatgttttataaggactggtggaactctacatcgtactccaactactacaggacctggaatgtggtggtccacgactggctctactactatgtttacaaggacctcctctggtttttctcgaagaggttcaggcctgccgccatgttggccgtgttcgccctgtcagcagtggtgcacgagtacgccctcgctgtctgcctgagctacttctacccagtgctcttcgtgctcttcatgttctttggaatggcttttaacttcatcgttaacgacagtcggaaaaggccagtctggaacatcatggttcgggcttccctcttcctcggccatggagtcattctgtgcttttactctcaagagtggtatgctcgacagcgctgtcctctgaagaaccctacatttctggattatgtccggccacggacctggacttgtcgttacgtgttttagaagccctggctctgcctcctt

SEQ ID NO: 2235 - protein, 545 aa, Rattus norvegicus
  ref <308>: DATABASE ACCESSION NUMBER: SWISS-Prot / O70536
  ref <309>: DATABASE ENTRY DATE: 2001-10-16
MVGEETSLRNRLSRSAENPEQDEAQKNLLDTHRNGHITMKQLIAKKRQLAAEAEELKPLFLKEVGCHFDDFVTNLIDKSASLDNGGCALTTFSILEEMKNNHRAKDLRAPPEQGKIFISRRSLLDELFEVDHIRTIYHMFIALLIIFILSTLVVDYIDEGRLVLEFSLLAYAFGQFPIVIWTWWAMFLSTLAIPYFLFQRWAHGYSKSSHPLIYSLIHGAFFLVFQLGILGFIPTYVVLAYTLPPASRFILILEQIRLVMKAHSYVRENVPRVLSAAKEKSSTVPVPTVNQYLYFLFAPTLIYRDSYPRTPTVRWGYVAMQFLQVFGCLFYVYYIFERLCAPLFRNIKQEPFSARVLVLCVFNSILPGVLMLFLSFFAFLHCWLNAFAEMLRFGDRMFYKDWWNSTSYSNYYRTWNVVVHDWLYYYVYKDLLWFFSKRFRPAAMLAVFALSAVVHEYALAVCLSYFYPVLFVLFMFFGMAFNFIVNDSRKRPVWNIMVRASLFLGHGVILCFYSQEWYARQRCPLKNPTFLDYVRPRTWTCRYVF

SEQ ID NO: 2236 - DNA, 1013 bp, Rattus norvegicus
  ref <308>: DATABASE ACCESSION NUMBER: EMBL / D86557
  ref <309>: DATABASE ENTRY DATE: 1997-05-14
ggagcaggctcgctggccaagatcacagactggagcacctttcttgtgagcccctggcttcccaggcagcttcaactctggaggacatggggcgaaaggaggaggaggactgtagctcctggaagaaacagaccaccaacatcaggaaaaccttcatcttcatggaagtgctcggatcaggagcgttctcagaggtgttcctggtgaagcaaagagtgactgggaaactctttgctctgaagtgcatcaagaagtcaccagccttccgggacagtagcctagagaatgagattgctgtgttgaaaaggatcaagcatgaaaacattgtgaccctggaggatatctatgagagcaccacccactactacctggtcatgcagcttgtttctggaggtgagctttttgaccgaatcctagagcgtggtgtctacacagaaaaggatgccagtctggtcatccagcaggtcttgtctgccgtgaaataccttcatgagaatggcatcgttcacagagatctaaagcctgaaaacctgctgtacctcacccctgaggagaactccaagataatgatcactgattttggcctatccaagatggagcagaatggagtcatgtccacagcttgtgggaccccaggctatgtggctccagaagtgctggcccagaagccctacagtaaggctgtggactgctggtccattggtgtcatcacatacatactgctgtgtgggtatccccctttctatgaagaaacagaatcaaagctttttgagaagatcaaagagggttactacgagtttgagtctccattctgggatgacatttctgagtcagccaaggactttatttgccatctgcttgagaaggacccaaatgaacgatacacctgcgagaaagccctcagacacccttggattgacgggaacacagccctgcaccgggacatctacccatctgtcagcctccagattcagaagaactttgccaagagcaagtggaggcaagccttcaat

SEQ ID NO: 2237 - protein, 309 aa, Rattus norvegicus
  ref <308>: DATABASE ACCESSION NUMBER: SWISS-Prot / BAA19880
  ref <309>: DATABASE ENTRY DATE: 2003-02-01
MGRKEEEDCSSWKKQTTNIRKTFIFMEVLGSGAFSEVFLVKQRVTGKLFALKCIKKSPAFRDSSLENEIAVLKRIKHENIVTLEDIYESTTHYYLVMQLVSGGELFDRILERGVYTEKDASLVIQQVLSAVKYLHENGIVHRDLKPENLLYLTPEENSKIMITDFGLSKMEQNGVMSTACGTPGYVAPEVLAQKPYSKAVDCWSIGVITYILLCGYPPFYEETESKLFEKIKEGYYEFESPFWDDISESAKDFICHLLEKDPNERYTCEKALRHPWIDGNTALHRDIYPSVSLQIQKNFAKSKWRQAFN

SEQ ID NO: 2238 - DNA, 1750 bp, Homo sapiens
  ref <308>: DATABASE ACCESSION NUMBER: Refseq / NM_020439
  ref <309>: DATABASE ENTRY DATE: 2001-11-10
catcctcagaagcttcaactctggaggcaatgggtcgaaaggaagaagatgactgcagttcctggaagaaacagaccaccaacatccggaaaaccttcatttttatggaagtgctgggatcaggagctttctcagaagttttcctggtgaagcaaagactgactgggaagctctttgctctgaagtgcatcaagaagtcacctgccttccgggacagcagcctggagaatgagattgctgtgttgaaaaagatcaagcatgaaaacattgtgaccctggaggacatctatgagagcaccacccactactacctggtcatgcagcttgtttctggtggggagctctttgaccggatcctggagcggggtgtctacacagagaaggatgccagtctggtgatccagcaggtcttgtcggcagtgaaatacctacatgagaatggcatcgtccacagagacttaaagcccgaaaacctgctttaccttacccctgaagagaactctaagatcatgatcactgactttggtctgtccaagatggaacagaatggcatcatgtccactgcctgtgggaccccaggctacgtggctccagaagtgctggcccagaaaccctacagcaaggctgtggattgctggtccatcggcgtcatcacctacatattgctctgtggataccccccattctatgaagaaacggagtctaagcttttcgagaagatcaaggagggctactatgagtttgagtctccattctgggatgacatttctgagtcagccaaggactttatttgccacttgcttgagaaggatccgaacgagcggtacacctgtgagaaggccttgagtcatccctggattgacggaaacacagccctccaccgggacatctacccatcagtcagcctccagatccagaagaactttgctaagagcaagtggaggcaagccttcaacgcagcagctgtggtgcaccacatgaggaagctacacatgaacctgcacagcccgggcgtccgcccagaggtggagaacaggccgcctgaaactcaagcctcagaaacctctagacccagctcccctgagatcaccatcaccgaggcacctgtcctggaccacagtgtagcactccctgccctgacccaattaccctgccagcatggccgccggcccactgcccctggtggcaggtccctcaactgcctggtcaatggctccctccacatcagcagcagcctggtgcccatgcatcaggggtccctggccgccgggccctgtggctgctgctccagctgcctgaacattgggagcaaaggaaagtcctcctactgctctgagcccacactcctcaaaaaggccaacaaaaaacagaacttcaagtcggaggtcatggtaccagttaaagccagtggcagctcccactgccgggcagggcagactggagtctgtctcattatgtgattcctggagcctgtgcctatgtcactgcaattttcaggagacatattcaactcctctgctcttccaaacctggtgtctatccggcagagggaggaaggcagagcaagtggagcagggcttagcaggagcagtttctggccagaagcaccagcctgctgccagcggggcagcccctcataggaggcccaggagggagccccaaggcgtagaagccttgttgaagctgtgagcaggagaagcggtgcccaccagcttccaggtctccctgacctgcctgctctatgccccac

SEQ ID NO: 2239 - protein, 476 aa, Homo sapiens [sequence omitted]

SEQ ID NO: 2240 - DNA, 1013 bp, Rattus norvegicus; identical to SEQ ID NO: 2236
  ref <308>: DATABASE ACCESSION NUMBER: EMBL / D86557
  ref <309>: DATABASE ENTRY DATE: 1997-05-14

SEQ ID NO: 2241 - protein, 309 aa, Rattus norvegicus; identical to SEQ ID NO: 2237
  ref <308>: DATABASE ACCESSION NUMBER: SWISS-Prot / BAA19880
  ref <309>: DATABASE ENTRY DATE: 2003-02-01

SEQ ID NO: 2242 - DNA, 1750 bp, Homo sapiens; identical to SEQ ID NO: 2238
  ref <308>: DATABASE ACCESSION NUMBER: Refseq / NM_020439
  ref <309>: DATABASE ENTRY DATE: 2001-11-10

SEQ ID NO: 2243 - protein, 476 aa, Homo sapiens [sequence omitted]

SEQ ID NO: 2244 - DNA, 327 bp, Rattus norvegicus
  ref <308>: DATABASE ACCESSION NUMBER: EMBL / D86642
  ref <309>: DATABASE ENTRY DATE: 1999-01-21
atgggcgtggagatcgagaccatctccccgggagacggaaggacattccctaagaagggtcagatatgcgtggtgcactacacagggatgctccagaatggcaagaaattcgattcgtccagagacagaaacaaacccttcaagttcagaattggcaagcaggaagtcatcaaaggttttgaagaaggcgctgcccagatgagcttggggcagagggcgaagctgacctgcacccctgatgtggcatatggagctactggccaccccggtgtcatccctcccaatgccaccctcatctttgacgtggagctgctcaacttagagtga

SEQ ID NO: 2245 - protein, 107 aa, Rattus norvegicus
  ref <308>: DATABASE ACCESSION NUMBER: SWISS-Prot / P97534
  ref <309>: DATABASE ENTRY DATE: 2002-06-15
GVEIETISPGDGRTFPKKGQICVVHYTGMLQNGKKFDSSRDRNKPFKFRIGKQEVIKGFEEGAAQMSLGQRAKLTCTPDVAYGATGHPGVIPPNATLIFDVELLNLE

SEQ ID NO: 2246 - DNA, 593 bp, Homo sapiens
  ref <308>: DATABASE ACCESSION NUMBER: EMBL / AF322070
  ref <309>: DATABASE ENTRY DATE: 2001-02-19
agcagcagggaccccccagaggcggggcctgtgggaccgctatgggcgtggagatcgagaccatctcccccggagacggaaggacattccccaagaagggccaaacgtgtgtggtgcactacacaggaatgctccaaaatgggaagaagtttgattcatccagagacagaaacaaacctttcaagttcagaattggcaaacaggaagtcatcaaaggttttgaagagggtgcagcccagctgggtcctctttctcctctccccatctgcccccatccctgctagatgagcttggggcagagggcgaagctgacctgcacccctgatgtggcatatggagccacgggccaccccggtgtcatccctcccaatgccaccctcatctttgacgtggagctgctcaacttagagtgaaggcaggaaggaactcaaggtggctggagatggctgctgctcaccctcctagcctgctctgccactgggacggctcctgcttttggggctcttgatcagtgtgctaacctcactgcctcatggcatcatccattctctctgcccaagttgctctgtatgtgttcgtcagtgttcatgcga

SEQ ID NO: 2247 - protein, 107 aa, Homo sapiens
  ref <308>: DATABASE ACCESSION NUMBER: SWISS-Prot / Q16645
  ref <309>: DATABASE ENTRY DATE: 2002-06-15
GVEIETISPGDGRTFPKKGQTCVVHYTGMLQNGKKFDSSRDRNKPFKFRIGKQEVIKGFEEGAAQMSLGQRAKLTCTPDVAYGATGHPGVIPPNATLIFDVELLNLE

SEQ ID NO: 2248 - DNA, 994 bp, Rattus norvegicus
  misc_feature (1)..(994): n=a, c, g or t
  ref <308>: DATABASE ACCESSION NUMBER: EMBL / D86711
  ref <309>: DATABASE ENTRY DATE: 1996-09-19
acatctgggattctgtcagataaaagaacttggagagtttttaaactccttcacatctaatttccccaggaaaggggtcacagttccatgatggtggtgggagatcnggaanagagcttggccaaatttaagaaacaccaggcagccctgccctccattcttggaagacagggattgtggtgagccccttcaatgcttccctagaatttacnggaaaatcttaaaatccaaggccaggagagaagaatccaaaaaagcaatatttttcatcatatgccannaatgggataganagaaggagtggcaggcctangcccctccgattgtcccttggggtttaccccttagcccacctcaatatggtgctgggtnnangggtanctgggttctaaccttaaacagggaagactcccgcctctatacagagaccctttaatttttttattctgattagccntctttaaaccancaaanaatnaaatnnatcctnatctaaaacatctgggattctgtcagataaaagaacttggagagtttttaaactccttcacatctaatttccccaggaaaggggtcacagttccatgatggtggtgggagatcnggaanagagcttggccaaatttaagaaacaccaggcagccctgccctccattcttggaagacagggattgtggtgagccccttcaatgcttccctagaatttacnggaaaatcttaaaatccaaggccaggagagaagaatccaaaaaagcaatatttttcatcatatgccannaatgggataganagaaggagtggcaggcctangcccctccgattgtcccttggggtttaccccttagcccacctcaatatggtgctgggtnnangggtanctgggttctaaccttaaacagggaagactcccgcctctatacagagaccctttaatttttttattctgattagccntctttaaaccancaaanaatnaaatnnatcctnatctaaa

SEQ ID NO: 2249 - DNA, 1800 bp, Homo sapiens
  ref <308>: DATABASE ACCESSION NUMBER: EMBL / AL117662
  ref <309>: DATABASE ENTRY DATE: 2000-02-18
acgcgtcgggaagctgagaggcacccacgtttggtgccaactggcccaacacaccgagagccctcaccagtccgttacgacaatctgtcgcgccacattgtggcctctctccaggaacgagagaagttgctgcgccagtcacccccactcccgggccgtgaggaagaaccaggcttgggggactcaggcattcagtcaacaccaggctcgggccatgcccctcgtactagttcctcctcagatgattcaaagagatcacctttgggcaagactccactgggacgcccagctgtcccccgttttggcaagccagatgggctaaggggccggggagtagggtcccctgaaccaggcccaacagccccatacctgggccgatcgatgtcttacagcagccaaaaagcccaacctggtgtctctgagacagaagaagtggccttgcagccattactgacacccaaagatgaagtacagctgaagaccacctacagcaaatccaacgggcagcccaagagcttaggctcagcctcccctggcccaggccagccacctctcagtagccccacgaggggaggagtcaagaaggtgtcaggggttggtggtaccacctatgagatttcggtgtgagccttcggcacctcccctccccaacgcctctgcgcctacaccaaagggccccaggtggccaccttccttccctcaaggggctcccctcccgtgcatggacattttttaaaccaccgattccaagaggatgaggagtgttttctaaaatgcagtaggcttggggagtcggagagttggggccctgagactggggtagcaacccccccttttatcttttaagaccttcccttccttgatccctggaccagactcagtggacatttgtgcaattgctcgccctggagggaaccagatcatttttaaaccagaaataattttttttattattgttacggattctatttttttcctcttctgcgttaccaggtgtgtgtgtacatataatatatatatatatatattataaatatcaaagaaattatatatctatcctgggatgggaaaatgagggagggatacatatacggagggggatcttactcttcccattcctcagaccagcaggaaaagaggggagacgtcagtctttttcctgtggttccctctcatttgtcccagttactaactacggaaatagcatcctctgctggtgctaagtgtgattaggaagaagcctggggagaggcgagtctggaattttggtcacaagagggaaggacttggagaggagaattagttttctaggctcattggcatttagtttccctaggaaaggggtcaaaacttcaagacactggtggtggtgggagatcaggaaaataacttggcctagctcaaacaatattggataatcccctccttgggggagagggattagagtgtgctcctactggccccttggagcctcccctagcttacacagttaacttgattttaaaatccaaggccaggagagaagaatccaaaaagcaatatttttcatcacatgccaaaaacgggggatagagagaaggagtggcaggcctaggcccctccgattgtcccttgggggttacccctcagcccacctcactatggtgctgggtagaggggatacctgggttctaacctctaaataggggagatcccagcctccacaaagaggcccttttattttttattctgattagccattttaaaccaacgaggaataaaaagaaatcctgatctaaccagcaaaaaaaaaaaaaaaaa

SEQ ID NO: 2250 - DNA, 2148 bp, Rattus norvegicus
  ref <308>: DATABASE ACCESSION NUMBER: EMBL / D87240
  ref <309>: DATABASE ENTRY DATE: 1997-08-15
gaggctgacgcgccgcgctaccggtcagatcttaaaaggccgggcagtgcgtgtggcatcccgacagaacaggagaggagcaagtggcagcgcccggtgttgggagcgtggctgtcactgcgctggagcatccctgagcttctgaacagagccgggtagtcagcagtgcagcagccgcaactccacgccgagccgagctcaatctgtctcgtgtctccgctccggcgatcctccgagactccgcacaaagcacattttccaaagcagcgcaagggagcgcccagccgcgtgcaggcggacgcacccttcctgtcctttgttccgggggggatctgcagctgctcttctcccccaactcggagtcttccctccaggggtggcaggtcgccgaatacagcaacgaagatgcctttggaactgacccagagccgggtgcagaagatctgggtgcctgtcgatcaccgaccctcgttgcccagatcctgtgggccgaagctgaccaactccccaacggtgattgtgatggtggggctcccagcccggggtaagacttacatctccaagaagctgactcgctacctcaactggataggtgttccaacgaaagtgttcaatgtgggagaataccgacgggaggctgtgaagcaatacagctcttacaacttcttccgccctgacaatgaggaggccatgagagtccgaaaacagtgtgccttagctgccctgagagacgtcaaaagctacctgacaaaggaaggaggacagattgcagtttttgatgccaccaatacgacgagagaaaggaggcacatgatccttcattttgccaaagaaaatgacttcaaggcatttttcatcgagtccgtctgtgacgaccctacagttgtggcctccaatatcatggaagtgaaaatctccagcccggattacaaagactgcaactccgcagaagccatggacgacttcatgaagaggatcaactgctacgaagccagctaccagcctcttgaccctgataaatgtgacagggacctgtcattcatcaaagtgattgacgttggccggaggttcttggtgaacagagtgcaggaccacatccagagccgaatcgtgtattacctgatgaacatccacgtgcagccccggaccatctacctgtgtcggcacggcgagaatgagtacaacgtgcagggcaagattgggggcgactcaggcctgtccagcagaggcaagaagttcgccaatgccctgagcaagttcgttgaagagcagaatctgaaggacctccgcgtgtggaccagtcagctgaaaagtaccatccagaccgcggaggccctaaggctcccctacgagcagtggaaggcgctcaatgagattgatgctggtgtgtgtgaggaactaacctatgaggagatcagagacacctaccctgaggagtatgcactgcgtgagcaagacaaatactactaccgctatcccacaggcgagtcctaccaggatcttgtccagcgcctggagcctgtgatcatggaattagagcgccaagagaacgtattggtcatctgtcaccaggctgtcctgcgctgcctactagcctacttccttgacaagagtgcagaggagatgccatacctgaaatgcccacttcacacagtcctgaaactgacgcccgtggcgtatgggtgccgtgtggagtccatttacttgaatgtagaatcagtgagcacgcatcgggagaggtcagaggctgtcaaaatacaacactttgccagtgtagtcagaccttcctcttacaccgaacttgactttctgtctgtggagtccgcaaaacaggatgcaaagaagggacctaaccctctcatgagacgcaatagtgtcaccccactagccagccccgagcccaccaaaaagcctcgcatcaacagctttgaggagcatgtggcttccacttctgctgccctgccaagctgcctgcccccggaagtgcccacgcagctgcccggacaacctttgctagggaaagcctgtctacgaactgtctgtcacattttttcaaagttttctccttactaacctgggaaagaacatgaggagcccccggagcggtgccgaatcttcccagaagcactgatgctgaagtaggggttc

SEQ ID NO: 2251 - protein, 555 aa, Rattus norvegicus
  ref <308>: DATABASE ACCESSION NUMBER: SWISS-Prot / O35096
  ref <309>: DATABASE ENTRY DATE: 2001-10-16
MPLELTQSRVQKIWVPVDHRPSLPRSCGPKLTNSPTVIVMVGLPARGKTYISKKLTRYLNWIGVPTKVFNVGEYRREAVKQYSSYNFFRPDNEEAMRVRKQCALAALRDVKSYLTKEGGQIAVFDATNTTRERRHMILHFAKENDFKAFFIESVCDDPTVVASNIMEVKISSPDYKDCNSAEAMDDFMKRINCYEASYQPLDPDKCDRDLSFIKVIDVGRRFLVNRVQDHIQSRIVYYLMNIHVQPRTIYLCRHGENEYNVQGKIGGDSGLSSRGKKFANALSKFVEEQNLKDLRVWTSQLKSTIQTAEALRLPYEQWKALNEIDAGVCEELTYEEIRDTYPEEYALREQDKYYYRYPTGESYQDLVQRLEPVIMELERQENVLVICHQAVLRCLLAYFLDKSAEEMPYLKCPLHTVLKLTPVAYGCRVESIYLNVESVSTHRERSEAVKIQHFASVVRPSSYTELDFLSVESAKQDAKKGPNPLMRRNSVTPLASPEPTKKPRINSFEEHVASTSAALPSCLPPEVPTQLPGQPLLGKACLRTVCHIFSKFSPY

SEQ ID NO: 2252 - DNA, 513 bp, Homo sapiens
  ref <308>: DATABASE ACCESSION NUMBER: EMBL / AJ295747
  ref <309>: DATABASE ENTRY DATE: 2001-03-17
atctacctgaacgtggagtccgtctgcacacaccgggagaggtcagaggatgcaaagaagggacctaacccgctcatgagacgcaatagtgtcaccccgctagccagccccgaacccaccaaaaagcctcgcatcaacagctttgaggagcatgtggcctccacctcggccgccctgcccagctgcctgcccccggaggtgcccacgcagctgcctggacaacctttgctagggcaagcctgtctaaactggaaaggtgtgatgaggaatgcagcctgagatgctgaaaagaatgactggctttggaaatgggagagaacatgaaaggctcccggagcagcgctgactcctccaggaaacactgaggcagacgtgtcggttccattccatttccatttctgcagcttagcttgtgtcctgccctccgcccgaggcaaaacgtatcctgaggacttcttccggagagggtggggtggagcagcgggggagccttggccgaagagaaccatgctt

SEQ ID NO: 2253 - protein, 520 aa, Homo sapiens
  ref <308>: DATABASE ACCESSION NUMBER: SWISS-Prot / Q16875
  ref <309>: DATABASE ENTRY DATE: 2002-06-15
MPLELTQSRVQKIWVPVDHRPSLPRSCGPKLTNSPTVIVMVGLPARGKTYISKKLTRYLNWIGVPTKVFNVGEYRREAVKQYSSYNFFRPDNEEAMKVRKQCALAALRDVKSYLAKEGGQIAVFDATNTTRERRHMILHFAKENDFKAFFIESVCDDPTVVASNIMEVKISSPDYKDCNSAEAMDDFMKRISCYEASYQPLDPDKCDRDLSLIKVIDVGRRFLVNRVQDHIQSRIVYYLMNIHVQPRTIYLCRHGENEHNLQGRIGGDSGLSSRGKKFASALSKFVEEQNLKDLRVWTSQLKSTIQTAEALRLPYEQWKALNEIDAGVCEELTYEEIRDTYPEEYALREQDKYYYRYPTGESYQDLVQRLEPVIMELERQENVLVICHQAVLRCLLAYFLDKSAEEMPYLKCPLHTVLKLTPVAYGCRVESIYLNVESVCTHRERSEDAKKGPNPLMRRNSVTPLASPEPTKKPRINSFEEHVASTSAALPSCLPPEVPTQLPGQNMKGSRSSADSSRKH

SEQ ID NO: 2254 - DNA, 1156 bp, Rattus norvegicus
  ref <308>: DATABASE ACCESSION NUMBER: EMBL / D87991
  ref <309>: DATABASE ENTRY DATE: 2000-03-08
cctggagctttcgccttcgcctccggtaccgctacctgttctgaacggatctccggccgactcgtccctgcgtctcatggccgctagcagatccctggtgcccgaccggctgcgcctaccactctgcttcttgggtgtctttgtctgctacttctactatgggatcctgcaggagaagataacaagaggaaagtatggagaaggacccaaacaggagacattcacctttgccttaactttggttttcatccagtgtgtgatcaatgctatgtttgccaagatcttgatccagttttttgacactgccagggtggatcgcactcggacctggctctatgctgcctgctctgtctcctatgtgggcgccatggtctccagcaactcagcactacagtttgtcaactatccaactcaggtccttggtaaatcctgcaagccaatcccagttatgctcctcggagtgaccctcttgaagaagaagtacccattggccaagtacctgtgtgtgttgctaattgtggctggcgtggctcttttcatgtataagcccaagaaggtggttgggatagaagagcacacggtcggctttggagagctccttctgctcttgtctctgaccctggatggactgacaggtgtttcccaggaccatatgcgggctcattaccaaacaggttccaatcacatgatgttgaacatcaacctttggtccacggtcttgctcggtgctgggatcctgtttactggggagctctgggagttcttgagtttcgccgagaggtacccgaccatcatctataacatcctgctctttggcttgaccagtgccttgggtcagagctttatcttcatgacagtcgtgtacttcggccccctgacctgctccatcatcaccacgactcggaagttcttcaccatcttggcttctgtgatcctctttgccaatcccatcagctccatgcagtgggtgggcaccgtgctggttttcctgggtctgggtcttgatgccaagtttgggaaaggaacaaagaagacctcccactaggaaaagagaggcttcctccactccagaaacacttaaattattatctccaacagtgacatcttgggaaaatggactcagtcacgataagggactgggttccaatctttttat

SEQ ID NO: 2255 - protein, 322 aa, Rattus norvegicus
  ref <308>: DATABASE ACCESSION NUMBER: SWISS-Prot / BAA13527
  ref <309>: DATABASE ENTRY DATE: 2001-12-01
MAASRSLVPDRLRLPLCFLGVFVCYFYYGILQEKITRGKYGEGPKQETFTFALTLVFIQCVINAMFAKILIQFFDTARVDRTRTWLYAACSVSYVGAMVSSNSALQFVNYPTQVLGKSCKPIPVMLLGVTLLKKKYPLAKYLCVLLIVAGVALFMYKPKKVVGIEEHTVGFGELLLLLSLTLDGLTGVSQDHMRAHYQTGSNHMMLNINLWSTVLLGAGILFTGELWEFLSFAERYPTIIYNILLFGLTSALGQSFIFMTVVYFGPLTCSIITTTRKFFTILASVILFANPISSMQWVGTVLVFLGLGLDAKFGKGTKKTSH

SEQ ID NO: 2256 - DNA, 1186 bp, Homo sapiens
  ref <308>: DATABASE ACCESSION NUMBER: Refseq / NM_005827
  ref <309>: DATABASE ENTRY DATE: 2002-05-14
gatgtccggctggagctgtcgcctccgccgccgctgctgccggtgccggttgtgagcgggtctccagtcggctcctctgggcgtctcatggcctctagcagctccctggtgcccgaccggctgcgcctgccgctctgcttcctgggtgtctttgtctgctatttttactatgggatcctgcaggaaaagataacaagaggaaagtatggggaaggagccaagcaggagacgttcacctttgccttaactttggtcttcattcaatgtgtgatcaatgctgtgtttgccaagatcttgatccagttttttgacactgccagggtggatcgtacccggagctggctctatgctgcctgttctatctcctatctgggtgccatggtctccagcaattcagcactacagtttgtcaactacccaactcaggtccttggtaaatcctgcaagccaatcccagtcatgctccttggggtgaccctcttgaagaagaagtacccgttggccaagtacctgtgtgtgctgttaattgtggctggagtggcccttttcatgtacaaacccaagaaagttgttgggatagaagaacacacagtcggctatggagagctactcttgctattatcgctgaccctggatggactgactggtgtttcccaggaccacatgcgggctcattaccaaacaggctccaaccacatgatgctgaacatcaacctttggtcgacattgctgctgggaatgggaatcctgttcactggggagctctgggagttcttgagctttgctgaaaggtaccctgccatcatctataacatcctgctctttgggctgaccagtgccctgggtcagagcttcatctttatgacggttgtgtattttggtcccctgacctgctccatcatcactacaactcgaaagttcttcacaattttggcctctgtgatcctcttcgccaatcccatcagccccatgcagtgggtgggcactgtgcttgtgttcctgggtcttggtcttgatgccaagtttgggaaaggagctaagaagacatcccactaggaagagagagactacctccacatcaagaatatttaagttattatctcaaacagtgacatctcttgggaaaatggacttaataggaatatgggactgagttccagtcttttttaataaaataaaatcaagc

SEQ ID NO: 2257 - protein, 322 aa, Homo sapiens
  ref <308>: DATABASE ACCESSION NUMBER: Refseq / NP_005818
  ref <309>: DATABASE ENTRY DATE: 2002-05-14
MASSSSLVPDRLRLPLCFLGVFVCYFYYGILQEKITRGKYGEGAKQETFTFALTLVFIQCVINAVFAKILIQFFDTARVDRTRSWLYAACSISYLGAMVSSNSALQFVNYPTQVLGKSCKPIPVMLLGVTLLKKKYPLAKYLCVLLIVAGVALFMYKPKKVVGIEEHTVGYGELLLLLSLTLDGLTGVSQDHMRAHYQTGSNHMMLNINLWSTLLLGMGILFTGELWEFLSFAERYPAIIYNILLFGLTSALGQSFIFMTVVYFGPLTCSIITTTRKFFTILASVILFANPISPMQWVGTVLVFLGLGLDAKFGKGAKKTSH

SEQ ID NO: 2258 - DNA, 1156 bp, Rattus norvegicus; identical to SEQ ID NO: 2254
  ref <308>: DATABASE ACCESSION NUMBER: EMBL / D87991
  ref <309>: DATABASE ENTRY DATE: 2000-03-08

SEQ ID NO: 2259 - protein, 322 aa, Rattus norvegicus; identical to SEQ ID NO: 2255
  ref <308>: DATABASE ACCESSION NUMBER: SWISS-Prot / BAA13527
  ref <309>: DATABASE ENTRY DATE: 2001-12-01

SEQ ID NO: 2260 - DNA, 1186 bp, Homo sapiens; identical to SEQ ID NO: 2256
  ref <308>: DATABASE ACCESSION NUMBER: Refseq / NM_005827
  ref <309>: DATABASE ENTRY DATE: 2002-05-14

SEQ ID NO: 2261 - protein, 322 aa, Homo sapiens; identical to SEQ ID NO: 2257
  ref <308>: DATABASE ACCESSION NUMBER: Refseq / NP_005818
  ref <309>: DATABASE ENTRY DATE: 2002-05-14

SEQ ID NO: 2262 - DNA, 1156 bp, Rattus norvegicus; identical to SEQ ID NO: 2254
  ref <308>: DATABASE ACCESSION NUMBER: EMBL / D87991
  ref <309>: DATABASE ENTRY DATE: 2000-03-08

SEQ ID NO: 2263 - protein, 322 aa, Rattus norvegicus; identical to SEQ ID NO: 2255
  ref <308>: DATABASE ACCESSION NUMBER: SWISS-Prot / BAA13527
  ref <309>: DATABASE ENTRY DATE: 2001-12-01

SEQ ID NO: 2264 - DNA, 1186 bp, Homo sapiens; identical to SEQ ID NO: 2256
  ref <308>: DATABASE ACCESSION NUMBER: Refseq / NM_005827
  ref <309>: DATABASE ENTRY DATE: 2002-05-14

SEQ ID NO: 2265 - protein, 322 aa, Homo sapiens; identical to SEQ ID NO: 2257
  ref <308>: DATABASE ACCESSION NUMBER: Refseq / NP_005818
  ref <309>: DATABASE ENTRY DATE: 2002-05-14

SEQ ID NO: 2266 - DNA, 1156 bp, Rattus norvegicus; identical to SEQ ID NO: 2254
  ref <308>: DATABASE ACCESSION NUMBER: EMBL / D87991
  ref <309>: DATABASE ENTRY DATE: 2000-03-08

SEQ ID NO: 2267 - protein, 322 aa, Rattus norvegicus; identical to SEQ ID NO: 2255
  ref <308>: DATABASE ACCESSION NUMBER: SWISS-Prot / BAA13527
  ref <309>: DATABASE ENTRY DATE: 2001-12-01

SEQ ID NO: 2268 - DNA, 1186 bp, Homo sapiens; identical to SEQ ID NO: 2256
  ref <308>: DATABASE ACCESSION NUMBER: Refseq / NM_005827
  ref <309>: DATABASE ENTRY DATE: 2002-05-14

SEQ ID NO: 2269 - protein, 322 aa, Homo sapiens; identical to SEQ ID NO: 2257
  ref <308>: DATABASE ACCESSION NUMBER: Refseq / NP_005818
  ref <309>: DATABASE ENTRY DATE: 2002-05-14

SEQ ID NO: 2270 - DNA, 2908 bp, Rattus norvegicus
  ref <308>: DATABASE ACCESSION NUMBER: EMBL / D88250
  ref <309>: DATABASE ENTRY DATE: 1998-04-27
ggaggtatcgaggaagagagaacagggaggtggggcggaggttcctcgcagagcctctggagccgcaggggcttcacggcatgaccagaagcaggagaggaggctgacccacttgttcccatcagctcctgaaggtgacactgagccctgggtggcccctcactgccaaagcagtcacctgtatttgtcagataaagacggccagcccggctgccctttacctccaagtcagagatccagagagccatgggcaaatcgccagagatgtggtgctttgtcttcttttctcttttggcatcgttttctgctgagcctaccatgtatggggagatcctgtcccctaattatccccaggcgtaccccaatgaggtcgtgaaaacttgggacatagaagtcccagaggggtttgggattcacctttacttcacccatctggacatggagctgtcagagaactgtgcatacgactcagtgcagataatctcaggaggtatcgaggaagagagactctgtggccagaggtccagcaagagtcccaactcccccactgtagaagagtttcaattcccatacaataggctccaggtggtctttacgtcagacttctccaacgaggaacggtttactggctttgcagcgtattactcagccgtagatgtaaatgaatgcacagactttacagatgtcccttgcagccacttctgcaataacttcattggtggatacttctgctcctgccccccagaatacttcctccacgatgacatgaggacttgtggggtcaactgtagtggggatgtattcactgccttgattggggagatcgcaagtcccaattatcccaacccatacccggagaactcaaggtgtgaataccagattcggctgcaggagggcttccgactggtgttgactatccggagagaagattttgatgtggaaccagcggactcagaggggaactgccacgacagtttgacttttgctgcaaaaaaccaacagtttggtccttactgtggcaatggattccctggacctctaactattaaaacccagagcaatactcttgatattgtctttcaaactgacctaacggggcaaaataaaggctggaagcttcgttaccatggagatcccatcccctgtcccaaagaaatcagtgctaattctatctgggagcccgaaaaggcaaaatacgtgttcaaagatgtcgtgaagataacctgtgtggatggattcgaagttgtggagggaaatgttggctcaacatcattctattccacttgtcaaagcaacggacagtggagcaattccaggctagagtgtcaacctgtggactgtggtgttccagaacccattgagaatggtaaagttgaagacccagaagacactgtattcggctccgtcatccactacacgtgcgaagagccatattactacatggaacaggaagaaggcggagagtatcactgtgctgctaatgggagctgggtgaatgaccagctgggtgtcgagcttccaaaatgtattccagtctgtggagtacccaccgagccctttaaagtacagcagaggatatttggaggatactctacaaagattcaaagttttccttggcaggtctactttgagtccccccgaggtggcggggctcttatcgatgagtactgggtgctgacggccgctcacgttgtggagggaaactctgacccagtgatgtatgtcgggtccacacttctgaaaatagagcggttgagaaatgcccagaggctcatcactgaacgtgtgattattcatcccagctggaaacaagaggacgacctgaatacacggacaaattttgacaatgacattgccctggtgcagctcaaagaccctgtgaaaatgggacccactgttgcccccatctgcctgccagaaaccttctcagactacaacccctcagaggttgacctggggctgatctctgggtggggccgaacagagattagaaccaatgttattcaactcagaggggcgaagttacccataacatctttagaaaagtgccagcaggtgaaagtggaaaacccgaaagcgaggtcaaacgactatgttttcactgacaacatgatctgtgctggggaaaagggtgtggacagctgtgaaggtgacagcggaggggcttttgctctgccggtccccaatgtcaaggaccccaaattctatgtggctggcctggtgtcctgggggaaaaagtgtgggacctatgggatctacacaaaggtaaagaactacgtggactggatcctgaaaactatgcaggagaatagtgggcccaagaaggactgatccgtagtaacaacacccctccaggactagcaaggtcatttttctcagatcctgggacggtcccattatttcaaaatgatggagagagggtgtgggagcatggttaacgttgaacatgattgtcaagaagcctgcttggaggcagagttgatcactgagccgtgttggttattcagttgctattgctaacaacatgcggaagcctttctgtcttgcttcatcccacagggatatcttaaacgatttccccctcatttaacccgcttgaaatccttattgcttacagtaaagcatgtttccaatctggttctggctgctcgagagcccagaaggagagggaaatttgagggtattttgtcatggaattcaggcatcgacaggttgtctgaaacactatgcagtcagggaacacagccttttttctaagtgagatttacccaatagctggaagtcagaattgactaccttagctttcctttgtgagttgtttcaatatgttccctagaaattagttttcttataatcctcctttgtatcatacaatgtaatgacttaataaaagagaaattgaacattg

SEQ ID NO: 2271 - protein, 695 aa, Rattus norvegicus
  misc_feature (1)..(695): Xaa=Unknown amino acid
MGKSPEMWCFVFFSLLASFSAEPTMYGEILSPNYPQAYPNEVVKTWDIEVPEGFGIHLYFTHLDMELSENCAYDSVQIISGGIEEERLCGQRSSKSPNSPTVEEFQFPYNRLQVVFTSDFSNEERFTGFAAYYSAVDVNECTDFTDVPCSHFCNNFIGGYFCSCPPEYFLHDDMRTCGVNCSGDVFTALIGEIASPNYPNPYPENSRCEYQIRLQEGFRLVLTIRREDFDVEPADSEGNCHDSLTFAAKNQQFGPYCGNGFPGPLTIKTQSNTLDIVFQTDLTGQNKGWKLRYHGDPIPCPKEISANSIWEPEKAKYVFKDVVKITCVDGFEVVEGNVGSTSFYSTCQSNGQWSNSRLECQPVDCGVPEPIENGKVEDPEDTVFGSVIHYTCEEPYYYMEQEEGGEYHCAANGSWVNDQLGVELPKCIPVCGVPTEPFKVQQRIFGGYSTKIQSFPWQVYFESPRGGGALIDEYWVLTAAHVVEGNSDPVMYVGSTLLKIERLRNAQRLITERVIIHPSWKQEDDLNTRTNFDNDIALVQLKDPVKMGPTVAPICLPETFSDYNPSEVDLGLISGWGRTEIRTNVIQLRGAKLPITSLEKCQQVKVENPKARSNDYVFTDNMICAGEKGVDSCEGDSGGAFALPVPNVKDPKFYVAGLVSWGKKCGTYGIYTKVKNYVDWILKTMQENSGPKKDX

SEQ ID NO: 2272 - DNA, 2647 bp, Homo sapiens
  ref <308>: DATABASE ACCESSION NUMBER: EMBL / J04080
  ref <309>: DATABASE ENTRY DATE: 2000-03-04
gggccggagttcctgcagagggagcgtcaaggccctgtgctgctgtccctgggggccagaggggttgcccagcatgcccactggcaggagagagggaactgacccacttgctcctaccagcttctgaaggctccaaagtccggagtgcagaaagccaggaccaagagacaggcagctcaccagggtggacaaatcgccagagatgtggtgcattgtcctgttttcacttttggcatgggtttatgctgagcctaccatgtatggggagatcctgtcccctaactatcctcaggcatatcccagtgaggtagagaaatcttgggacatagaagttcctgaagggtatgggattcacctctacttcacccatctggacattgagctgtcagagaactgtgcgtatgactcagtgcagataatctcaggagacactgaagaagggaggctctgtggacagaggagcagtaacaatccccactctccaattgtggaagagttccaagtcccatacaacaaactccaggtgatctttaagtcagacttttccaatgaagagcgttttacggggtttgctgcatactatgttgccacagacataaatgaatgcacagattttgtagatgtcccttgtagccacttctgcaacaatttcattggtggttacttctgctcctgccccccggaatatttcctccatgatgacatgaagaattgcggagttaattgcagtggggatgtattcactgcactgattggggagattgcaagtcccaattatcccaaaccatatccagagaactcaaggtgtgaataccagatccggttggagaaagggttccaagtggtggtgaccttgcggagagaagattttgatgtggaagcagctgactcagcgggaaactgccttgacagtttagtttttgttgcaggagatcggcaatttggtccttactgtggtcatggattccctgggcctctaaatattgaaaccaagagtaatgctcttgatatcatcttccaaactgatctaacagggcaaaaaaagggctggaaacttcgctatcatggagatccaatgccctgccctaaggaagacactcccaattctgtttgggagcctgcgaaggcaaaatatgtctttagagatgtggtgcagataacctgtctggatgggtttgaagttgtggagggacgtgttggtgcaacatctttctattcgacttgtcaaagcaatggaaagtggagtaattccaaactgaaatgtcaacctgtggactgtggcattcctgaatccattgagaatggtaaagttgaagacccagagagcactttgtttggttctgtcatccgctacacttgtgaggagccatattactacatggaaaatggaggaggtggggagtatcactgtgctggtaacgggagctgggtgaatgaggtgctgggcccggagctgccgaaatgtgttccagtctgtggagtccccagagaaccctttgaagaaaaacagaggataattggaggatccgatgcagatattaaaaacttcccctggcaagtcttctttgacaacccatgggctggtggagcgctcattaatgagtactgggtgctgacggctgctcatgttgtggagggaaacagggagccaacaatgtatgttgggtccacctcagtgcagacctcacggctggcaaaatccaagatgctcactcctgagcatgtgtttattcatccgggatggaagctgctggaagtcccagaaggacgaaccaattttgataatgacattgcactggtgcggctgaaagacccagtgaaaatgggacccaccgtctctcccatctgcctaccaggcacctcttccgactacaacctcatggatggggacctgggactgatctcaggctggggccgaacagagaagagagatcgtgctgttcgcctcaaggcggcaaggttacctgtagctcctttaagaaaatgcaaagaagtgaaagtggagaaacccacagcagatgcagaggcctatgttttcactcctaacatgatctgtgctggaggagagaagggcatggatagctgtaaaggggacagtggtggggcctttgctgtacaggatcccaatgacaagaccaaattctacgcagctggcctggtgtcctgggggccccagtgtgggacctatgggctctacacacgggtaaagaactatgttgactggataatgaagactatgcaggaaaatagcaccccccgtgaggactaatccagatacatcccaccagcctctccaagggtggtgaccaatgcattaccttctgttccttatgatattctcattatttcatcatgactgaaagaagacacgagcgaatgatttaaatagaacttgattgttgagacgccttgctagaggtagagtttgatcatagaattgtgctggtcatacatttgtggtctgactccttggggtcctttccccggagtacctattgtagataacactatgggtggggcactcctttcttgcactattccacagggataccttaattctttgtttcctctttacctgttcaaaattccatttacttgatcattctcagtatccactgtctatgtacaataaaggatgtttataagc

SEQ ID NO: 2273 - protein, 688 aa, Homo sapiens
  ref <308>: DATABASE ACCESSION NUMBER: SWISS-Prot / Q9UCV3
  ref <309>: DATABASE ENTRY DATE: 2002-06-15
MWCIVLFSLLAWVYAEPTMYGEILSPNYPQAYPSEVEKSWDIEVPEGYGIHLYFTHLDIELSENCAYDSVQIISGDTEEGRLCGQRSSNNPHSPIVEEFQVPYNKLQVIFKSDFSNEERFTGFAAYYVATDINECTDFVDVPCSHFCNNFIGGYFCSCPPEYFLHDDMKNCGVNCSGDVFTALIGEIASPNYPKPYPENSRCEYQIRLEKGFQVVVTLRREDFDVEAADSAGNCLDSLVFVAGDRQFGPYCGHGFPGPLNIETKSNALDIIFQTDLTGQKKGWKLRYHGDPMPCPKEDTPNSVWEPAKAKYVFRDVVQITCLDGFEVVEGRVGATSFYSTCQSNGKWSNSKLKCQPVDCGIPESIENGKVEDPESTLFGSVIRYTCEEPYYYMENGGGGEYHCAGNGSWVNEVLGPELPKCVPVCGVPREPFEEKQRIIGGSDADIKNFPWQVFFDNPWAGGALINEYWVLTAAHVVEGNREPTMYVGSTSVQTSRLAKSKMLTPEHVFIHPGWKLLEVPEGRTNFDNDIALVRLKDPVKMGPTVSPICLPGTSSDYNLMDGDLGLISGWGRTEKRDRAVRLKAARLPVAPLRKCKEVKVEKPTADAEAYVFTPNMICAGGEKGMDSCKGDSGGAFAVQDPNDKTKFYAAGLVSWGPQCGTYGLYTRVKNYVDWIMKTMQENSTPRED

SEQ ID NO: 2274 - DNA, 2908 bp, Rattus norvegicus; identical to SEQ ID NO: 2270
  ref <308>: DATABASE ACCESSION NUMBER: EMBL / D88250
  ref <309>: DATABASE ENTRY DATE: 1998-04-27

SEQ ID NO: 2275 - protein, 694 aa, Rattus norvegicus
  ref <308>: DATABASE ACCESSION NUMBER: SWISS-Prot / BAA25797
  ref <309>: DATABASE ENTRY DATE: 2003-02-01
MGKSPEMWCFVFFSLLASFSAEPTMYGEILSPNYPQAYPNEVVKTWDIEVPEGFGIHLYFTHLDMELSENCAYDSVQIISGGIEEERLCGQRSSKSPNSPTVEEFQFPYNRLQVVFTSDFSNEERFTGFAAYYSAVDVNECTDFTDVPCSHFCNNFIGGYFCSCPPEYFLHDDMRTCGVNCSGDVFTALIGEIASPNYPNPYPENSRCEYQIRLQEGFRLVLTIRREDFDVEPADSEGNCHDSLTFAAKNQQFGPYCGNGFPGPLTIKTQSNTLDIVFQTDLTGQNKGWKLRYHGDPIPCPKEISANSIWEPEKAKYVFKDVVKITCVDGFEVVEGNVGSTSFYSTCQSNGQWSNSRLECQPVDCGVPEPIENGKVEDPEDTVFGSVIHYTCEEPYYYMEQEEGGEYHCAANGSWVNDQLGVELPKCIPVCGVPTEPFKVQQRIFGGYSTKIQSFPWQVYFESPRGGGALIDEYWVLTAAHVVEGNSDPVMYVGSTLLKIERLRNAQRLITERVIIHPSWKQEDDLNTRTNFDNDIALVQLKDPVKMGPTVAPICLPETFSDYNPSEVDLGLISGWGRTEIRTNVIQLRGAKLPITSLEKCQQVKVENPKARSNDYVFTDNMICAGEKGVDSCEGDSGGAFALPVPNVKDPKFYVAGLVSWGKKCGTYGIYTKVKNYVDWILKTMQENSGPKKD

SEQ ID NO: 2276 - DNA, 1355 bp, Rattus norvegicus
  ref <308>: DATABASE ACCESSION NUMBER: EMBL / D88534
  ref <309>: DATABASE ENTRY DATE: 1999-01-21
atgctgatgctgtggacatttgcagtgctgctgggagcagtagctggaaaagaagtttgctttgacaaactcggctgcttcagtgatgatgccccgtggtcaggaaccatagacagacccctgaaagcactgccctggagcccagcacagatcaacacccgctttctcctctacaccaacgagaaccaagacaactaccagaaaattacttcagatgcatcgagtatcagaaactccaatttcaaaacgaacagaaaaacccgcatcattatccacggcttcattgacaagggagaggagaactggctatctgacatgtgcaagaacatgttcaaagtggagagtgtgaactgcatctgtgtggactggaaaggtggctcccgggctacatacacccaggctacccagaacgtccgggtcgtgggtgcagaagtggcattattggttaacgttctgaagtctgacctcggctactcacctgacaacgtccacctgattggccacagcctgggttcccacgttgctggggaggcaggaaagaggacattcggagctattgggaggatcacagggttggacgcggctgaaccttacttccagggcacacctgaagaagtccgtctggaccccaccgatgcccagtttgtggatgcaattcacacagatgctgcacccatcatccccaacttaggatttggaatgagccagactgtgggtcacctagatttctttcctaatggagggatggaaatgcctggatgtcagaagaatatcctttcccaaatcgttgacatcgacgggatctgggaaggaactcgcgactttgctgcctgtaaccacttgagaagctacaaatattacaccgacagtatcgtcaacccgactggcttctctggcttctcctgtagctcttacaatgttttttctgcaaataagtgcttcccatgtgggagtgaaggatgcccacagatgggtcactatgctgacaaataccctgggaagacaaaagaactctaccagaaattttacctgaacactggtgacaagagcaacttcgcacgttggcggtaccaggtgactgtcaccctctctggacagaaggtcactgggcacattctagtttctttgtttggaaatggaggaaactctaaacagtatgaagttttcaagggctctctgcatccaggtgacactcatgtcaaggaatttgactctgatatggatgttggagatttgcagaaagttaaatttatttggtacaacaatgtgatcaacccaactctacccaaagtgggagcatcaaggatttcagtggaacgaaatgacggcagagtgttcaacttctgtagtcaaga

SEQ ID NO: 2277 - protein, 451 aa, Rattus norvegicus
  ref <308>: DATABASE ACCESSION NUMBER: SWISS-Prot / BAA13637
  ref <309>: DATABASE ENTRY DATE: 2002-03-01
MLMLWTFAVLLGAVAGKEVCFDKLGCFSDDAPWSGTIDRPLKALPWSPAQINTRFLLYTNENQDNYQKITSDASSIRNSNFKTNRKTRIIIHGFIDKGEENWLSDMCKNMFKVESVNCICVDWKGGSRATYTQATQNVRVVGAEVALLVNVLKSDLGYSPDNVHLIGHSLGSHVAGEAGKRTFGAIGRITGLDAAEPYFQGTPEEVRLDPTDAQFVDAIHTDAAPIIPNLGFGMSQTVGHLDFFPNGGMEMPGCQKNILSQIVDIDGIWEGTRDFAACNHLRSYKYYTDSIVNPTGFSGFSCSSYNVFSANKCFPCGSEGCPQMGHYADKYPGKTKELYQKFYLNTGDKSNFARWRYQVTVTLSGQKVTGHILVSLFGNGGNSKQYEVFKGSLHPGDTHVKEFDSDMDVGDLQKVKFIWYNNVINPTLPKVGASRISVERNDGRVFNFCSQ

SEQ ID NO: 2278 - DNA, 1471 bp, Homo sapiens
  ref <308>: DATABASE ACCESSION NUMBER: Refseq / NM_000936
  ref <309>: DATABASE ENTRY DATE: 2002-11-05
ggaactgccacgatgctgccactttggactctttcactgctgctgggagcagtagcaggaaaagaagtttgctacgaaagactcggctgcttcagtgatgactccccatggtcaggaattacggaaagacccctccatatattgccttggtctccaaaagatgtcaacacccgcttcctcctatatactaatgagaacccaaacaactttcaagaagttgccgcagattcatcaagcatcagtggctccaatttcaaaacaaatagaaaaactcgctttattattcatggattcatagacaagggagaagaaaactggctggccaatgtgtgcaagaatctgttcaaggtggaaagtgtgaactgtatctgtgtggactggaaaggtggctcccgaactggatacacacaagcctcgcagaacatcaggatcgtgggagcagaagtggcatattttgttgaatttcttcagtcggcgttcggttactcaccttccaacgtgcatgtcattggccacagcctgggtgcccacgctgctggggaggctggaaggagaaccaatgggaccattggacgcatcacagggttggacccagcagaaccttgctttcagggcacacctgaattagtccgattggaccccagcgatgccaaatttgtggatgtaattcacacggatggtgcccccatagtccccaatttggggtttggaatgagccaagtcgtgggccacctagatttctttccaaatggaggagtggaaatgcctggatgtaaaaagaacattctctctcagattgtggacatagacggaatctgggaagggactcgagactttgcggcctgtaatcacttaagaagctacaaatattacactgatagcatcgtcaaccctgatggctttgctggattcccctgtgcctcttacaacgtcttcactgcaaacaagtgtttcccttgtccaagtggaggctgcccacagatgggtcactatgctgatagatatcctgggaaaacaaatgatgtgggccagaaattttatctagacactggtgatgccagtaattttgcacgttggaggtataaggtatctgtcacactgtctggaaaaaaggttacaggacacatactagtttctttgttcggaaataaaggaaactctaagcagtatgaaattttcaagggcactctcaaaccagatagtactcattccaatgaatttgactcagatgtggatgttggggacttgcagatggttaaatttatttggtataacaatgtgatcaacccaactttacctagagtgggagcatccaagattatagtggagacaaatgttggaaaacagttcaacttctgtagtccagaaaccgtcagggaggaagttctgctcaccctcacaccgtgttaggagactactgttatttgaccaatgaattgacttctaataaaatctagtggtgatgcaaaaa

SEQ ID NO: 2279 - protein, 465 aa, Homo sapiens
  ref <308>: DATABASE ACCESSION NUMBER: SWISS-Prot / P16233
  ref <309>: DATABASE ENTRY DATE: 2002-06-15
MLPLWTLSLLLGAVAGKEVCYERLGCFSDDSPWSGITERPLHILPWSPKDVNTRFLLYTNENPNNFQEVAADSSSISGSNFKTNRKTRFIIHGFIDKGEENWLANVCKNLFKVESVNCICVDWKGGSRTGYTQASQNIRIVGAEVAYFVEFLQSAFGYSPSNVHVIGHSLGAHAAGEAGRRTNGTIGRITGLDPAEPCFQGTPELVRLDPSDAKFVDVIHTDGAPIVPNLGFGMSQVVGHLDFFPNGGVEMPGCKKNILSQIVDIDGIWEGTRDFAACNHLRSYKYYTDSIVNPDGFAGFPCASYNVFTANKCFPCPSGGCPQMGHYADRYPGKTNDVGQKFYLDTGDASNFARWRYKVSVTLSGKKVTGHILVSLFGNKGNSKQYEIFKGTLKPDSTHSNEFDSDVDVGDLQMVKFIWYNNVINPTLPRVGASKIIVETNVGKQFNFCSPETVREEVLLTLTPC

SEQ ID NO: 2280 - DNA, 4562 bp, Rattus norvegicus
  ref <308>: DATABASE ACCESSION NUMBER: EMBL / D88672
  ref <309>: DATABASE ENTRY DATE: 1997-05-15
ggctccttgctgagttctgctccctctgcttccgaacccgctcgggcgccggggcccgcatccaaggtgctgggccccggacgtagtgccgctgaggtccggagccccgggaaccgggcggggacgttgtcaggctggagctgctcgggccttctgactcagccgctcatccagatttcaggatttctcttctgggcggggagcgcgtaacttcctcattcccgccgggaccctcgcttccagtcagtctggcctgactttgagccctgctgtcaccagggctcctcccttggacttaacctcgccccagttcgaggccatcccatcttggctaggatgactgtaacccagacggacctctttccctatggggactacctgaactccagccagttgcacatggagccagatgaggttgacactctgaaggaaggagaggatccagctgatcgaatgcatccctttctggccatctatgaccttcagcctctgagagcacaccccttggtgtttgctcctggggtccctgttatagcccaggtggtaggcaccgaaagatacaccagcggatccaaggtgggaacctgtactctttattctgttcgattgacccatggcgactttacctggacaaccaagaagaaattccgacactttcaggagctgcatcgggacctccagagacacaaagtcttgatgagtctgctccctctggctcgctttgctgcggcccattctccagcccgagaggcagccaatgagaatattccctccctaccccgaggaggttccgagggctctgccagacacacagccagcaagcagaagtacctggaaaattacctcaaccgcctcctgaccatgtctttctatcgaaattaccatgccatgacagaatttctggaagtcagtcaactttcctttatcccagaccttggctccaaaggactggaaggggtgatccggaagcgctcaggtgggcatcgagttcctggcttcacctgctgtggtcgagaccaagtttgttatcgatggtccaagaggtggctggtggtgaaggactccttcctgctgtacatgcgtccagagactggcgccatctcatttgttcaactttttgaccctggctttgaggtccaggtggggaaaaggagcacagaggcacggtatggggtgaggatcgacacctcccacaggtccctgatcctcaaatgcagcagctaccggcaggcacggtggtggggccaggagatcacggagctggcacagggtccgggcagagattttctacagctacaccagcatgacagctatgccccaccccggcctggcaccctggcccggtggtttgtgaatggggcaggttactttgctgctgtggcagatgccatcctccgagctcgagaggagattttcatcacagactggtggctgagtcctgagatttacctgaagcgtccagcccactcagatgactggagactggacattatgctcaagaggaaggcggaagaaggtgtccgtgtttccatactgctgtttaaggaagtggaactggccttgggcatcaacagtggctatagcaagaggacactgatgctactgcaccccaacataaaggtgatgcgacacccagaccttgtaacattgtgggctcatcatgagaagctcctggtggtagaccaagcggtggcattcttgggtgggctggaccttgcctatggccgctgggatgatgtgcagtaccgactgactgacctgggggacccctccgaatctgcagattcacagactcccacgccaggttcagatcctgcagccactccagacctctcgcataatcacttcttctggctgggaaaagactacagcaacctcattaccaaggactgggtacagctggaccggccttttgaagatttcatcgacagggagaccacacccagaatgccatggagggatgttggagtggttgtacatggagtagctgcccgggaccttgcccggcacttcatccagcgctggaacttcaccaagaccatcaaggccagatacaagatacctcagtacccctacctgctgcctaagtccgccagcactgcaaaccatcttcccttcataatcccaggcgcgcagtgcgccactgtgcaggtcttgcggtctgtggatcgatggtcagcagggactttggagagctccatcctcaatgcctacctacataccatccgagagagccagcactttctctacattgagaatcagttcttcatcagctgctcagatgggcgtacagttctgaacaaggtgggcgatgagattgtggacaggatcctaaaggctcatgaacaggggcagtgtttccgagtctacgtgcttctgcctttgctccctggctttgagggggacatctccacagggggtggcaactccatccaggccattctgcacttcacctacaggaccctgtgtcgtggggaatattcaatcttacatcgtctcaaagcagccatggggacagcatggcgggattacatgtccatctgtgggcttcgcacacatggagagctgggcgggcacccgatctccgagctcatctatatccacagcaagttgctcattgcagatgacagaacagtcatcatcggctctgcaaacatcaacgacaggagcttgctggggaagcgcgacagtgagctagccatactgatcgaggacacagaaatggagccatccctcatggatggggtggagtaccaggcaggcagatttgccttgagtctgcggaagcactgtttcagtgtcattcttggggcaaatacctggccagacctggatctccgagaccctgtctgtgatgacttcttccagctgtggcaggaaacagcggagaacaatgccaccatctatgagcagatcttccgctgcctgccgtccaatgctactcgttccctgcgggctctccgggagtacgtggctgtggagtccttggctacagtcagcccttctttggctcagtctgagcttgcccacatccggggccacttagttcacttccccctcaagtttctggaggatgagtccttgttgcctccactggggagcaaagaggggatgatacctttagaagtgtggacatagctggggcttccgctcagcggcagttgctagccgttgggccctatcgtgcctggatccttgccccacaccctgagttctgagggcagtgccctttgatccttggggaggacatctctgaggactcctagagaatcacagaggacctttacttgagaagtagccaaagggagcactcccaagcctggcctgggaaagcaggagagagttctagagaggtttgccttcttgtcaccatgttcagaccactatgccacagaaccctagtcctacgaggaggcctgaggtcaagccttttattccaggaaaagggactcctgccctgggtcgtcttcatctcactcttcctcctgcccttgaacccctacatgccctagggcctctcccagcccgttgctgcaaagatgggggggggggagtatagagccactttgactgcagtccccaccagcggtggtgaggacaccttaactgcctccaccagcctgctgacagacactaactctgtaccggttcaccaagcatttcataaataaatgtgtagaaaaggccatgcttcttcttggagatggatgttgtcttaggtgctccctgcctcagttctaacttctttcttctgcttgcatctctgtgcttgcttgccccccctttctccctccctccctttccttcttccttttccttccttcctccctccctttccttcttccccttccttccttccttccttccttccttccttccttccttccttccttccagggggtggggtggggttgatttccaaatagagtttctctgtgtagccctagctgtcctggaactctgttaacaaggctgccctcgaactcggagagatccacctgcctctgcctcctaagtgcttggacataggcttgggccacagctccatctctgtgcttctcagcagcttctgagttcattcacctaactcctgaagatctgggctaattctgtgtgtgtgtgtgtgtgtgtgtgtgtgtgtgtgtgtgtgtgtgtgtgcgtgatacatatcttcataacttttcatatgtctgaagtattttgcaattagaaaactgctgaacacagatagccacagaagcaggaagaaaataaggagaatggagaattaggaaggcatcatagaaggcagtgggggtgggtgagaatgtgaccagaaggtattaggttgctctcccatccctctagttctcttgagaagtgaattctagggttagtgagagatgcttcagcagaggaagatgcttcctgttaggcttaacaacttgagttcgatccccaggacccacagtctaggaggagaaaacagtctcctgaaagttgtcctctgacctccacacacagaccatggcattcctgtgtgtgctcacaataaataaattcattttcaaaatcaaaaaaaa

SEQ ID NO: 2281 - protein, 933 aa, Rattus norvegicus
  ref <308>: DATABASE ACCESSION NUMBER: SWISS-Prot / P70498
  ref <309>: DATABASE ENTRY DATE: 2002-06-15
MTVTQTDLFPYGDYLNSSQLHMEPDVVDTLKEGEDPADRMHPFLAIYDLQPLRAHPLVFAPGVPVIAQVVGTERYTSGSKVGTCTLYSVRLTHGDFTWTTKKKFRHFQELHRDLQRHKVLMSLLNLARFAAAHSPAREAANENIPSLPRGGSEGSARHTASKQKYLENYLNRLLTMSFYRNYHAMTEFLEVSQLSFIPDLGSKGLEGVIRKRSGGHRVPGFTCCGRDQVCYRWSKRWLVVKDSFLLYMRPETGAISFVQLFDPGFEVQVGKRSTEARYGVRIDTSHRSLILKCSSYRQARWWGQEITELAQGPGRDFLQLHQHDSYAPPRPGTLARWFVNGAGYFAAVADAILRAREEIFITDWWLSPEIYLKRPAHSDDWRLDIMLKRKAEEGVRVSILLFKEVELALGINSGYSKRTLMLLHPNIKVMRHPDLVTLWAHHEKLLVVDQAVAFLGGLDLAYGRWDDVQYRLTDLGDPSESADSQTPTPGSDPAATPDLSHNHFFWLGKDYSNLITKDWVQLDRPFEDFIDRETTPRMPWRDVGVVVHGVAARDLARHFIQRWNFTKTIKARYKIPQYPYLLPKSASTANHLPFIIPGGQCATVQVLRSVDRWSAGTLESSILNAYLHTIRESQHFLYIENQFFISCSDGRTVLNKVGDEIVDRILKAHEQGQCFRVYVLLPLLPGFEGDISTGGGNSIQAILHFTYRTLCRGEYSILHRLKAAMGTAWRDYMSICGLRTHGELGGHPISELIYIHSKLLIADDRTVIIGSANINDRSLLGKRDSELAILIKDTEMEPSLMDGVEYQAGRFALSLRGRCFSVILGANTWPDLDLRDPVCDDFFQLWQETAENNATIYEQIFRCLPSNATRSLRALREYVAVESLATVSPSLAQSELAHIRGHLVHFPLKFLEDESLLPHWGAKRGMIPLEVWT

SEQ ID NO: 2282 - DNA, 3450 bp, Homo sapiens
  ref <308>: DATABASE ACCESSION NUMBER: EMBL / AF038441
  ref <309>: DATABASE ENTRY DATE: 2000-03-03
tactccactgaataatctcctagaggccctcccgtccgctcttggctcgggaacccccgcgggcgctggctccgtctgccagggatgacggcgacccctgagagcctcttccccactggggacgaactgggctccagccagctccagatggagtccgatgaggtggacaccctgaaggagggagaggacccagccgaccggatgcacccgtttctggccatctatgagcttcagtctctgaaagtgcaccccttggtgttcgcacctggggtccctgtcacagcccaggtggtgggcaccgaaagatataccagcggatccaaggtgggaacctgcactctgtattctgtccgcttgactcacggcgacttttcctggacaaccaagaagaaataccgtcattttcaggagctgcatcgggacctcctgagacacaaagtcttgatgagtctgctccctctggctcgttttgccgttgcctattctccagcccgagatgcaggcaacagagagatgccctctctaccccgggcaggtcctgagggctccaccagacatgcagccagcaaacagaaatgcctggagaattacctcaaccgtctcttgaccatgtctttctatcgcaactaccatgccatgacagagttcctggaagtcagtcagctgtcctttatcccggacttgggccgcaaaggactggaggggatgatccggaagtgctcaggtggccaccgtgttcctggcctcacctgctgtggccgagaccaagtttgttatcgctggtccaagaggtggctggtggtgaaggactccttcctgctgtacatgtgcctcgagacaggtgccatctcatttgttcagctctttgaccctggctttgaggtgcaagtggggaaaaggagcacggaggcacggcacggcgtgcggatcgatacctcccacaggtccttgattctcaagtgcagcagctaccggcaggcacggtggtgggcccaagagatcactgagctggcacagggcccaggcagagacttcctacagctgcaccggcatgacagatacgccccaccccggcctgggaccttggcccggtggtttgtgaatggggcaggttactttgctgctgtggcagatgccatccttcgagctcaagaggagattttcatcacagactggtggttgagtcctgaggtttacctgaagcgtccggcccattcagatgactggagactggacattatgctcaagaggaaggcggaggagggtgtccgtgtgtctattctgctgtttaaagaagtggaattggccttgggcatcaacagtggctatagcaagagggcgctgatgctgctgcaccccaacataaaggtgatgcgtcacccagaccaagtgacgttgtgggcccatcatgagaagcccctggtggtggaccaagtggtagcattcctggggggactggaccttgcctatggccgctgggatgacctgcactaccgactgactgaccttggagactcctctgaatcagctgcttcccagcctcccaccccgcgcccagactcaccagccaccccagacctctctcacaaccaattcttctggctgggcaaggggtacagcaatcttatcaccaaggactgggtgcagctggaccggcctttcgaagatttcattgacagggagacgacccctcggatgccatggcgggacgttggggtggtcgtccatggcctaccggcccgggaccttgcccggcacttcatccagcgctggaatttcaccaagaccaccaaggccaagtacaagactcccacatacccctacctgcttcccaagtctaccagcacggccaatcagctccccttcacacttccaggagggcagtgcaccaccgtacaggtcttgcgatcagtggaccgctggtcagcagggactctggagaactccatcctcaatgcctacctgcacaccatcagggggagccagcacttcctctacattgagaatcagttcttcattagctgctcagatgggcggacggttctgaacaaggtgggcgatgagattgtggacagaatcctgaaggcccacaaacaggggtggtgttaccgagtctacgtgcttttgcccttactccctggcttcgagggtgacatctccacgggcggtggcaactccatccaggccattctgcactttacttacaggaccctgtgtcgtggggagtattcaatcctgcatcgccttaaagcagccatggggacagcatggcgggactatatttccatctgcgggcttcgtacacacggagagctgggcgggcaccccgtctcggagctcatctacatccacagcaaggtgctcatcgcagatgaccggacagtcatcattggttctgcaaacatcaatgaccggagcttgctggggaagcggggcagtgagctggccgtgctgatcgaggacacagagacggaaccatccctcatgaatggggcagagtatcaggcgggcagtgtgattcttggagcaaatacccggccagacttggatctccgagaccccatctgtgatgacttcttccagttgtggcaagacatggctgagagcaacgccaatatctatgagcagatcttccgctgcctgccatccaatgccacgcgttccctgcggactctccgggagtacgtggccgtggagcccttggccacggtcagtccccccttggctcggtctgagctcacccaggtccagggccacctggtccacttccccctcaagttcctagaggatgagtctttgctgcccccgctgggtagcaaggagggcatgatccccctagaagtgtggacatagttgaggcccccgtcagggagaggtcaccagctgctgtgccccaccacgtctggctccctgccccttaaccccaaggactgagggcagtgccctttgagatctggggaggcaggcattcctgaagggaactagaggtgttacagcggacccttacgtgagaaatagctgaaaagggcactcccaaccctgggctggggaggaggagagagtcccagagctcatcccccctgctgcccagtgcaaaccacttctccatgctgcaaaggagaagcacagctcctgccagggtgagcagggtcaagcctcttattccaggagaagggggctctgccccaggccctactacccattgttcccttcctcttcctgcccttgaaccccctccctgtcccagggccctcccagcccattgctgccaaggtggagggaaggataaagccacttctggcttcagcccccaccaggggaaggaaggagggcacattaactccctccaccagcctgctgacagacactaactttgtatccgttcaataagcatttcataaataaaggtgtagaaaaaaaaaaaaaaaaaaaaaaaaaaaaaaaaaaaaa

SEQ ID NO: 2283 - protein, 933 aa, Homo sapiens
  ref <308>: DATABASE ACCESSION NUMBER: SWISS-Prot / O14939
  ref <309>: DATABASE ENTRY DATE: 2002-06-15
MTATPESLFPTGDELDSSQLQMESDEVDTLKEGEDPADRMHPFLAIYELQSLKVHPLVFAPGVPVTAQVVGTERYTSGSKVGTCTLYSVRLTHGDFSWTTKKKYRHFQELHRDLLRHKVLMSLLPLARFAVAYSPARDAGNREMPSLPRAGPEGSTRHAASKQKYLENYLNRLLTMSFYRNYHAMTEFLEVSQLSFIPDLGRKGLEGMIRKRSGGHRVPGLTCCGRDQVCYRWSKRWLVVKDSFLLYMCLETGAISFVQLFDPGFEVQVGKRSTEARHGVRIDTSHRSLILKCSSYRQARWWAQEITELAQGPGRDFLQLHRHDSYAPPRPGTLARWFVNGAGYFAAVADAILRAQEEIFITDWWLSPEVYLKRPAHSDDWRLDIMLKRKAEEGVRVSILLFKEVELALGINSGYSKRALMLLHPNIKVMRHPDQVTLWAHHEKLLVVDQVVAFLGGLDLAYGRWDDLHYRLTDLGDSSESAASQPPTPRPDSPATPDLSHNQFFWLGKDYSNLITKDWVQLDRPFEDFIDRETTPRMPWRDVGVVVHGLPARDLARHFIQRWNFTKTTKAKYKTPTYPYLLPKSTSTANQLPFTLPGGQCTTVQVLRSVDRWSAGTLENSILNAYLHTIRESQHFLYIENQFFISCSDGRTVLNKVGDEIVDRILKAHKQGWCYRVYVLLPLLPGFEGDISTGGGNSIQAILHFTYRTLCRGEYSILHRLKAAMGTAWRDYISICGLRTHGELGGHPVSELIYIHSKVLIADDRTVIIGSANINDRSLLGKRDSELAVLIEDTETEPSLMNGAEYQAGRFALSLRKHCFGVILGANTRPDLDLRDPICDDFFQLWQDMAESNANIYEQIFRCLPSNATRSLRTLREYVAVEPLATVSPPLARSELTQVQGHLVHFPLKFLEDESLLPPLGSKEGMIPLEVWT

SEQ ID NO: 2284 - DNA, 1523 bp, Rattus norvegicus
  ref <308>: DATABASE ACCESSION NUMBER: EMBL / D88890
  ref <309>: DATABASE ENTRY DATE: 1998-09-04
acttctacatcaagatccgtcctggggagtatgagcagttcgagagcaccatcggcttcaagctccctaaccttcaccttcattgcgccacggcggctttcggacgagcctctgactcgcgcacgcgttagactccttggtccgtgttacaagacgggtcgggtgggtagccgacatcgccgccgaccccgtgccgtcgcagccaagatgtccggtcccaccaccgacacgccggccgccatccagatctgccggatcatgcgtccggatgatgccaacgtggccggcaatgttcacggagggaccattctaaagatgatcgaggaggctggggtcatcatcagcacccggcactgtaacagccagaatggggagcgctgtgtggctgccctggcccgggtggagcgcactgacttcctgtcgcccatgtgcatcggtgaggtggctcacgtcagcgcagagatcacctatacttccaagcactctgtggaggtccaggtccacgtgttgtcggagaacatcctcacaggtaccaaaaagctgaccaataaggccaccttgtggtatgtgcccctgtcattgaagaatgtggacaaggtccttgaggtgcctcctattgtgtatttacggcaggaacaggaggaggagggtcggaaacgctatgaagcccagaagctagaacgcatggagaccaagtggaggaacggagacattgtccagcccatcctgaacccagagccgaacacagtgagctacagccagtccagcctgatccacctggtggggccctcagactgcactcttcatggcttcgtgcacggaggtgtcaccatgaagctcatggatgaggtggccgggattgtggctgcgcgccactgcaagaccaatatagtgactgcctctgtggatgctattaatttccatgacaagatccggaaaggctgtgtcatcaccatctctggacgcatgaccttcacaagcaataagtctatggaaattgaggtcctggtggacgctgaccctgtggtggacaactcacagaagcgctaccgggctgccagtgccttcttcacctacgtgtccctgaatcaggagggcaagccgctgcctgtgcctcagcttgtgccggagacggaggacgagaagaagcgttttgaagaaggcaaaggccgctatctgcagatgaaggcgaagcgacagggccatacagagcctcagccctagatgtcttcctccctcccatcctgtcccgtcctgggtcagcacagttgtggcagtagtcctgtgtgcagtcacttagaagtcgcccccttggccaaaccccgatttcctttgagagctggtgttgtgaagtaccgtgtgacagtgttacctgtggcctgttcccaaaacctgtgcaccaaagctttatttatatccctccagtccctgtcccatgttgtcccaaaggccatcgtggacaccagagcacactgactggcctggagaagccagcaccactaataaagctgctgtctggctgg

SEQ ID NO: 2285 - protein, 338 aa, Rattus norvegicus
  ref <308>: DATABASE ACCESSION NUMBER: SWISS-Prot / BAA19626
  ref <309>: DATABASE ENTRY DATE: 2002-06-15
MSGPTTDTPAAIQICRIMRPDDANVAGNVHGGTILKMIEEAGVIISTRHCNSQNGERCVAALARVERTDFLSPMCIGEVAHVSAEITYTSKHSVEVQVHVLSENILTGTKKLTNKATLWYVPLSLKNVDKVLEVPPIVYLRQEQEEEGRKRYEAQKLERMETKWRNGDIVQPILNPEPNTVSYSQSSLIHLVGPSDCTLHGFVHGGVTMKLMDEVAGIVAARHCKTNIVTASVDAINFHDKIRKGCVITISGRMTFTSNKSMEIEVLVDADPVVDNSQKRYRAASAFFTYVSLNQEGKPLPVPQLVPETEDEKKRFEEGKGRYLQMKAKRQGHTEPQP

SEQ ID NO: 2286 - DNA, 981 bp, Rattus norvegicus
  ref <308>: DATABASE ACCESSION NUMBER: EMBL / D89069
  ref <309>: DATABASE ENTRY DATE: 1999-05-26
tcctttggtctccgacggcctttctacccacacgcagccatgtcttccgacagacccgtggcactggtgactggtgctaacaaaggaatcggattcgcgatcgtacgtgatctctgtcgtaaattcttgggggacgtggtcctcacggcgcgggacgagtcacggggccacgaggcggtgaagcagctgcagaccgagggcctgagcccacgcttccaccagctggacatcgacaacccgcagagcatccgcgcgctgcgtgactttctgcttcaggagtacggaggactgaacgtgctggtcaacaatgcgggcatcgccttcaaagttgttgaccccacccccttccacattcaagcagaggtgacaatgaaaaccaacttttttggtacccaagatgtctgcaaggagctactccctataataaaaccccaaggcagagtggtgaatgtatcaagcggcatgagtcgcagggccctgaaaagctgcagcccggagctgcagcagaagtttcgaagtgagaccatcactgaggaagagctggtggggctcatgaacaagtttatagaggatgcaaagaaaggagtccatgcgaaagaaggctggcccaatagtgcatatggggtcaccaagataggggtgacagtcctgtccagaatctatgccaggaaactcaatgaggagaggagagaggacaagatcctcctgaatgcctgctgccctgggtgggtcagaaccgacatgacaggaccagaagccaccaaaagcccagaagaaggagcagagacccccgtgtacttggcccttttgcctccaggtgcagaggggcctcacgggcagtttgttcaagataaaaaagttgaaccatggtgaatccaactctcacccccaccccttctatcctgacttggtgaaagccaagggacatttataatataccatcacttctggaaaaataaacataactaagtctttaagcac

SEQ ID NO: 2287 - protein, 276 aa, Rattus norvegicus
  ref <308>: DATABASE ACCESSION NUMBER: SWISS-Prot / P47727
  ref <309>: DATABASE ENTRY DATE: 2001-10-16
SSDRPVALVTGANKGIGFAIVRDLCRKFLGDVVLTARDESRGHEAVKQLQTEGLSPRFHQLDIDNPQSIRALRDFLLQEYGGLNVLVNNAGIAFKVVDPTPFHIQAEVTMKTNFFGTQDVCKELLPIIKPQGRVVNVSSSVSLRALKSCSPELQQKFRSETITEEELVGLMNKFIEDAKKGVHAKEGWPNSAYGVTKIGVTVLSRIYARKLNEERREDKILLNACCPGWVRTDMAGPKATKSPEEGAETPVYLALLPPGAEGPHGQFVQDKKVEPW

SEQ ID NO: 2288 - DNA, 1209 bp, Homo sapiens
  ref <308>: DATABASE ACCESSION NUMBER: EMBL / J04056
  ref <309>: DATABASE ENTRY DATE: 2000-03-04
cagactcgagcagtctctggaacacgctgcggggctcccgggcctgagccaggtctgttctccacgcaggtgttccgcgcgccccgttcagccatgtcgtccggcatccatgtagcgctggtgactggaggcaacaagggcatcggcttggccatcgtgcgcgacctgtgccggctgttctcgggggacgtggtgctcacggcgcgggacgtgacgcggggccaggcggccgtacagcagctgcaggcggagggcctgagcccgcgcttccaccagctggacatcgacgatctgcagagcatccgcgccctgcgcgacttcctgcgcaaggagtacgggggcctggacgtgctggtcaacaacgcgggcatcgccttcaaggttgctgatcccacaccctttcatattcaagctgaagtgacgatgaaaacaaatttctttggtacccgagatgtgtgcacagaattactccctctaataaaaccccaagggagagtggtgaacgtatctagcatcatgagcgtcagagcccttaaaagctgcagcccagagctgcagcagaagttccgcagtgagaccatcactgaggaggagctggtggggctcatgaacaagtttgtggaggatacaaagaagggagtgcaccagaaggagggctggcccagcagcgcatacggggtgacgaagattggcgtcaccgttctgtccaggatccacgccaggaaactgagtgagcagaggaaaggggacaagatcctcctgaatgcctgctgcccagggtgggtgagaactgacatggcgggacccaaggccaccaagagcccagaagaaggtgcagagacccctgtgtacttggcccttttgcccccagatgctgagggtccccatggacaatttgtttcagagaagagagttgaacagtggtgagctgggctcacagctccatccatgggccccattttgtaccttgtcctgagttggtccaaagggcatttacaatgtcataaatatccttatataagaaaaaaaatgatctcttatcaattagcactcactaatgtactactaattgagcaacctacgcactcagttgactacgtaaatctgtcaggtcttttgtgatttcctctgatgcaggagaggaaaaattgtaattgatgaaaataatgaatgaaaatcaacagatgaataaatggttctttataagtg

SEQ ID NO: 2289 - protein, 276 aa, Homo sapiens
  ref <308>: DATABASE ACCESSION NUMBER: SWISS-Prot / P16152
  ref <309>: DATABASE ENTRY DATE: 2001-10-16
SSGIHVALVTGGNKGIGLAIVRDLCRLFSGDVVLTARDVTRGQAAVQQLQAEGLSPRFHQLDIDDLQSIRALRDFLRKEYGGLDVLVNNAGIAFKVADPTPFHIQAEVTMKTNFFGTRDVCTELLPLIKPQGRVVNVSSIMSVRALKSCSPELQQKFRSETITEEELVGLMNKFVEDTKKGVHQKEGWPSSAYGVTKIGVTVLSRIHARKLSEQRKGDKILLNACCPGWVRTDMAGPKATKSPEEGAETPVYLALLPPDAEGPHGQFVSEKRVEQW

SEQ ID NO: 2290 - DNA, 2632 bp, Rattus norvegicus
  ref <308>: DATABASE ACCESSION NUMBER: EMBL / D89340
  ref <309>: DATABASE ENTRY DATE: 2000-03-13
ctgcagcagggctcatggcagatacccagtacatcctgcccaatgacatcggtgtgtctagcctggactgccgggaggcattccgcctgctgtcacccacagagcgcctctatgcccatcacctgtctagagccgcttggtatggaggcctggctgtgctgctccagacatctcctgaagccccctacatctatgccctgcttagccgcctcttccgtgcccaggaccctgaccagctacgccaacatgccctggctgagggcctgactgaagaagagtatcaggcattcctggtctacgctgcaggggtctactccaacatgggcaactataagtccttcggtgacaccaagtttgtccctaacctgcccaaggaaaagctggagcgtgtgatccttgggagtaaggctgcccaacagcatccagaagaagtcaggagcctttggcagacctgtggggagcttatgttctccctggaaccaaggcttcgacatcttgggctggggaaggagggagtcaccacctatttctctggggattgtgccatggaagatgccaagctggcccaggacttcctggactctcagaacctcagtgcatacaacacccggctcttcaaggtggtcggccaggaagggaagtaccactatgaggtgcgactggcttcagtactcaacacagaacctgctctcgactctgagttgacttccaagctgaagagctacgagttccaggggaatcatttccaggtcacccgtggggactatgcccccatcctccagaaggtggtagaacacttggagaaagctaaggcttatgcagccaatagccaccaggagcaaatgctggcccagtatgtggagagcttcacccagggttccattgaggcccataagaggggctcccgcttctggattcaggacaaaggtcccattgtagagagttacattggcttcattgagagctaccgtgacccctttggctcccgaggagaatttgaaggcttcgtggccatggtaaacaaagacatgagtgcaaagttcgagcggctggttgcaagtgctgagcagctgctgaaggagctgccttggcctcctgcctttgagaaggacaagttcctcacccctgacttcacttccctggatgtccttacctttgccggctctggcatccctgcaggcatcaacatccccaactatgatgacctgagacagacagagggctttaagaatgtgtctctggggaatgtgctggctgtggcctatgccacaaagcgggagaaactcaccttcatggaggaagaagacaaggacctgtacatccgctggaaggggccgtcctttgatgtgcaggtggggttacatgagctgttgggccatggcagcggcaagctctttgtacaggatgagaaaggtgctttcaactttgaccaggagacagtgatcaacccagagactggggagcagatccagagctggtaccggagtggagagacatgggatagcaaatttagcaccattgcctccagctacgaagagtgccgggctgagagcgtgggcctctacctctgtctcaacccccaagtacttcagatctttggctttgagggaactgacgcagaagatgtcatctatgtgaactggctcaacatggtccgggctgggctgttggctttggagttctacaccccagagacggccaactggcgacaggcccacatgcaggcccggtttgtgatcctgagggttttgctggaagctggcgaaggactcgttaccgtcacccccaccacaggctctgatgggcgcccagatgctcgtgtccacctggaccgcagcaagatccggtcagtgggcaaacctgctttggagcggttcctccggagactgcaggtgctgaagtccacaggggatgtggttgcagggcgcgccctgtacgagggctatgcggcggtcactgacgcacccccagagtgcttcctcactctaagggacacggtattgctgcgcaaggaatcccggaagcttattgtccagcccaacactcgcctggaaggctcagaagtgcaacttgtagagtatgaggcctcagcggctggtctcatccgatccttctgtgaacggtttccggaggatgggcctgagttggaggaggttcttacccagctggccacagcagatgctcaattctggagggatcaggtccaggaggccccatctggccaggcttgagaagatctgtgtggcatctcccctttcatcaaaccagggctgtctgtggccctgaattgtgtttaggaggtgggggaagggcaggagctcggactttggtgctacctcagctgagggtggtgatgctaaccccttccatttgtcagcactttccagtttaccattatgtcctcatttcctggatctgcactgccatctgtggtgggagctcaacagggtgcctagtctggttttccaaatgggaaggtggcagttctgagaagtaactgttctagatccagcaggtggcatgtgacagagccagggctcaaagcattctcaccaaatccagtgctcttcgtgtattaccttttatagccagaaaaataaatatgacaaccaccaaaaaaaaaaaaaaaaaa

SEQ ID NO: 2291 - protein, 738 aa, Rattus norvegicus
  ref <308>: DATABASE ACCESSION NUMBER: SWISS-Prot / O55096
  ref <309>: DATABASE ENTRY DATE: 2002-06-15
MADTQYILPNDIGVSSLDCREAFRLLSPTERLYAHHLSRAAWYGGLAVLLQTSPEAPYIYALLSRLFRAQDPDQLRQHALAEGLTEEEYQAFLVYAAGVYSNMGNYKSFGDTKFVPNLPKEKLERVILGSKAAQQHPEEVRSLWQTCGELMFSLEPRLRHLGLGKEGVTTYFSGDCAMEDAKLAQDFLDSQNLSAYNTRLFKVVGQEGKYHYEVRLASVLNTEPALDSELTSKLKSYEFQGNHFQVTRGDYAPILQKVVEHLEKAKAYAANSHQEQMLAQYVESFTQGSIEAHKRGSRFWIQDKGPIVESYIGFIESYRDPFGSRGEFEGFVAMVNKDMSAKFERLVASAEQLLKELPWPPAFEKDKFLTPDFTSLDVLTFAGSGIPAGINIPNYDDLRQTEGFKNVSLGNVLAVAYATKREKLTFMEEEDKDLYIRWKGPSFDVQVGLHELLGHGSGKLFVQDEKGAFNFDQETVINPETGEQIQSWYRSGETWDSKFSTIASSYEECRAESVGLYLCLNPQVLQIFGFEGTDAEDVIYVNWLNMVRAGLLALEFYTPETANWRQAHMQARFVILRVLLEAGEGLVTVTPTTGSDGRPDARVHLDRSKIRSVGKPALERFLRRLQVLKSTGDVVAGRALYEGYAAVTDAPPECFLTLRDTVLLRKESRKLIVQPNTRLEGSEVQLVEYEASAAGLIRSFCERFPEDGPELEEVLTQLATADAQFWRDQVQEAPSGQA

SEQ ID NO: 2292 - DNA, 1292 bp, Homo sapiens
  ref <308>: DATABASE ACCESSION NUMBER: EMBL / AK021449
  ref <309>: DATABASE ENTRY DATE: 2002-08-06
gagtctgcgaacggagcagctgctgcagcagggcccatggcggacacccagtacatcctgcccaatgacatcggcgtgtctagcctggactgccgtgaggccttccgcctgctgtcacccacagagcgcctctatgcctaccacctgtcccgtgccgcctggtacggaggcctggctgtgctgcttcagacctcccctgaggccccctacatctatgctctgctcagccgcctcttccgcgcccaggaccccgaccagctgcgccaacatgccctggctgaaggccttaccgaggaggagtatcaggcgttcctggtctatgccgcgggtgtttactccaacatgggcaactacaagtcctttggtgacaccaagtttgttcccaacttgcccaaggaaaagctggaacgggtgatcctagggagtgaggctgctcagcagcacccagaagaagtcaggggcctctggcagacctgcggggagcttatgttctctctggagccaaggcttcgacacctcggactggggaaggagggaatcaccacctatttctctgggaattgtaccatggaagatgcccgggtccgcctcgaccgcagcaagatccggtctgtgggcaagcctgctctagagcgcttcctgcggagacttcaggtgctgaagtccacaggggatgtggccggagggcgggccctgtacgaggggtatgcaacagtcactgatgcgccccccgagtgcttcctcaccctcagggacacggtgctgctgcgtaaggaatctcggaagctcattgttcagcccaacactcgccttgaaggctcagacgtgcagcttctggaatacgaggcgtcagctgctggcctcatccgatccttctctgagcgtttcccagaggatggacccgagttggaggagatcctcacacagctggccacagccgatgcccgattctggaagggccccagtgaggccccatctggccaagcttgaggaagatgtgtggccttgcccccaattccatcagaccaaggctgcaagtggccctccattcgtcactttccagcctgccaattgcttcccctctgtgatctcatttcatctgcactgccatacgtggagtgagcaagacagggcttaccatcctgtctaccagatgaggaaatggcagttctgagaagtcactggtctagatcccgcaggtggcacgtgacagctagggttcaaaacgttctcaccaaatccaatgctcctcacatattaattttataaccagacaaataaatattagagac

SEQ ID NO: 2293 - protein, 737 aa, Homo sapiens
  ref <308>: DATABASE ACCESSION NUMBER: SWISS-Prot / Q9NY33
  ref <309>: DATABASE ENTRY DATE: 2002-06-15
MADTQYILPNDIGVSSLDCREAFRLLSPTERLYAYHLSRAAWYGGLAVLLQTSPEAPYIYALLSRLFRAQDPDQLRQHALAEGLTEEEYQAFLVYAAGVYSNMGNYKSFGDTKFVPNLPKEKLERVILGSEAAQQHPEEVRGLWQTCGELMFSLEPRLRHLGLGKEGITTYFSGNCTMEDAKLAQDFLDSQNLSAYNTRLFKEVDGEGKPYYEVRLASVLGSEPSLDSEVTSKLKSYEFRGSPFQVTRGDYAPILQKVVEQLEKAKAYAANSHQGQMLAQYIESFTQGSIEAHKRGSRFWIQDKGPIVESYIGFIESYRDPFGSRGEFEGFVAVVNKAMSAKFERLVASAEQLLKELPWPPTFEKDKFLTPDFTSLDVLTFAGSGIPAGINIPNYDDLRQTEGFKNVSLGNVLAVAYATQREKLTFLEEDDKDLYILWKGPSFDVQVGLHELLGHGSGKLFVQDEKGAFNFDQETVINPETGEQIQSWYRSGETWDSKFSTIASSYEECRAESVGLYLCLHPQVLEIFGFEGADAEDVIYVNWLNMVRAGLLALEFYTPEAFNWRQAHMQARFVILRVLLEAGEGLVTITPTTGSDGRPDARVRLDRSKIRSVGKPALERFLRRLQVLKSTGDVAGGRALYEGYATVTDAPPECFLTLRDTVLLRKESRKLIVQPNTRLEGSDVQLLEYEASAAGLIRSFSERFPEDGPELEEILTQLATADARFWKGPSEAPSGQA

SEQ ID NO: 2294 - DNA, 2392 bp, Rattus norvegicus
  ref <308>: DATABASE ACCESSION NUMBER: EMBL / D89655
  ref <309>: DATABASE ENTRY DATE: 1999-01-21
gctgccactgtcaggcacacaccttgctgctcggtttctgtcatctctgtggcctccgtcgcctctgtcgccgtccccttcaggtcctgagcccagcgactctcggccgcgcacgcggacatgggcgtcagctccagggcacgctgggtggccttggggctgggcgttctagggctgctgtgtgctgcgctcggcgttatcatgattctcatggtgccctcgctcatcaagcagcaggtgctcaagaatgtccgcatagaccccagcagcctgtcctttgggatgtggaaggagatccctgttcccttctacttgtccgtctacttcttcgaggtggtcaaccccagcgaggtcctaaatggccagaagccagtagtccgggagcgcggaccctatgtctacagggagttcagacaaaaggttaacatcaccttcaatgacaatgacacggtgtcctacatagagaaccgaagccttcgtttccagccagacaggtcccagggctcagagagtgactacattgtactgcctaacatcctggtcctgggaggggcagtgatgatggaggacaagcccacaagcctgaagctgctaatgaccttggggttggtcaccatgggccagcgggcctttatgaaccgcacggttggtgagatcctgtggggctacgaagatccctttgtgaatttcctcagcaaatatttcccagacatgttccccatcaaaggcaaatttggcctgttcgttgggatgaacgactcgagttctggcgtcttcaccgtcttcacaggtgtccagaatttcagcaagatccatctggtggataagtggaacggcctcagcgaggtcaactattggcattcggaacagtgcaacatgatcaatggtactgccgggcagatgtgggcaccattcatgacacccgaatcctcactggaattcttcagcccagaagcctgcagatctatgaagctcacctaccaggaatcaagggtgttcgaaggcatccccacttatcgcttcacggcccccgatactttgtttgccaacgggtccgtctacccacctaatgaaggcttctgcccgtgccgcgagtccggcattcagaatgtcagcacctgcaggtttggtgcgcccctgtttctctcccagccccacttctacaatgctgaccccgtgctgtcagaagctgttcttggtctgaaccctgacccaaaggagcattccttgttcctagacatccacccggtcactgggatccccatgaactgttccgtgaagatgcagctgagtctgtacatcaaatccgtcaagggcgtcgggcaaacagggaagatcgagccagtagtcctgccattgctgtggttcgaacagagcgggatgatgggtggcaagaccctgaacacgttctacacgcagctggtgctgatgccccaggttcttcactacgcgcagtatgtgctgctggggcttggaggcctcctgcttctggtgcccatcatttaccaactgcgcagccaggagaaatgctttttattttggagtggtagtaaaaagggctcgcaggataaggaggccatgcaggcctactctgagtctctgatgtcaccagctgccaagggcacggtactgcaagaagccaagctgtagggcccagaagacaccacgagccccccaaacctgatagcttggtcagaccagccgcccagtccctacaccccacttctcgaggactctctcagcggacaacccgccagtgccacgtcctgagcccccagatgtcacactgtccccacggcacatagtgtgcggaaacactcagggaccagggacagacccgctgctgagtagagcctgttgggccacaggcgacctcttctaagtgacctgtgagccaggctgtgggaactgtagctgcccctcctgtaggagctggcgccgccgggctcctgactttctccgtctttctccagcaggctgaaagccttagttcccacagaggacacagatctgtcactcctaggggctgggcaaacatcggcctcttgcgtcacggctggacaagcagttccagatcctgaccagtctgcacacacactctggcgctgtatctggcccttctcctacagtctctgctgtcacctgaacactgaattggccactgtaagtggcagcggtggcaggccccctcagggtccttatttttcaggcgtggggtcaaagagagaggtgtgggccgtctacccctggcacctagtatatctcaccagagggtagggtatacagaggcccagcgtcccacaatcgaccccttttttttctactggaagagaaattttatcgtcttttgaaagaaagtcatgactgaagcaataaaccttttcacaaatta

SEQ ID NO: 2295 - protein, 510 aa, Rattus norvegicus
  misc_feature (1)..(510): Xaa=Unknown amino acid
MGVSSRARWVALGLGVLGLLCAALGVIMILMVPSLIKQQVLKNVRIDPSSLSFGMWKEIPVPFYLSVYFFEVVNPSEVLNGQKPVVRERGPYVYREFRQKVNITFNDNDTVSYIENRSLRFQPDRSQGSESDYIVLPNILVLGGAVMMEDKPTSLKLLMTLGLVTMGQRAFMNRTVGEILWGYEDPFVNFLSKYFPDMFPIKGKFGLFVGMNDSSSGVFTVFTGVQNFSKIHLVDKWNGLSEVNYWHSEQCNMINGTAGQMWAPFMTPESSLEFFSPEACRSMKLTYQESRVFEGIPTYRFTAPDTLFANGSVYPPNEGFCPCRESGIQNVSTCRFGAPLFLSQPHFYNADPVLSEAVLGLNPDPKEHSLFLDIHPVTGIPMNCSVKMQLSLYIKSVKGVGQTGKIEPVVLPLLWFEQSGMMGGKTLNTFYTQLVLMPQVLHYAQYVLLGLGGLLLLVPIIYQLRSQEKCFLFWSGSKKGSQDKEAMQAYSESLMSPAAKGTVLQEAKLX

SEQ ID NO: 2296 - DNA, 2566 bp, Homo sapiens
  ref <308>: DATABASE ACCESSION NUMBER: EMBL / Z22555
  ref <309>: DATABASE ENTRY DATE: 1993-10-06
cgtcgccgtccccgtctcctgccaggcgcggagccctgcgagccgcgggtgggccccaggcgcgcagacatgggctgctccgccaaagcgcgctgggctgccggggcgctgggcgtcgcggggctactgtgcgctgtgctgggcgctgtcatgatcgtgatggtgccgtcgctcatcaagcagcaggtccttaagaacgtgcgcatcgaccccagtagcctgtccttcaacatgtggaaggagatccctatccccttctatctctccgtctacttctttgacgtcatgaaccccagcgagatcctgaagggcgagaagccgcaggtgcgggagcgcgggccctacgtgtacagggagtccaggcacaaaagcaacatcaccttcaacaacaacgacaccgtgtccttcctcgagtaccgcaccttccagttccagccctccaagtcccacggctcggagagcgactacatcgtcatgcccaacatcctggtcttgggtgcggcggtgatgatggagaataagcccatgaccctgaagctcatcatgaccttggcattcaccaccctcggcgaacgtgccttcatgaaccgcactgtgggtgagatcatgtggggctacaaggacccccttgtgaatctcatcaacaagtactttccaggcatgttccccttcaaggacaagttcggattatttgctgagctcaacaactccgactctgggctcttcacggtgttcacgggggtccagaacatcagcaggatccacctcgtggacaagtggaacgggctgagcaaggttgacttctggcattccgatcagtgcaacatgatcaatggaacttctgggcaaatgtggccgcccttcatgactcctgagtcctcgctggagttctacagcccggaggcctgccgatccatgaagctaatgtacaaggagtcaggggtgtttgaaggcatccccacctatcgcttcgtggctcccaaaaccctgtttgccaacgggtccatctacccacccaacgaaggcttctgcccgtgcctggagtctggaattcagaacgtcagcacctgcaggttcagtgcccccttgtttctctcccatcctcacttcctcaacgccgacccggttctggcagaagcggtgactggcctgcaccctaaccaggaggcacactccttgttcctggacatccacccggtcacgggaatccccatgaactgctctgtgaaactgcagctgagcctctacatgaaatctgtcgcaggcattggacaaactgggaagattgagcctgtggtcctgccgctgctctggtttgcagagagcggggccatggagggggagactcttcacacattctacactcagctggtgttgatgcccaaggtgatgcactatgcccagtacgtcctcctggcgctgggctgcgtcctgctgctggtccctgtcatctgccaaatccggagccaagagaaatgctatttattttggagtagtagtaaaaagggctcaaaggataaggaggccattcaggcctattctgaatccctgatgacatcagctcccaagggctctgtgctgcaggaagcaaaactgtagggtcctgaggacaccgtgagccagccaggcctggccgctgggcctgaccggccccccagcccctacaccccgcttctcccggactctcccagcagacagccccccagccccacagcctgagcctcccagctgccatgtgcctgttgcacacctgcacacacgccctggcacacatacacacatgcgtgcaggcttgtgcagacactcagggatggagctgctgctgaagggacttgtagggagaggctcgtcaacaagcactgttctggaaccttctctccacgtggcccacaggctgaccacaggggctgtgggtcctgcgtccccttcctcgggtgagcctggcctgtcccgttcagccgttgggccaggcttcctcccctccaaggtgaaacactgcagtcccggtgtggtggctccccatgcaggacgggccaggctgggagtgccgccttcctgtgccaaattcagtggggactcagtgcccaggccctggcacgagctttggccttggtctacctgccaggccaggcaaagcgcctttacacaggcctcggaaaacaatggagtgagcacaagatgccctgtgcagctgcccgagggtctccgcccaccccggccggactttgatccccccgaagtcttcacaggcactgcatcgggttgtctggcgcccttttcctccagcctaaactgacatcatcctatggactgagccggccactctctggccgaagtggcgcaggctgtgcccccgagctgcccccaccccctcacagggtccctcagattataggtgcccaggctgaggtgaagaggcctgggggccctgccttccgggcgctcctggaccctggggcaaacctgtgacccttttctactggaatagaaatgagttttatcatctttgaaaaataattcactcttgaagtaataaacgtttaaaaaaatggaaaaaaaaaaaaaa

SEQ ID NO: 2297 - protein, 510 aa, Homo sapiens
  misc_feature (1)..(510): Xaa=Unknown amino acid
MGCSAKARWAAGALGVAGLLCAVLGAVMIVMVPSLIKQQVLKNVRIDPSSLSFNMWKEIPIPFYLSVYFFDVMNPSEILKGEKPQVRERGPYVYRESRHKSNITFNNNDTVSFLEYRTFQFQPSKSHGSESDYIVMPNILVLGAAVMMENKPMTLKLIMTLAFTTLGERAFMNRTVGEIMWGYKDPLVNLINKYFPGMFPFKDKFGLFAELNNSDSGLFTVFTGVQNISRIHLVDKWNGLSKVDFWHSDQCNMINGTSGQMWPPFMTPESSLEFYSPEACRSMKLMYKESGVFEGIPTYRFVAPKTLFANGSIYPPNEGFCPCLESGIQNVSTCRFSAPLFLSHPHFLNADPVLAEAVTGLHPNQEAHSLFLDIHPVTGIPMNCSVKLQLSLYMKSVAGIGQTGKIEPVVLPLLWFAESGAMEGETLHTFYTQLVLMPKVMHYAQYVLLALGCVLLLVPVICQIRSQEKCYLFWSSSKKGSKDKEAIQAYSESLMTSAPKGSVLQEAKLX

SEQ ID NO: 2298 - DNA, 2392 bp, Rattus norvegicus; identical to SEQ ID NO: 2294
  ref <308>: DATABASE ACCESSION NUMBER: EMBL / D89655
  ref <309>: DATABASE ENTRY DATE: 1999-01-21

SEQ ID NO: 2299 - protein, 510 aa, Rattus norvegicus; identical to SEQ ID NO: 2295
  misc_feature (1)..(510): Xaa=Unknown amino acid

SEQ ID NO: 2300 - DNA, 2566 bp, Homo sapiens; identical to SEQ ID NO: 2296
  ref <308>: DATABASE ACCESSION NUMBER: EMBL / Z22555
  ref <309>: DATABASE ENTRY DATE: 1993-10-06

SEQ ID NO: 2301 - protein, 510 aa, Homo sapiens; identical to SEQ ID NO: 2297
  misc_feature (1)..(510): Xaa=Unknown amino acid

SEQ ID NO: 2302 - DNA, 1911 bp, Rattus norvegicus
  ref <308>: DATABASE ACCESSION NUMBER: EMBL / D89730
  ref <309>: DATABASE ENTRY DATE: 1997-09-19
gatgttgcaaacagttttcctaactatgctgactctggctctggtcaagtcacaggtcacggaggaaaccattacatacacgcaatgcaccgatggatatgaatgggaccctgtaagacagcagtgcaaagatattgatgagtgtgacattgtaccagatgcttgcaaaggtggaatgaaatgtgtcaaccactatggaggatacctctgccttcctaaaacagcccaaattattgtcaataacgaacagcctcagcaagaaacaccagctgccgaagcatcgtcgggtgctgccactgggaccatagctgccaggagcatggctaccagtggtgtgatccctgggggtggcttcatagccagtgctactgcagttgctggtcctgaagttcagacaggccgaaataacttcgtcattcggaggaacccggctgaccctcagcgcatcccttccaacccttcccaccggatccagtgtgcagcaggctatgaacagagtgagcataatgtgtgccaagacattgatgagtgcacctcagggacccacaattgtagattggaccaagtgtgcatcaatttacgtggttccttcacatgccactgtcttcctgggtatcagaagcgaggcgaacagtgtgtggatatagatgagtgctcagtgcccccatactgccaccaaggatgtgtgaacaccccgggttccttttactgtcagtgcaatcccgggtttcagctggcagcaaacaactacacttgtgtggatataaatgaatgtgatgccagcaaccagtgcgctcagcaatgctacaacattcttggctcattcatctgtcagtgcaaccaaggatatgaactgagcagtgacagactcaactgtgaagacatcgatgaatgcagaacctcaagctacctgtgccagtatcaatgtgtcaatgaacctgggaagttctcatgtatgtgtcctcagggttaccaagtggtgcgaagcagaacctgtcaggatataaatgaatgtgagaccaccaatgaatgccgagaagatgaaatgtgctggaattaccatggtggcttccgctgttacccacaaaacccatgtcaagatccctatgttctaacgtcagaaaaccgatgcgtttgcccggtctcaaacaccatgtgccgagacgtgccccagtctatagtctacaaatacatgaacatccgatctgacaggtccgtgccatcagacatcttccagatacaggcaacaacgatttatgcaaacaccattaatacttttcggattaaatctggaaatgaaaatggagagttctacctacgacaaacaagccctgtgagtgcaatgctggtgcttgtgaagtcgttaacaggaccaagagaacacatcgtgggcctggagatgctgacagtcagtagtatagggaccttccgcacaagctctgtgttaagattgacaataatagtggggccgttttcattttaaacttttattcacataaagcctaccacaggcatttaaatcagccaaagaatatcattacattaaagtttattttatttatagctctatctagtacatctatattcaaacagctagactatggtaggaagtgggcatttaatccataagagtcaacatttatctttatcactgtgtgtaaattagacattagtccaacattcttcttgaagagagctaagcatatattatctagtgaaacttggattctttcctacaaaaatggggccaagcaatgatactgttctgtggtgaatagagaaatatacacctccacaaacaatctcatgaggattggccatctaaacatcaagagcaagaagggttttttttttaacttctttgtaagaaaatggaaaaaagtcaataaagatatatttctttagaaaatg

SEQ ID NO: 2303 - protein, 493 aa, Rattus norvegicus
  ref <308>: DATABASE ACCESSION NUMBER: SWISS-Prot / O35568
  ref <309>: DATABASE ENTRY DATE: 2001-10-16
MLQTVFLTMLTLALVKSQVTEETITYTQCTDGYEWDPVRQQCKDIDECDIVPDACKGGMKCVNHYGGYLCLPKTAQIIVNNEQPQQETPAAEASSGAATGTIAARSMATSGVIPGGGFIASATAVAGPEVQTGRNNFVIRRNPADPQRIPSNPSHRIQCAAGYEQSEHNVCQDIDECTSGTHNCRLDQVCINLRGSFTCHCLPGYQKRGEQCVDIDECSVPPYCHQGCVNTPGSFYCQCNPGFQLAANNYTCVDINECDASNQCAQQCYNILGSFICQCNQGYELSSDRLNCEDIDECRTSSYLCQYQCVNEPGKFSCMCPQGYQVVRSRTCQDINECETTNECREDEMCWNYHGGFRCYPQNPCQDPYVLTSENRCVCPVSNTMCRDVPQSIVYKYMNIRSDRSVPSDIFQIQATTIYANTINTFRIKSGNENGEFYLRQTSPVSAMLVLVKSLTGPREHIVGLEMLTVSSIGTFRTSSVLRLTIIVGPFSF

SEQ ID NO: 2304 - DNA, 2742 bp, Homo sapiens
  ref <308>: DATABASE ACCESSION NUMBER: Refseq / NM_004105
  ref <309>: DATABASE ENTRY DATE: 2002-11-05
ctagtattctactagaactggaagattgctctccgagttttttttttgttattttgttaaaaaataaaaagcttgagcagcaattcatattactgtcacaggtatttttgctgtgctgtgcaaggtaactctgctagctaagattcacaatgttgaaagcccttttcctaactatgctgactctggcgctggtcaagtcacaggacaccgaagaaaccatcacgtacacgcaatgcactgacggatatgagtgggatcctgtgagacagcaatgcaaagatattgatgaatgtgacattgtcccagacgcttgtaaaggtggaatgaagtgtgtcaaccactatggaggatacctctgccttccgaaaacagcccagattattgtcaataatgaacagcctcagcaggaaacacaaccagcagaaggaacctcaggggcaaccaccggggttgtagctgccagcagcatggcaaccagtggagtgttgcccgggggtggttttgtggccagtgctgctgcagtcgcaggccctgaaatgcagactggccgaaataactttgtcatccggcggaacccagctgaccctcagcgcattccctccaacccttcccaccgtatccagtgtgcagcaggctacgagcaaagtgaacacaacgtgtgccaagacatagacgagtgcactgcagggacgcacaactgtagagcagaccaagtgtgcatcaatttacggggatcctttgcatgtcagtgccctcctggatatcagaagcgaggggagcagtgcgtagacatagatgaatgtaccatccctccatattgccaccaaagatgcgtgaatacaccaggctcattttattgccagtgcagtcctgggtttcaattggcagcaaacaactatacctgcgtagatataaatgaatgtgatgccagcaatcaatgtgctcagcagtgctacaacattcttggttcattcatctgtcagtgcaatcaaggatatgagctaagcagtgacaggctcaactgtgaagacattgatgaatgcagaacctcaagctacctgtgtcaatatcaatgtgtcaatgaacctgggaaattctcatgtatgtgcccccagggataccaagtggtgagaagtagaacatgtcaagatataaatgagtgtgagaccacaaatgaatgccgggaggatgaaatgtgttggaattatcatggcggcttccgttgttatccacgaaatccttgtcaagatccctacattctaacaccagagaaccgatgtgtttgcccagtctcaaatgccatgtgccgagaactgccccagtcaatagtctacaaatacatgagcatccgatctgataggtctgtgccatcagacatcttccagatacaggccacaactatttatgccaacaccatcaatacttttcggattaaatctggaaatgaaaatggagagttctacctacgacaaacaagtcctgtaagtgcaatgcttgtgctcgtgaagtcattatcaggaccaagagaacatatcgtggacctggagatgctgacagtcagcagtatagggaccttccgcacaagctctgtgttaagattgacaataatagtggggccattttcattttagtcttttctaagagtcaaccacaggcatttaagtcagccaaagaatattgttaccttaaagcactattttatttatagatatatctagtgcatctacatctctatactgtacactcacccataacaaacaattacaccatggtataaagtgggcatttaatatgtaaagattcaaagtttgtctttattactatatgtaaattagacattaatccactaaactggtcttcttcaagagagctaagtatacactatctggtgaaacttggattctttcctataaaagtgggaccaagcaatgatgatcttctgtggtgcttaaggaaacttactagagctccactaacagtctcataaggaggcagccatcataaccattgaatagcatgcaagggtaagaatgagtttttaactgctttgtaagaaaatggaaaaggtcaataaagatatatttctttagaaaatggggatctgccatatttgtgttggtttttattttcatatccagcctaaaggtggttgtttattatatagtaataaatcattgctgtacaacatgctggtttctgtagggtatttttaattttgtcagaaattttagattgtgaatattttgtaaaaaacagtaagcaaaattttccagaattcccaaaatgaaccagataccccctagaaaattatactattgagaaatctatggggaggatatgagaaaataaattccttctaaaccacattggaactgacctgaagaagcaaactcggaaaatataataacatccctgaattcaggcattcacaagatgcagaacaaaatggataaaaggtatttcactggagaagttttaatttctaagtaaaatttaaatcctaacacttcactaatttataactaaaatttctcatcttcgtacttgatgctcacagaggaagaaaatgatgatggtttttattcctggcatccagagtgacagtgaacttaagcaaattaccctcctacccaattctatggaatattttatacgtctccttgtttaaaatctgactgctttactttgatgtatcatatttttaaataaaaataaatattcctttagaagatcactctaaaa

SEQ ID NO: 2305 - protein, 493 aa, Homo sapiens
  ref <308>: DATABASE ACCESSION NUMBER: SWISS-Prot / Q12805
  ref <309>: DATABASE ENTRY DATE: 2002-06-15
MLKALFLTMLTLALVKSQDTEETITYTQCTDGYEWDPVRQQCKDIDECDIVPDACKGGMKCVNHYGGYLCLPKTAQIIVNNEQPQQETQPAEGTSGATTGVVAASSMATSGVLPGGGFVASAAAVAGPEMQTGRNNFVIRRNPADPQRIPSNPSHRIQCAAGYEQSEHNVCQDIDECTAGTHNCRADQVCINLRGSFACQCPPGYQKRGEQCVDIDECTIPPYCHQRCVNTPGSFYCQCSPGFQLAANNYTCVDINECDASNQCAQQCYNILGSFICQCNQGYELSSDRLNCEDIDECRTSSYLCQYQCVNEPGKFSCMCPQGYQVVRSRTCQDINECETTNECREDEMCWNYHGGFRCYPRNPCQDPYILTPENRCVCPVSNAMCRELPQSIVYKYMSIRSDRSVPSDIFQIQATTIYANTINTFRIKSGNENGEFYLRQTSPVSAMLVLVKSLSGPREHIVDLEMLTVSSIGTFRTSSVLRLTIIVGPFSF

SEQ ID NO: 2306 - DNA, 1911 bp, Rattus norvegicus; identical to SEQ ID NO: 2302
  ref <308>: DATABASE ACCESSION NUMBER: EMBL / D89730
  ref <309>: DATABASE ENTRY DATE: 1997-09-19

SEQ ID NO: 2307 - protein, 493 aa, Rattus norvegicus; identical to SEQ ID NO: 2303
  ref <308>: DATABASE ACCESSION NUMBER: SWISS-Prot / O35568
  ref <309>: DATABASE ENTRY DATE: 2001-10-16

SEQ ID NO: 2308 - DNA, 2742 bp, Homo sapiens; identical to SEQ ID NO: 2304
  ref <308>: DATABASE ACCESSION NUMBER: Refseq / NM_004105
  ref <309>: DATABASE ENTRY DATE: 2002-11-05

SEQ ID NO: 2309 - protein, 493 aa, Homo sapiens; identical to SEQ ID NO: 2305
  ref <308>: DATABASE ACCESSION NUMBER: SWISS-Prot / Q12805
  ref <309>: DATABASE ENTRY DATE: 2002-06-15

SEQ ID NO: 2310 - DNA, 1911 bp, Rattus norvegicus; identical to SEQ ID NO: 2302
  ref <308>: DATABASE ACCESSION NUMBER: EMBL / D89730
  ref <309>: DATABASE ENTRY DATE: 1997-09-19

SEQ ID NO: 2311 - protein, 493 aa, Rattus norvegicus; identical to SEQ ID NO: 2303
  ref <308>: DATABASE ACCESSION NUMBER: SWISS-Prot / O35568
  ref <309>: DATABASE ENTRY DATE: 2001-10-16

SEQ ID NO: 2312 - DNA, 2742 bp, Homo sapiens; identical to SEQ ID NO: 2304
  ref <308>: DATABASE ACCESSION NUMBER: Refseq / NM_004105
  ref <309>: DATABASE ENTRY DATE: 2002-11-05

SEQ ID NO: 2313 - protein, 493 aa, Homo sapiens; identical to SEQ ID NO: 2305
  ref <308>: DATABASE ACCESSION NUMBER: SWISS-Prot / Q12805
  ref <309>: DATABASE ENTRY DATE: 2002-06-15

SEQ ID NO: 2314 - DNA, 1911 bp, Rattus norvegicus; identical to SEQ ID NO: 2302
  ref <308>: DATABASE ACCESSION NUMBER: EMBL / D89730
  ref <309>: DATABASE ENTRY DATE: 1997-09-19

SEQ ID NO: 2315 - protein, 493 aa, Rattus norvegicus; identical to SEQ ID NO: 2303
  ref <308>: DATABASE ACCESSION NUMBER: SWISS-Prot / O35568
  ref <309>: DATABASE ENTRY DATE: 2001-10-16

SEQ ID NO: 2316 - DNA, 2742 bp, Homo sapiens; identical to SEQ ID NO: 2304
  ref <308>: DATABASE ACCESSION NUMBER: Refseq / NM_004105
  ref <309>: DATABASE ENTRY DATE: 2002-11-05

SEQ ID NO: 2317 - protein, 493 aa, Homo sapiens; identical to SEQ ID NO: 2305
  ref <308>: DATABASE ACCESSION NUMBER: SWISS-Prot / Q12805
  ref <309>: DATABASE ENTRY DATE: 2002-06-15

SEQ ID NO: 2318 - DNA, 4269 bp, Rattus norvegicus
  ref <308>: DATABASE ACCESSION NUMBER: EMBL / D89983
  ref <309>: DATABASE ENTRY DATE: 1997-11-24
tctcggccgcggtgtttccgtttctctccctggttgtcgcctgctctgctcttctcatccttctcgctctgctgctctgcggagtgacgaggctgaatcttctccccacccagttcgcgcttttcttctttttctcgcgccgctccatttctccagtccggctgccgccgccactgctgctcagctggtgtcggtgccgcgcgtttcccccacgtcgtccccgcagcctatggcccaggccgccttgggtatttctgctcaaggtaaccacatccctctttaaaaattccgccgaaaaagagaagacgctttacccgactctttgggccgttatctcacggcgaactttctgaccgagtatacaactacccagaaggcctaggagaagtgctgtatagagagcagttcgattttaacgctgagccaccttgggaacctagctgatgataggggggttccatctcctaacttgtccatggaggtcttcacttcagaaacccaagactcacattcatccagcttggtgtcaagtgggctgttgctgccaggattatcttgtgattatatgaaagatgtatcagtttcttctgaagtgcagtcaactgtagaagcctttgtagcaggtgtgtaacaagtttgttgcatattctaaggacccagacataggcttggtggcccgtctcttgtttttcctggtttatgactttcggctttgtggaatacggctgagatgaaaggatttattgacgatgcaaactactccgttggcctgttggatgaaggaacaaaccttggaaatgttattgataactatgtttatgaacataccctgacaggaaaaaatgcattttttgtgggggatcttgggaagatcgtgaagaagcacagtcagtggcagaacgtggtggctcagataaagccattttacatggtgaagtgcaactccactccagccgtactggagatcttggcagctcttggaactggatttgcttgttccaccaaaaatgaaatggctttagtgcaagaattaggcgtatctccagaaaacatcatttatacaagtccttgtaagcaagcatctcagataaagtacgcagcaaaagttggagtaaatattatgacatgtgacaatgaagttgaattaaagaaaattgcgaggaatcacccaaatgccaaggtcttactacatattgcaacagaagataatattggaggtgaagatggtaatatgaagtttggcactacactgaagaactgtaggcatcttttggaatgtgccaaggaacttgatgtccaaataattggggttaaatttcatatttcaagtgcttgcaaagaatatcaagtctatgtccatgccctgtctgatgctcgatgtgtgtttgacatggctggggagtttggctttacaatgaacatgttagacatcggtggaggcttcacaggaactgaaattcagttggaagaggttaatcatgttatcagtcctctgttggatatttacttccctgaaggatctggcattcagatcatttccgaacctggaagctactatgtatcttctgcatttacgcttgcagtcaatattattgctaagaaagttgttgaaaatgataaattatcctctggagtagaaaaaaatgggagtgacgagccagccttcgtgtactacatgaatgacggtgtttatggttcttttgcaagtaagctttctgaggacttaaatactgttccagaggttcacaagaaatacaaggaagatgagcctctgtttacaagcagcctttggggtccatcctgtgacgagcttgatcaaattgtggaaagttgtcttcttcctgagctgagcgtgggagattggcttatctttgataacatgggagcagattctttgcacggaccgtctgcttttagtgacactcagaggccagctatttatttcatgatgtcactcagtgattggtatgagatgcaagatgctggaattacttcagatgcaatgatgaaaaacttcttctttgcaccctcttgcattcagctgagccaagaagacaacttctccactgaagcttaaacaggcattaacgcttctttagatctgaagtcgcaggttaagcttgtctggtctacattccagtgtggggaaaaattcaatcaatctttattctgttaattttcttggaaacaaattcatagtaatagctgtttgggaccagacaaaatcagctttcatctataattcattgggggtaataggggatttatttagataatgtatccagatttaaacataccagtttgacccaccccttaagcgtttaaaataaaatatgcaacaaaatggatgacttagtggagatggaagcccattaattgggttccccatcaaatcgtttacatacaagtacacagtttttataataaggattcctgttaaaagtcttgtaaagttgatgtctttcacccagatctatcacatgtgagtggaagaccagtgtgacttcattagatacgtttagtgtatttagagtgtgtaaatttgtgctttggactgtagtttaataaatgtaaaattgcatcatagtatttgttgtatttgacctaatgtaaccttgtatgattgcaataaaactttgtgtagattttaccattttttcaggctaaaaatttgggaatggggctagctagcaaaggtagttttgaactagttgtgtgtatggtctgttttgagagttttctttatagtccatttgtttggtttggctcaatatactttttagttatttaattagtaatttaagtaaaaagtgtttggtaatcattgtgaagttcagattcattatggagagtcgatgtgcagtaagcatgatgtttaacaattttaacaccagaaaatgttaatcttgcataaaccaattgtaataataataggtgtttctgtatagataggatgcatagagtaccttagtaaatctttgaatcacaaatcttttggctgatagaaaagattttattaaacactgaaaacttggtcggggatggggagagagactgcagaagactgcagaaccctaaccttaaagaagggctatgtctatttccagcatcctgatgccccttcgcacagacatttaaatcgagagggctttggggtggtgaagcacactcttcaatttctcacttgtaatggtatcaaattgcaatttttttgttgttgctgatcttggtttgaacctagtcccttagtttcttgttaattcccatttgttcaagcttagtaattcttccttccgtactaaagcttggtggggggtggggggaggagttagcttcactaacctgacactgttgccaggaattttggctttgttcactgctagtgtgttagtcctaagtctcagaatcacagaagtaatgagacaacttacaggggtcacttttcctaccttactctatgttcacaagtggaattcctgacctccaagaggaaatgtgacttcactttggtgccaatggacaggaaattctacctgtgctacataggagaagtgtgggatacacttgaatagctggattttacaccttgatttcaaggtggaaagaaattgatcatgaatctctaatttcaaatcaaaccagtaggtgcttaatatttttgatttgaatattgcccacttgaatatcatgggttctattaattataagaacaactaaggaccccagtccactgtcatctagttgcccttggacttttttccaaggtatactatggggtttatgcaaaatttgaagctaccatatgcattgttgtggtccaggaatgccaaaacttaaagcgtggtacaacctgagtccttggcctgactgtacaggcgtggtctctgtggcatcagttttgccttctgcataggagaaaggttgtatgtaacacagcccggaattgctatctcacatgtgaatgataggtaaacataagaatgtctgtattgtttttgaagactgtttgccataaatctaaagtcaaacctatgtatttcaatttggtatgcttaagaataattaatgtaaaatctttttatatgatattgtaatctcagttcaaatttaattgcaaatataaaacccaaatgatttctatatatagtaaattgaactgtcaaggtaacttgtgtgtgattctgaatacacagatacaatgtttttattcctcatgctttactttgatggcttctatcatgaaatagatgtgaaattttatgaaaaaaa

SEQ ID NO: 2319 - protein, 448 aa, Rattus norvegicus
  ref <308>: DATABASE ACCESSION NUMBER: SWISS-Prot / Q63764
  ref <309>: DATABASE ENTRY DATE: 2002-06-15
MKGFIDDANYSVGLLDEGTNLGNVIDNYVYEHTLTGKNAFFVGDLGKIVKKHSQWQNVVAQIKPFYMVKCNSTPAVLEILAALGTGFACSTKNEMALVQELGVSPENIIYTSPCKQASQIKYAAKVGVNIMTCDNEVELKKIARNHPNAKVLLHIATEDNIGGEDGNMKFGTTLKNCRHLLECAKELDVQIIGVKFHISSACKEYQVYVHALSDARCVFDMAGEFGFTMNMLDIGGGFTGTEIQLEEVNHVISPLLDIYFPEGSGIQIISEPGSYYVSSAFTLAVNIIAKKVVENDKLSSGVEKNGSDEPAFVYYMNDGVYGSFASKLSEDLNTVPEVHKKYKEDEPLFTSSLWGPSCDELDQIVESCLLPELSVGDWLIFDNMGADSLHGPSAFSDTQRPAIYFMMSLSDWYEMQDAGITSDAMMKNFFFAPSCIQLSQEDNFSTEA

SEQ ID NO: 2320 - DNA, 2619 bp, Homo sapiens
  ref <308>: DATABASE ACCESSION NUMBER: EMBL / D88674
  ref <309>: DATABASE ENTRY DATE: 1997-11-24
agtttttccttttttcttctgccgtcgccttctctgcctcttctcatcctttctcgctctgctgctctgcagtgtgacgagtccgaatcctcttcccacccagcccgcgcctttcttcttttgcctgcgctgttctatttctccttcggccgccgccgccactgctgcacacagctggtgtcggtgccgcgcttttacccccaagtcgttcccgcagcctatggcccaggccgccttgggtatttctgctcaaggtaaccacatccctctttaaaaattccgccgaaaaagagaagacgctttacccgactctttgggccgttatctcacggcgaactttctgaccaagtatacaactacccagagggcctaggagaagtgctgtatagagagcagttcgacttcaacgctgagccaccttgggaacctagctgatgataggggggttccatctcccaacttgtccatggaggtcttcacttcagaaatccaagactcatattcatccagcttggtgtcaagtgggctgttgctgccagaattatcttgtgattatttgagagatgtatcagtttcttctgaagtacaatcaactgtagaagcctttgtagcagtttgttgcatattctaaggacccagacataggcttggtggcccgtctcttgtctttcctggtttatgactttcggctttgtggaatacggctgagatgaaaggatttattgatgatgcaaactactccgttggcctgttggatgaaggaacagaccttggaaatgttattgataactatgtttatgaacataccctgacagggaaaaatgcattttttgtgggagatcttggaaagattgtgaagaaacacagtcaatggcagaatgtagtggctcagataaagccattctacacagtgaagtgcaactctgctccagctgtacttgagattttggcagctcttggaaccggatttgcttgttccagtaaaaatgaaatggctttagtgcaagagttgggtgtacctccagaaaacattatttacataagtccttgcaagcaagtgtctcagataaagtatgcagcaaaagttggagtgaatatcctgacatgtgacaatgaaattgaattgaagaaaattgcacgtaatcacccaaatgccaaggtcttactacatattgcaacagaagataatattggaggtgaagagggtaacatgaagtttggcactaccctgaagaactgtaggcatctcttggaatgtgctaaggaacttgatgtccaaataattggggttaaatttcatgtttcgagtgcttgcaaagaatctcaagtatatgtacatgctctatctgatgctcgatgtgtgtttgacatggctggagaaattggctttacgatgaacatgttagacattggtggaggattcacgggaactgaatttcaattggaagaggttaatcatgttatcagccctctgttggatatctactttcctgaaggatctggtgttaagataatttcagaacccggaagctactatgtgtcttctgcatttacactcgcagttaatatcatagcaaagaaagttgttgaaaatgataaatttccctctggagtagaaaaaaccggaagtgatgaaccagccttcatgtattatatgaatgatggtgtttatggttcttttgcaagtaaactgtctgaggacttaaataccattccagaggttcacaagaaatacaaggaagatgagcctctgtttacaagcagcctttggggtccatcctgtgatgagcttgatcaaattgtggaaagctgtcttcttcctgagctgaatgtgggagattggcttatctttgataacatgggagcagattctttccatgaaccatctgcttttaatgattttcagaggccagccatttattacatgatgtcattcagtgattggtatgagatgcaagatgctggaattacttcagactcaatgatgaagaacttcttctttgtgccttcttgcattcagctgagccaagaagacagcttttccgctgaagcttaaacaggcattaacgcttctttagatctgaagttgcaggttaagcttgtctggtcaacattccagtgtggaaaaataatttaaacaatcttattctcttaattcttttggcaacaaaaactattagtaatagctatttgggaccagacaaaatcagctttcatctataattcattggggataatgggagatttagataatgtatccagatttaaacctaccagtttgtcctaccccttaagcgtttaaaataaaatatgcaacaaaatggatgacttagtggagatggaagcccattaattgggttccccattaaatcgtttacatacaagaacacagtttttatactaaggatttgtgtttaaagtcttgtaaagttcatgtctttcacccagatatatcaaatgttagaagaccagtgtgacttcattagataacgtttagtgtatttagaatgtgtaaatttgtgctttgaactgtagtttaataaatgtaaaattgcatcatagtatttgttgacctaatgtaacccttgtatgattgcaataaaattttgtgtagatttt

SEQ ID NO: 2321 - protein, 448 aa, Homo sapiens
  ref <308>: DATABASE ACCESSION NUMBER: SWISS-Prot / O14977
  ref <309>: DATABASE ENTRY DATE: 2002-06-15
MKGFIDDANYSVGLLDEGTDLGNVIDNYVYEHTLTGKNAFFVGDLGKIVKKHSQWQNVVAQIKPFYTVKCNSAPAVLEILAALGTGFACSSKNEMALVQELGVPPENIIYISPCKQVSQIKYAAKVGVNILTCDNEIELKKIARNHPNAKVLLHIATEDNIGGEEGNMKFGTTLKNCRHLLECAKELDVQIIGVKFHVSSACKESQVYVHALSDARCVFDMAGEIGFTMNMLDIGGGFTGTEFQLEEVNHVISPLLDIYFPEGSGVKIISEPGSYYVSSAFTLAVNIIAKKVVENDKFPSGVEKTGSDEPAFMYYMNDGVYGSFASKLSEDLNTIPEVHKKYKEDEPLFTSSLWGPSCDELDQIVESCLLPELNVGDWLIFDNMGADSFHEPSAFNDFQRPAIYYMMSFSDWYEMQDAGITSDSMMKNFFFVPSCIQLSQEDSFSAEA

SEQ ID NO: 2322 - DNA, 3324 bp, Rattus norvegicus
  ref <308>: DATABASE ACCESSION NUMBER: EMBL / D90038
  ref <309>: DATABASE ENTRY DATE: 1999-01-21
gaattccagtgcggctcgctcgccctgccggtgccatggcggccttcagcaagtacttgacggcgcggaactcctcgctggcgggggccgcgttcctgctgttctgcctgctccacaagcggcgtcgcgccctcggcctgcacggtaagaaaagtggaaaaccgccattacagaataatgagaaagaaggaaagaaagagcgagctgtggtggacaaagtgtttttatcaaggctctcacagatcctaaaaattatggtccctagaacattttgtaaagagacagggtacttgatacttattgctgttatgctggtatctcgaacatactgtgatgtttggatgattcaaaatggcacactgattgaaagtggcatcattggtcgtagcagtaaagatttcaagagatacttattcaacttcatcgctgccatgcctcttatctctctggttaataacttcttgaagtatgggttaaatgagctcaaactgtgcttccgtgtgcggctcactagatacctctatgaggagtatctccaagccttcacctactataaaatgggcaacctggataacagaatagcaaacccagaccagctgcttacacaagatgtagaaaagttttgtaacagtgtagttgatctttattcgaatcttagtaagccatttttagacatagttttgtatattttcaagttaacaagtgcaattggagctcagggcccggcaagcatgatggcctacttgcttgtttctgggctattcctaactcgactcagaagacccatcggtaaaatgacgattatggagcagaagtatgaaggagaatatagattcgttaattcacggcttatcactaatagtgaagaaattgccttttacaatgggaataaacgagaaaagcagacaatccactctgtcttccgaaaactggtggaacacctacataatttcattttcttccggttttctatgggtttcattgatagcatcattgccaaatatattgccactgtagttgggtacctggttgtcagtcgcccgttcctagacctggcgcatccgcgacaccttcacagcacccactcagagctgctggaggattactaccaaagtggaagaatgcttttgagaatgtctcaagctttggggcggatagttttggctgggcgtgaaatgactagattggctggttttacggctcggattacggaattaatgcaagtactaaaggatttaaatcatggcaaatatgaacgtacaatggtgtcacaacaggataagggtattgaaggagcacaagctagtcccttgatacctggtgctggagaaatcatcaatgcagacaacattataaagtttgatcatgttcctttagcaacaccaaatggagatatcttgatccaagaccttagttttgaagttcgatctggggccaacgttctcatttgtggtccaaatggctgtggaaagagctccctcttccgtgttcttggtgaattatggcctctctttggaggacatcttactaaacctgagagaggaaagttattttatgttcctcagcgaccctatatgaccctgggaacactgagagaccaagtaatatatccagatggaaaggaggatcagaagaagaaggggatatctgaccaagtgctgaaggggtacttggacaatgtacagttgggccatatccttgagcgggaaggaggctgggacagtgttcaggactggatggatgtactcagcggaggagaaaaacaaagaatggcgatggcaagattgttttatcataaaccccagtttgccattctggatgagtgcacaagtgcagttagtgtggatgtggaagactacatttacagccactgtcggaaggttggcatcaccctcttcactgtctcacacaggaaatccctttggaaacaccacgagtactacctgcacatggatggcagaggcaattatgaattcaaaaagatcacagaagacacagttgagttcggatcatagagaccatctggagaacttcacacttcacaagagaatgaatgaacagaatgcatttgtaaacaacgtgcattgtaaaataaagttaagcttgttttttttaaaaaaacaaagctacaaattgactagatataggataattgaaacatgttaaaacatttaatattgtataggatattgctaattgtgtatatgttggtttaattattaattatgtactaagaatgtccttattcttgtggttaaaaaacctgcctgaattaaattgggcttaaatcagtgtaacctgattcatgggatgtaaaccatttgaagtcagctaatttgacttttatagctctgtctttttctttaatgaagaaccctatttaaaactgggtcattagctgtttattctaacaaagtagtcttgagttcctttttgggtttttttttttttttttttttttttttttttgtgccccatggtagtgggaaccaaaccaatcacaatgttttattggaacatattccatcatcacaggatagcatttattaaacagtggcggatttctctagctgctacatttattctcattcctcatacataccttgaggtgcatttgattccaggagagccatttgggttttctttagctaaataataaatgtacccgtctcagtcttttggactgagtcgttctgaaggctctcgtgtggacagcagtgtgtgcagtctcttacagtccgtgcctgctccacatggtaccagtcttaccagtgcttgagagctcagacacaccctgctgcatgaagttggaggtctcgggagggttttagattttgtgacgggaaccggaaaggctcgtcagagtgtggctgtgtcatggtgagcaccacgtggctgtagaggcccgacatgaggtaatgcactgagcacacaacgccactgctgctgtctgtggctgtgggttcttaaaagtgctggactttgtcatgctcgtgggccaatgacatttcctaggagcggcctctgactcctgtgcagctgcgtctgtgtcagctctggctccctggaaccacgagtgactttgcacaaaggagggctgagagcggacttgatcagtaagtcgtcgtgaatcagtttgcttgagtgggctcggaatgggccttatcacgatggttttgtttcttcgtaactcataatcactggctaccaggataaccctgatgtattgattccgtgaatacatcacattcaatcttaccatgtctccttagcaaacgtgtgtacttattttctgttcagattaaaaaaaaaaaaaaggaattc

SEQ ID NO: 2323 - protein, 658 aa, Rattus norvegicus
  ref <308>: DATABASE ACCESSION NUMBER: SWISS-Prot / P16970
  ref <309>: DATABASE ENTRY DATE: 2001-10-16
AAFSKYLTARNSSLAGAAFLLFCLLHKRRRALGLHGKKSGKPPLQNNEKEGKKERAVVDKVFLSRLSQILKIMVPRTFCKETGYLILIAVMLVSRTYCDVWMIQNGTLIESGIIGRSSKDFKRYLFNFIAAMPLISLVNNFLKYGLNELKLCFRVRLTRYLYEEYLQAFTYYKMGNLDNRIANPDQLLTQDVEKFCNSVVDLYSNLSKPFLDIVLYIFKLTSAIGAQGPASMMAYLLVSGLFLTRLRRPIGKMTIMEQKYEGEYRFVNSRLITNSEEIAFYNGNKREKQTIHSVFRKLVEHLHNFIFFRFSMGFIDSIIAKYIATVVGYLVVSRPFLDLAHPRHLHSTHSELLEDYYQSGRMLLRMSQALGRIVLAGREMTRLAGFTARITELMQVLKDLNHGKYERTMVSQQDKGIEGAQASPLIPGAGEIINADNIIKFDHVPLATPNGDILIQDLSFEVRSGANVLICGPNGCGKSSLFRVLGELWPLFGGHLTKPERGKLFYVPQRPYMTLGTLRDQVIYPDGKEDQKKKGISDQVLKGYLDNVQLGHILEREGGWDSVQDWMDVLSGGEKQRMAMARLFYHKPQFAILDECTSAVSVDVEDYIYSHCRKVGITLFTVSHRKSLWKHHEYYLHMDGRGNYEFKKITEDTVEFGS

SEQ ID NO: 2324 - DNA, 949 bp, Homo sapiens
  ref <308>: DATABASE ACCESSION NUMBER: EMBL / BC009712
  ref <309>: DATABASE ENTRY DATE: 2001-10-25
cggacgcgtgggcggacgcgtgggtcgccggctcgctggtaccggcagtgccatggcggccttcagcaagtacttgacggcgcgaaactcctcgctggctggtgccgcgttcctgctgctctgcctgctccacaagcggcgccgcgccctcggcctgcacggtaagaaaagtggaaaaccaccattacagaacaatgagaaagaggggaaaaaggagcgagctgtggtggacaaggtgtttttctcaaggctcatacagattctgaaaatcatggtccctagaacattttgtaaagagacaggttacttggtacttattgctgttatgctggtgtctcgaacatattgtgatgtttggatgattcaaaatgggacactaattgaaagtggtatcattggtcgtagcaggaaagatttcaagagatacttactcaacttcatcgctgccatgcctcttatctctctggttaataacttcttgaagtatgggttaaatgagcttaaactgtgcttccgagtaaggctcactaaatacctctatgaggagtatcttcaagctttcacatattataaaatggggaatctggacaacagaatagctaatccagaccagctgcttacacaagatgtagaaaaattttgtaacagtgtagtcgatctgtattcaaatcttagtaagccatttttagacatagttttgtatatctttaagttaacgagtgcaattggagctcaggtacttggaaaaattttgtggcattaaaaaccagacaaatgtattggccaggcgtggtggctcatgcctgtaatcccagcactttgggaggctgagatgggaggatcgcttgaatccaggagttcgagacaagcctggacaaaaagcgagacccgcttctttaaaaaataataataaaacagaagttcttaaaccatgaaaaaaaaaaaaaaa

SEQ ID NO: 2325 - protein, 659 aa, Homo sapiens
  ref <308>: DATABASE ACCESSION NUMBER: SWISS-Prot / P28288
  ref <309>: DATABASE ENTRY DATE: 2002-06-15
MAAFSKYLTARNSSLAGAAFLLLCLLHKRRRALGLHGKKSGKPPLQNNEKEGKKERAVVDKVFFSRLIQILKIMVPRTFCKETGYLVLIAVMLVSRTYCDVWMIQNGTLIESGIIGRSRKDFKRYLLNFIAAMPLISLVNNFLKYGLNELKLCFRVRLTKYLYEEYLQAFTYYKMGNLDNRIANPDQLLTQDVEKFCNSVVDLYSNLSKPFLDIVLYIFKLTSAIGAQGPASMMAYLVVSGLFLTRLRRPIGKMTITEQKYEGEYRYVNSRLITNSEEIAFYNGNKREKQTVHSVFRKLVEHLHNFILFRFSMGFIDSIIAKYLATVVGYLVVSRPFLDLSHPRHLKSTHSELLEDYYQSGRMLLRMSQALGRIVLAGREMTRLAGFTARITELMQVLKDLNHGKYERTMVSQQEKGIEGVQVIPLIPGAGEIIIADNIIKFDHVPLATPNGDVLIRDLNFEVRSGANVLICGPNGCGKSSLFRVLGELWPLFGGRLTKPERGKLFYVPQRPYMTLGTLRDQVIYPDGREDQKRKGISDLVLKEYLDNVQLGHILEREGGWDSVQDWMDVLSGGEKQRMAMARLFYHKPQFAILDECTSAVSVDVEGYIYSHCRKVGITLFTVSHRKSLWKHHEYYLHMDGRGNYEFKQITEDTVEFGS

SEQ ID NO: 2326 - DNA, 3657 bp, Rattus norvegicus
  ref <308>: DATABASE ACCESSION NUMBER: EMBL / D90109
  ref <309>: DATABASE ENTRY DATE: 1999-01-21
ccaacacagaactatggaagtccacgaattgttccggtattttcgaatgccagagctgattgacattcggcagtacgtgcgtacccttccaaccaacacactcatgggcttcggggcttttgcagcgctcaccaccttctggtatgccacccggccgaaggccctgaagccaccatgtgatctgtccatgcagtctgtggaagtaacgggtactactgagggtgtccgaagatcagcagtccttgaggacgacaagctcttgctgtactactacgacgatgtcagaacgatgtacgatggcttccagagggggattcaggtgtcaaatgatggcccttgtttaggttctagaaagccaaaccagccatatgagtggatttcttacaaacaggttgcagaaatggctgagtgcataggctcggcgctgatccagaagggtttcaaaccttgctcagagcagttcatcggcatcttttctcagaacagacctgagtgggtgaccatcgagcaggggtgcttcacttactccatggtggttgttccgctctatgacacgcttggaaccgacgccatcacctacatagtgaacaaagctgaactctctgtgatttttgctgacaagccagaaaaagccaaactcttattagaaggtgtagaaaataagttaacaccatgccttaaaatcatagtcatcatggactcctacgacaatgatctggtggaacgcggccagaagtgtggggtggaaatcatcggcctaaaagctctggaggatcttggaagagtgaacagaacgaaacccaagcctccagaacctgaagatcttgcgataatctgtttcacaagtggaactacaggcaaccccaaaggagcaatggtcacccaccaaaacattatgaacgattgctccggttttataaaagcgacggagagtgcattcatcgcttccccagaggatgttctgatatctttcttgcctctcgcccatatgtttgagaccgttgtagagtgtgtaatgctatgtcatggagctaagataggatttttccaaggagacatcaggctgcttatggatgacctcaaggtgcttcagcctaccatcttccctgtggttccgagactgctaaaccggatgtttgacagaatttttggacaagcaaacacgtcagtgaagcgatggctgttggattttgcctccaaaaggaaagaggcggagcttcgcagtggcatcgtcagaaacaacagcctgtgggataaactcatctttcacaagatacagtcgagcctgggcgggaaagtccggctgatgatcacaggagcagccccagtgtctgccacagtgctgacgtttctgagggcggctctcggctgtcagttctatgaaggctacggacagaccgagtgcaccgctggttgctgcctgagcttgcctggagactggacagcaggccatgttggtgcccccatgccttgcaattatatcaagcttgtagatgtggaagatatgaattaccaggctgccaagggcgagggtgaggtgtgtgtgaaaggggcaaatgtgttcaaaggctacttgaaagacccagcaagaacagctgaagccctagataaagatggttggttacacacgggggacattggaaaatggctgccaaatggcaccttgaagattatcgacaggaaaaagcacatatttaaactagcccaaggagagtacatagctccagaaaagatcgaaaatatctacctgcggagcgaagccgtggcccaggtgtttgtccatggagaaagcttgcaggcctttctcatagccattgtagtacctgatgtggagatcctaccttcctgggcacagaagagaggatttcaagggtcctttgaagaactgtgcaggaacaaggatatcaataaagctatcctggaagacatggtgaaacttgggaagaatgctggtttgaagccatttgaacaggtcaaaggcattgctgtgcacccggaattattttctattgacaatggcctcctgactccaacactgaaggcaaaaaggccagagctgcggaactatttcaggtcacagatagatgaactgtactccaccatcaagatttaacatgaggaagaatccttagaggaaatggcgcacctccacaatcctcctcgtaccaatggcctttgagttggtaactctgcctgcagcgagtgtgggaaaggaaatgccatgctggacttgtgcacagggtcttaccatagggatagcagagggcacggaacactgccttacagtcacctgtgttgtagcccatgatcctggggatacacagtttccaaaacgagccttaaacattgtaaaggggaacccataaaagtgctaagttatttaagacttcaaccaataaggtgggtgttaaaacttctgtctcctgtttttctaaccaaggggttaggacttactctttctgatacgtctgctgctggctgcacaccctgcagccgtctgctgctctgaagagtacagtacactggaagaaagctacccctttaagagcaactgtccaggctgaagaaagtcacagtggaccagagatttctcttcttaaccccttccccttgtccctttccctcaccactcacatgcagtacatttatgtgacccttctggtttgtaagggttccaaagggtccctgttgtgcctgctggtaacctcgtgtttccagtacactaaagaacagatcctcctcagaacaatgcgggtacccagtctcagaaaaggaaaaaaaaaaaaaggtggctcctgcgttgagccagcaacttgcaggctcacacagatgtcctcagactccgctccatctctgctccctgcccctcccattcttcccaggggttatgagaaaccctgccttagactctgcagtgaagatggtgttccgaagaatgacctggatgggccatgctcaactgtgattcctcccccgctgtccactcgctcgctcgtcgtggaaccagcccgtatctgcagcggcctctgtgctccaaatgtggttttctagcaaatgctaatgtggtgatcaacttgctttgttttctttccctcccagttaaactcaggcacagcatgtcttcagaagtatctaggcagttggtatacgtgggtacttattaaagtggacagtaataagtaaatgtccttattataaaactacctgatttatgtgaaatgcatttgataagccaaaaatctggggtgtagaaatctgggggaaaaaaaatcatatcctgggatcaacttcccaaggtatattttttaagttaatttgggaaatgaacagcatttcactttgccgcgagtcttggccacatttgacctatttgagctgtttatacatttgaagccactgttgttggctgtgtgacagtgtgtgtatcttgaagcacaactgggtttgcactaaagaatcatcattgtaataacactatttggtagcctaacttcattttcgtattcttaactgcacaggaagtcgataatttgtcacaacggggttttgaatgtttgctttcagtgttggctatttctatgttttataaaccaaaacagaatttccaaaaacaatgaaggaaaccaaaataaatatttctgcatttggagtgagtgg

SEQ ID NO: 2327 - protein, 699 aa, Rattus norvegicus
  ref <308>: DATABASE ACCESSION NUMBER: SWISS-Prot / P18163
  ref <309>: DATABASE ENTRY DATE: 2001-10-16
MEVHELFRYFRMPELIDIRQYVRTLPTNTLMGFGAFAALTTFWYATRPKALKPPCDLSMQSVEVTGTTEGVRRSAVLEDDKLLLYYYDDVRTMYDGFQRGIQVSNDGPCLGSRKPNQPYEWISYKQVAEMAECIGSALIQKGFKPCSEQFIGIFSQNRPEWVTIEQGCFTYSMVVVPLYDTLGTDAITYIVNKAELSVIFADKPEKAKLLLEGVENKLTPCLKIIVIMDSYDNDLVERGQKCGVEIIGLKALEDLGRVNRTKPKPPEPEDLAIICFTSGTTGNPKGAMVTHQNIMNDCSGFIKATESAFIASPEDVLISFLPLAHMFETVVECVMLCHGAKIGFFQGDIRLLMDDLKVLQPTIFPVVPRLLNRMFDRIFGQANTSVKRWLLDFASKRKEAELRSGIVRNNSLWDKLIFHKIQSSLGGKVRLMITGAAPVSATVLTFLRAALGCQFYEGYGQTECTAGCCLSLPGDWTAGHVGAPMPCNYIKLVDVEDMNYQAAKGEGEVCVKGANVFKGYLKDPARTAEALDKDGWLHTGDIGKWLPNGTLKIIDRKKHIFKLAQGEYIAPEKIENIYLRSEAVAQVFVHGESLQAFLIAIVVPDVEILPSWAQKRGFQGSFEELCRNKDINKAILEDMVKLGKNAGLKPFEQVKGIAVHPELFSIDNGLLTPTLKAKRPELRNYFRSQIDELYSTIKI

SEQ ID NO: 2328 - DNA, 3188 bp, Homo sapiens
  ref <308>: DATABASE ACCESSION NUMBER: Refseq / NM_001995
  ref <309>: DATABASE ENTRY DATE: 2001-02-06
cgggcagtgacagccggcgcggatcgcgcgtccacggaggagaatcagcttagagaactatcaacacaggacaatgcaagcccatgagctgttccggtattttcgaatgccagagctggttgacttccgacagtgcgtgactcttccgaccaacacgcttatgggcttcggagctttttccagacgactcaccaccttctggcggccacgccacccaaaacccctgaagccgccatggcacctctccatgcagtcagtggaagtggcgggtagtggtggtgcacgaagatccgcactacttgacagcgacgagcccttggtgtatttctatgatgatgttacaacattatacgaaggtttccagagagggatacaggtgtcaaataatggcccttgtttaggctctcggaaaccagaccaaccctatgaatggctttcatataaacaggttgcagaattgtcggagtgcataggctcagcactgatccagaagggcttcaagactgccccagatcagttcattggcatctttgctcaaaatagacctgagtgggtgattattgaacaaggatgctttgcttattcgatggtgatcgttccactttatgatacccttggaaatgaagccatcacgtacatagtcaacaaagctgaactctctctggtttttgttgacaagccagagaaggccaaactcttattagagggtgtagaaaataagttaataccaggccttaaaatcatagttgtcatggactcgtacggcagtgaactggtggaacgaggccagaggtgtggggtggaagtcaccagcatgaaggcgatggaggacctgggaagagccaacagacggaagcccaagcctccagcacctgaagatcttgcagtaatttgtttcacaagtggaactacaggcaaccccaaaggagcaatggtcactcaccgaaacatagtgagcgattgttcagcttttgtgaaagcaacagagaatacagtcaatccttgcccagatgatactttgatatctttcttgcctctcgcccatatgtttgagagagttgtagagtgtgtaatgctgtgtcatggagctaaaatcggatttttccaaggagatatcaggctgctcatggatgacctcaaggtgcttcaacccactgtcttccccgtggttccaagactgctgaaccggatgtttgaccgaattttcggacaagcaaacaccaccgtgaagcgatggctcttggactttgcctccaagaggaaagaagcagacgttcgcagcggcatcatcagaaacaacagcctgtgggaccggctgatcttccacaaagtacagtcgagcctgggcggaagagtccggctgatggtgacaggagccgccccggtgtctgccactgtgctgacgttcctcagagcagccctgggctgtcagttttatgaaggatacggacagacagagtgcactgccgggtgctgcctaaccatgcctggagactggaccacaggccatgttggggccccgatgccgtgcaatttgataaaacttggttggcagttggaagaaatgaattacatggcgtccgagggcgagggcgaggtgtgtgtgaaagggccaaatgtatttcagggctacttgaaggacccagcgaaaacagcagaagctttggacaaagacggctggttacacacaggggacatcggaaaatggttaccaaatggcaccttgaaaattatcgaccggaaaaagcacatatttaagctggcacaaggagaatacatagcccctgaaaagattgaaaatatctacatgcgaagtgagcctgttgctcaggtgtttgtccacggagaaagcctgcaggcatttctcattgcaattgtggtaccagatgttgagacattatgttcctgggcccaaaagagaggatttgaagggtcgtttgaggaactgtgcagaaataaggatgtcaaaaaagctatcctcgaagatatggtgagacttgggaaggattctggtctgaaaccatttgaacaggtcaaaggcatcacattgcaccctgaattattttctatcgacaatggccttctgactccaacaatgaaggcgaaaaggccagagctgcggaactatttcaggtcgcagatagatgacctctattccatcatcaaggtttagtgtgaagaagaaagctcagaggaaatggcacagttccacaatctcttctcctgctgatggccttcatgttgttaattttgaatacagcaagtgtagggaaggaagcgttctgtgtttgacttgtccattcggggttcttctcataggaatgctagaggaaacagaacactgccttacagtcacctcagtgttcagaccatgtttatggtaatacacacttccaaaagtagccttaaaaattgtaaagggatactataaatgtgctaattatttgagacttcctcagtttaaaaagtgggttttaaatcttctgtctccctgtttttctaatcaaggggttaggactttgctatctctgagatgtctgctacttcgtcgaaattctgcagctgtctgctgctctaaagagtacagtgctctagagggaagtgttccctttaaaaataagaacaactgtcctggctggagatctcacaagcggaccagagatctttttaaatccctgctactgtcccttctcacaggcattcacagaacccttctgattcgaagggttacgaaactcatgttcttctccagtcccctgtggtttctgttggagcataaggtttccagtaagcgggagggcagatccaactcagaaccatgcagataaggagcctctggcaaatgggtgctgcatcagaacgcgtggattctctttcatggcagatgctcttggactcggttctccaggcctgattccccgactccatcctttttcagggttatttaaaaatctgccttagattctatagtgaagacaagcatttcaagaaagagttacctggatcagccatgctcagctgtgacgcctgataactgtctactttatcttcactgaaccactcactctgtgtaaaggccaacggatttttaatgtggttttcatatcaaaagatcatgttgggattaacttgcctttttccccaaaaaataaactctcaggcaaggcatttcttttaaagctattccg

SEQ ID NO: 2329 - protein, 699 aa, Homo sapiens
  ref <308>: DATABASE ACCESSION NUMBER: SWISS-Prot / P41215
  ref <309>: DATABASE ENTRY DATE: 2001-10-16
MQAHELFRYFRMPELVDFRQCVTLPTNTLMGFGAFSRRLTTFWRPRHPKPLKPPWHLSMQSVEVAGSGGARRSALLDSDEPLVYFYDDVTTLYEGFQRGIQVSNNGPCLGSRKPDQPYEWLSYKQVAELSECIGSALIQKGFKTAPDQFIGIFAQNRPEWVIIEQGCFAYSMVIVPLYDTLGNEAITYIVNKAELSLVFVDKPEKAKLLLEGVENKLIPGLKIIVVMDSYGSELVERGQRCGVEVTSMKAMEDLGRANRRKPKPPAPEDLAVICFTSGTTGNPKGAMVTHRNIVSDCSAFVKATENTVNPCPDDTLISFLPLAHMFERVVECVMLCHGAKIGFFQGDIRLLMDDLKVLQPTVFPVVPRLLNRMFDRIFGQANTTVKRWLLDFASKRKEADVRSGIIRNNSLWDRLIFHKVQSSLGGRVRLMVTGAAPVSATVLTFLRAALGCQFYEGYGQTECTAGCCLTMPGDWTTGHVGAPMPCNLIKLGWQLEEMNYMASEGEGEVCVKGPNVFQGYLKDPAKTAEALDKDGWLHTGDIGKWLPNGTLKIIDRKKHIFKLAQGEYIAPEKIENIYMRSEPVAQVFVHGESLQAFLIAIVVPDVETLCSWAQKRGFEGSFEELCRNKDVKKAILEDMVRLGKDSGLKPFEQVKGITLHPELFSIDNGLLTPTMKAKRPELRNYFRSQIDDLYSIIKV

SEQ ID NO: 2330 - DNA, 897 bp, Rattus norvegicus
  ref <308>: DATABASE ACCESSION NUMBER: EMBL / D90258
  ref <309>: DATABASE ENTRY DATE: 1999-09-02
cgttctgtggcctgccgggtcagcaccatgagctccattggcactgggtatgacctgtcagcctctacattctctcctgatggaagagttttccaagttgaatatgctatgaaggctgtggaaaacagtagtacagctattgggatcagatgtaaagatggtgttgtgtttggggtagaaaaattagtcctttctaaactttatgaagaaggctccaataaacgtcttttcaatgttgatcgacatgttggaatggcagtggcaggtttgttggcagatgctcgttccttggcagacatagcaagagaagaagcgtccaactttaggtctaactttggctataacattcctctaaaacatcttgcagacagagtggccatgtatgtacacgcgtatacactctacagtgctgttagaccttttggctgcagtttcatgttggggtcttacagtgtgaatgatggtgcacagctctatatgatcgatccatcaggtgtttcatatggttactggggctgtgccattggcaaagccaggcaagctgcaaagacagaaatagaaaagcttcagatgaaggaaatgacctgccgtgatgtagttaaagaagttgcaaaaataatttacatagtacatgatgaagttaaggataaagcttttgaactagagctcagctgggttggtgaattaactaaaggaagacatgaaattgttcccaaagacgtaagagaggaagcagagaaatatgccaaggaatctttgaaggaagaagatgaatcagatgacgacaatatgtaacatttcaccatcctctggtgtccatttctgtgacagttgcatatggctagcaccatggattatatatacccactgaccaattttcattaaattttgtcttat

SEQ ID NO: 2331 - protein, 254 aa, Rattus norvegicus
  ref <308>: DATABASE ACCESSION NUMBER: SWISS-Prot / BAA14302
  ref <309>: DATABASE ENTRY DATE: 2002-06-15
SSIGTGYDLSASTFSPDGRVFQVEYAMKAVENSSTAIGIRCKDGVVFGVEKLVLSKLYEEGSNKRLFNVDRHVGMAVAGLLADARSLADIAREEASNFRSNFGYNIPLKHLADRVAMYVHAYTLYSAVRPFGCSFMLGSYSVNDGAQLYMIDPSGVSYGYWGCAIGKARQAAKTEIEKLQMKEMTCRDVVKEVAKIIYIVHDEVKDKAFELELSWVGELTKGRHEIVPKDVREEAEKYAKESLKEEDESDDDNM

SEQ ID NO: 2332 - DNA, 838 bp, Homo sapiens
  ref <308>: DATABASE ACCESSION NUMBER: Refseq / NM_002788
  ref <309>: DATABASE ENTRY DATE: 2002-11-05
gcacgatgagctcaatcggcactgggtatgacctgtcagcctctacattctctcctgacggaagagtttttcaagttgaatatgctatgaaggctgtggaaaatagtagtacagctattggaatcagatgcaaagatggtgttgtctttggggtagaaaaattagtcctttctaaactttatgaagaaggttccaacaaaagactttttaatgttgatcggcatgttggaatggcagtagcaggtttgttggcagatgctcgttctttagcagacatagcaagagaagaagcttccaacttcagatctaactttggctacaacattccactaaaacatcttgcagacagagtggccatgtatgtgcatgcatatacactctacagtgctgttagaccttttggctgcagtttcatgttagggtcttacagtgtgaatgacggtgcgcaactctacatgattgacccatcaggtgtttcatacggttattggggctgtgccatcggcaaagccaggcaagctgcaaagacggaaatagagaagcttcagatgaaagaaatgacctgccgtgatatcgttaaagaagttgcaaaaataatttacatagtacatgacgaagttaaggataaagcttttgaactagaactcagctgggttggtgaattaactaatggaagacatgaaattgttccaaaagatataagagaagaagcagagaaatatgctaaggaatctctgaaggaagaagatgaatcagatgatgataatatgtaacatttactccagcatctattgtattttaaatttctactccagtccaatgtaactatttagccctg

SEQ ID NO: 2333 - protein, 254 aa, Homo sapiens
  ref <308>: DATABASE ACCESSION NUMBER: SWISS-Prot / P25788
  ref <309>: DATABASE ENTRY DATE: 2002-06-15
SSIGTGYDLSASTFSPDGRVFQVEYAMKAVENSSTAIGIRCKDGVVFGVEKLVLSKLYEEGSNKRLFNVDRHVGMAVAGLLADARSLADIAREEASNFRSNFGYNIPLKHLADRVAMYVHAYTLYSAVRPFGCSFMLGSYSVNDGAQLYMIDPSGVSYGYWGCAIGKARQAAKTEIEKLQMKEMTCRDIVKEVAKIIYIVHDEVKDKAFELELSWVGELTNGRHEIVPKDIREEAEKYAKESLKEEDESDDDNM

SEQ ID NO: 2334 - DNA, 2749 bp, Rattus norvegicus
  ref <308>: DATABASE ACCESSION NUMBER: EMBL / D90401
  ref <309>: DATABASE ENTRY DATE: 2000-04-29
tcccggtcccgctgcgtgtcccgggcgttcatgcgctcgctttctgccttccagaaggggaactgccctctagggagacgttccctgcctggggtctccttatgtcagggaccaggttaccctgacagcaggaagatggtcattaacacagtagccgtcttcagtgttcgcttcttccaaaccacggcagtgtgcaagaatgatgtgattacagtccagaccccagcgtttgcagagtctgtcacagagggagatgtcaggtgggagaaagctgttggagatgcagttgcagaagatgaagtggtgtgtgagattgagacagacaagacttctgtgcaggttccatcaccagcaaatggcatcattgaagctcttttggtacccgatgggggcaaagttgaaggaggaactcctctattcacactcaggaaaaccggtgctgctcctgctaaggccaaaccagctgaagcccctgctacagcccacaaagcagcgcctgaagcaccggcggcccctcctcctcctgtagcaccagtgcccactcagatgccacctgtgccctcaccctcacaacctccttctagcaaaccagtgtctgcaataaaacccactgctgcccctccactggctgaggcgggagctgctaaaggcctgcgctcagaacatcgggaaaagatgaacaggatgcggcagcgcatcgcccagcgtctgaaggaagcccagaacacctgcgcaatgctgacgacgttcaatgaggttgacatgagtaacatacaagagatgagagctcggcacaaagatgctttcctgaaaaaacataacctgaaattaggcctcatgtcggcatttgtgaaggcctcagcattcgccttgcaggagcagcctgtagtaaacgcagtgattgatgacgcaaccaaggaggtggtgtacagagattatattgacatcagtgtcgcagttgctaccccaaggggtctcgtggttcctgtcatcaggaatgtggaaactatgaattatgcagatattgaacggaccattaatgaactaggagagaaggcccggaagaatgaacttgccatcgaagacatggatgggggcaccttcaccatcagcaatggaggagttttcggctcacttttcggaacacccattatcaacccgcctcagtctgccattctgggcatgcatggcatcttcgacaggcctgtggctgtggggggcaaggtggaagtccgacctatgatgtatgtagccctgacctacgaccaccggctgattgatggcagagaggctgtgactttcctccgaaaaatcaaggcagcagtagaagatccagcagtcctcctcctagacctttaggaggaagccacacatgcctacctactgatcatgcaggaatgaaaaaccagtcttctagcccgtgcaacctcctcagtccaggttaactgagggcaggcaggcactaccattggcctcgagcaaggactccagggcactacgtaaccaggcctagggcatcagtcctttcatgggtctttttatgctccttctggctcttcctctctcctgtgctcttccttctgctctcttggcctgacagagagagagagagagagagagagagagagagagagagagagagagagagcctgtgaatgcccatcaatagtcctgcctttattccagtcctctacaaagacacctttgcttctctccagtaacagtatgctatagggaataccaccagggaccatgtgattgagtttcttgtctttggaaagtgttctcccaaagatgcctagggggaagctttgctccggggctcaaagcagcctgtgtcgcagctgttcttggtctcacttgatgccccctgtgtgggtattgaagataggcaaagcggggctacctcatcctaacctgtcagcggcttcaaggtgcctctctacctctgacaggagcacaggctggaggatttagggataggcacaattgtgctgggtccctgaggctacctgtgtagtgcacagatgggagtgaaacttggcttgccctttacagggctccattgtatgctggcactgggaagattcatgttgtcataactacgtacaactgttgtccatcataccaaccctttccagcttctaggaatcattctaggacggtgttctcacgtaaagcagattttagcatatcatggcagtgggacacctggtgaacggactgttctcaccagatcaggctgatgagaccttttaaattcaaggtggtacgagcatgtgctggggtagggcctgttctctcccaacctgggatgtggcctgtggggagcaaggccttggttcctctggtgttggacacagataaggggaggatggactgtggcgggaaccagcctcaggagttaggagagtgaagagataatgacgtcatcgctacactcacccttcaggggataggtggtagttagaatatttttgaagcatggtgaaatgtaattaactggttatgaaagctcctagcccttgtgtccttcactgagcctgagactgctgacagctgacatggggccattagtgctgaatgcccttttttcttgtaatccaagacttcctgggggaagaggggaagaggtcagtattgagtgcctgcaacatctgctacgtatagctataccattcagaacttgtaatgaaaatatttaaagagactgattttgaatgaaaattaaagggcaaatgttctcaaa

SEQ ID NO: 2335 - protein, 442 aa, Rattus norvegicus
  ref <308>: DATABASE ACCESSION NUMBER: SWISS-Prot / Q01205
  ref <309>: DATABASE ENTRY DATE: 2002-06-15
MRSLSAFQKGNCPLGRRSLPGVSLCQGPGYPDSRKMVINTVAVFSVRFFQTTAVCKNDVITVQTPAFAESVTEGDVRWEKAVGDAVAEDEVVCEIETDKTSVQVPSPANGIIEALLVPDGGKVEGGTPLFTLRKTGAAPAKAKPAEAPATAHKAAPEAPAAPPPPVAPVPTQMPPVPSPSQPPSSKPVSAIKPTAAPPLAEAGAAKGLRSEHREKMNRMRQRIAQRLKEAQNTCAMLTTFNEVDMSNIQEMRARHKDAFLKKHNLKLGLMSAFVKASAFALQEQPVVNAVIDDATKEVVYRDYIDISVAVATPRGLVVPVIRNVETMNYADIERTINELGEKARKNELAIEDMDGGTFTISNGGVFGSLFGTPIINPPQSAILGMHGIFDRPVAVGGKVEVRPMMYVALTYDHRLIDGREAVTFLRKIKAAVEDPAVLLLDL

SEQ ID NO: 2336 - DNA, 510 bp, Homo sapiens
  ref <308>: DATABASE ACCESSION NUMBER: EMBL / AI184508
  ref <309>: DATABASE ENTRY DATE: 2000-03-03
ttttatgggtataagtgttctttattttaaaaagcaccactgcttacagacaaaactgtaatagacatggcttgggaggaaaaaatacatatatatgaattatggcttgaaaatttctgaatatcagtatttaacagcgattttaaaactctgccatcacaccaatcttcagtgtaagaaagaaacaaatctgcatcacatcttcaagtcctaaggatccatttcacttcatggtaccctcaaaatacttgccagctctgtgttctcacgcagaaggtgactttcataatctgcaccttcaaaatatattgtccaagtacctggtgaacgtgtgtgaggaattaacctgcaaaatcctctctggcacagagggtctaaaaattcttgtaaaccatttggaatgtttctgacaacatcacaagaataaccatcttctggcaaaagaaacggcagctgcagatcaggatcctcctccaactgcacttcccttccatcactgggggccagctc

SEQ ID NO: 2337 - protein, 1816 aa, Homo sapiens
  ref <308>: DATABASE ACCESSION NUMBER: SWISS-Prot / P55196
  ref <309>: DATABASE ENTRY DATE: 2002-06-15
MSAGGRDEERRKLADIIHHWNANRLDLFEISQPTEDLEFHGVMRFYFQDKAAGNFATKCIRVSSTATTQDVIETLAEKFRPDMRMLSSPKYSLYEVHVSGERRLDIDEKPLVVQLNWNKDDREGRFVLKNENDAIPPKAQSNGPEKQEKEGVIQNFKRTLSKKEKKEKKKREKEALRQASDKDDRPFQGEDVENSRLAAEVYKDMPETSFTRTISNPEVVMKRRRQQKLEKRMQEFRSSDGRPDSGGTLRIYADSLKPNIPYKTILLSTTDPADFAVAEALEKYGLEKENPKDYCIARVMLPPGAQHSDEKGAKEIILDDDECPLQIFREWPSDKGILVFQLKRRPPDHIPKKTKKHLEGKTPKGKERADGSGYGSTLPPEKLPYLVELSPDGSDSRDKPKLYRLQLSVTEVGTEKLDDNSIQLFGPGIQPHHCDLTNMDGVVTVTPRSMDAETYVEGQRISETTMLQSGMKVQFGASHVFKFVDPSQDHALAKRSVDGGLMVKGPRHKPGIVQETTFDLGGDIHSGTALPTSKSTTRLDSDRVSSASSTAERGMVKPMIRVEQQPDYRRQESRTQDASGPELILPASIEFRESSEDSFLSAIINYTNSSTVHFKLSPTYVLYMACRYVLSNQYRPDISPTERTHKVIAVVNKMVSMMEGVIQKQKNIAGALAFWMANASELLNFIKQDRDLSRITLDAQDVLAHLVQMAFKYLVHCLQSELNNYMPAFLDDPEENSLQRPKIDDVLHTLTGAMSLLRRCRVNAALTIQLFSQLFHFINMWLFNRLVTDPDSGLCSHYWGAIIRQQLGHIEAWAEKQGLELAADCHLSRIVQATTLLTMDKYAPDDIPNINSTCFKLNSLQLQALLQNYHCAPDEPFIPTDLIENVVTVAENTADELARSDGREVQLEEDPDLQLPFLLPEDGYSCDVVRNIPNGLQEFLDPLCQRGFCRLIPHTRSPGTWTIYFEGADYESHLLRENTELAQPLRKEPEIITVTLKKQNGMGLSIVAAKGAGQDKLGIYVKSVVKGGAADDGRLAAGDQLLSVDGRSLVGLSQERAAELMTRTSSVVTLEVAKQGAIYHGLATLLNQPSPMMQRISDRRGSGKPRPKSEGFELYNNSTQNGSPESPQLPWAEYSEPKKLPGDDRLMKNRADHRSSPNVANQPPSPGGKSAYASGTTAKITSVSTGNLCTEEQTPPPRPEAYPIPTQTYTREYFTFPASKSQDRMAPPQNQWPNYEEKPHMHTDSNHSSIAIQRVTRSQEELREDKAYQLERHRIEAAMDRKSDSDMWINQSSSLDSSTSSQEHLNHSSKSVTPASTLTKSGPGRWKTPAAIPATPVAVSQPIRTDLPPPPPPPPVHYAGDFDGMSMDLPLPPPPSANQIGLPSAQVAAAERRKREEHQRWYEKEKARLEEERERKRREQERKLGQMRTQSLNPAPFSPLTAQQMKPEKPSTLQRPQETVIRELQPQQQPRTIERRDLQYITVSKEELSSGDSLSPDPWKRDAKEKLEKQQQMHIVDMLSKEIQELQSKPDRSAEESDRLRKLMLEWQFQKRLQESKQKDEDDEEEEDDDVDTMLIMQRLEAERRARLQDEERRRQQQLEEMRKREAEDRARQEEERRRQEEERTKRDAEEKRRQEEGYYSRLEAERRRQHDEAARRLLEPEAPGLCRPPLPRDYEPPSPSPAPGAPPPPPQRNASYLKTQVLSPDSLFTAKFVAYNEEEEEEDCSLAGQDKYSSTRKSHGDLLPAPLKPRPPPCQPRPASDGVFLSNSFQPPSAKANSTAHKKGQPLPPPKKSSSYHPSHCKGRGKRVTNQLSLS

SEQ ID NO: 2338 - DNA, 2749 bp, Rattus norvegicus; identical to SEQ ID NO: 2334
  ref <308>: DATABASE ACCESSION NUMBER: EMBL / D90401
  ref <309>: DATABASE ENTRY DATE: 2000-04-29

SEQ ID NO: 2339 - protein, 442 aa, Rattus norvegicus; identical to SEQ ID NO: 2335
  ref <308>: DATABASE ACCESSION NUMBER: SWISS-Prot / Q01205
  ref <309>: DATABASE ENTRY DATE: 2002-06-15

SEQ ID NO: 2340 - DNA, 510 bp, Homo sapiens; identical to SEQ ID NO: 2336
  ref <308>: DATABASE ACCESSION NUMBER: EMBL / AI184508
  ref <309>: DATABASE ENTRY DATE: 2000-03-03

SEQ ID NO: 2341 - protein, 1816 aa, Homo sapiens; identical to SEQ ID NO: 2337
  ref <308>: DATABASE ACCESSION NUMBER: SWISS-Prot / P55196
  ref <309>: DATABASE ENTRY DATE: 2002-06-15

SEQ ID NO: 2342 - DNA, 1850 bp, Rattus norvegicus
  ref <308>: DATABASE ACCESSION NUMBER: EMBL / D90404
  ref <309>: DATABASE ENTRY DATE: 2000-04-14
gaattccggttctagttgttgttttctctgccatctgctctccgggcgccgtcaaccatgggtccgtggacccactccttgcgcgccgccctgctgctggtgcttttgggagtctgcaccgtgagctccgacactcctgccaactgcacttaccctgacctgctgggtacctgggttttccaggtgggccctagacatccccgaagtcacattaactgctcggtaatggaaccaacagaagaaaaggtagtgatacacctgaagaagttggatactgcctatgatgaagtgggcaattctgggtatttcaccctcatttacaaccaaggctttgagattgtgttgaatgactacaagtggtttgcgtttttcaagtatgaagtcaaaggcagcagagccatcagttactgccatgagaccatgacagggtgggtccatgatgtcctgggccggaactgggcttgctttgttggcaagaagatggcaaatcactctgagaaggtttatgtgaatgtggcacaccttggaggtctccaggaaaaatattctgaaaggctctacagtcacaaccacaactttgtgaaggccatcaattctgttcagaagtcttggactgcaaccacctatgaagaatatgagaaactgagcatacgagatttgataaggagaagtggccacagcggaaggatcctaaggcccaaacctgccccgataactgatgaaatacagcaacaaattttaagtttgccagaatcttgggactggagaaacgtccgtggcatcaattttgttagccctgttcgaaaccaagaatcttgtggaagctgctactcatttgcctctctgggtatgctagaagcaagaattcgtatattaaccaacaattctcagaccccaatcctgagtcctcaggaggttgtatcttgtagcccgtatgcccaaggttgtgatggtggattcccatacctcattgcaggaaagtatgcccaagattttggggtggtggaagaaaactgctttccctacacagccacagatgctccatgcaaaccaaaggaaaactgcctccgttactattcttctgagtactactatgtgggtggtttctatggtggctgcaatgaagccctgatgaagcttgagctggtcaaacacggacccatggcagttgcctttgaagtccacgatgacttcctgcactaccacagtgggatctaccaccacactggactgagcgaccctttcaacccctttgagctgaccaatcatgctgttctgcttgtgggctatggaaaagatccagtcactgggttagactactggattgtcaagaacagctggggctctcaatggggtgagagtggctacttccggatccgcagaggaactgatgaatgtgcaattgagagtatagccatggcagccataccgattcctaaattgtaggacctagctcccagtgtcccatacagctttttattattcacagggtgatttagtcacaggctggagacttttacaaagcaatatcagaagcttaccactaggtacccttaaagaattttgcccttaagtttaaaacaatccttgatttttttcttttaatatcctccctatcaatcaccgaactacttttctttttaaagtacttggttaagtaatacttttctgaggattggttagatattgtcaaatatttttgctggtcacctaaaatgcagccagatgtttcattgttaaaaatctatataaaagtgcaagctgccttttttaaattacataaatcccatgaatacatggccaaaatagttattttttaaagactttaaaataaatgattaatcgatgct

SEQ ID NO: 2343 - protein, 462 aa, Rattus norvegicus
  ref <308>: DATABASE ACCESSION NUMBER: SWISS-Prot / P80067
  ref <309>: DATABASE ENTRY DATE: 2002-06-15
MGPWTHSLRAALLLVLLGVCTVSSDTPANCTYPDLLGTWVFQVGPRHPRSHINCSVMEPTEEKVVIHLKKLDTAYDEVGNSGYFTLIYNQGFEIVLNDYKWFAFFKYEVKGSRAISYCHETMTGWVHDYLGRNWACFVGKKMANHSEKVYVNVAHLGGLQEKYSERLYSHHHNFVKAINSVQKSWTATTYRRYEKLSIRDLIRRSGHSGRILRPKPAPITDEIQQQILSLPESWDWRNVRGINFVSPVRNQESCGSCYSFASIGMLEARIRILTNNSQTPILSPQEVVSCSPYAQGCDGGFPYLIAGKYAQDFGVVEENCFPYTATDAPCKPKENCLRYYSSEYYYVGGFYGGCNEALMKLELVKHGPMAVAFEVHDDFLHYHSGIYHHTGLSDPFNPFELTNHAVLLVGYGKDPVTGLDYWIVKNSWGSQWGESGYFRIRRGTDECAIESIAMAAIPIPKL

SEQ ID NO: 2344 - DNA, 304 bp, Homo sapiens
  misc_feature (1)..(304): n=a, c, g or t
  ref <308>: DATABASE ACCESSION NUMBER: EMBL / AA296068
  ref <309>: DATABASE ENTRY DATE: 2000-03-08
agcatcgattaaatcatttattttaaagtctttaaaaaataactattttggccatgtattcatgggatttatgtaatttaaaaaaggngcttgcacttttatatagntttttaacaatgaaacatctggctgcattttaggngaccngcaaaaatatttgacaatatctaaccaatccncagaaaagtattacttaaccaagtactttaaaaagnaaagtagttcggtgattgatagggaggntattaaaaggnaaaaatcaaggnttgttttaaacttaagggcaaaattctttaagggtacc

SEQ ID NO: 2345 - DNA, 1850 bp, Rattus norvegicus; identical to SEQ ID NO: 2342
  ref <308>: DATABASE ACCESSION NUMBER: EMBL / D90404
  ref <309>: DATABASE ENTRY DATE: 2000-04-14

SEQ ID NO: 2346 - protein, 462 aa, Rattus norvegicus; identical to SEQ ID NO: 2343
  ref <308>: DATABASE ACCESSION NUMBER: SWISS-Prot / P80067
  ref <309>: DATABASE ENTRY DATE: 2002-06-15

SEQ ID NO: 2347 - DNA, 304 bp, Homo sapiens; identical to SEQ ID NO: 2344
  misc_feature (1)..(304): n=a, c, g or t
  ref <308>: DATABASE ACCESSION NUMBER: EMBL / AA296068
  ref <309>: DATABASE ENTRY DATE: 2000-03-08

SEQ ID NO: 2348 - DNA, 2696 bp, Rattus norvegicus
  ref <308>: DATABASE ACCESSION NUMBER: EMBL / E00717
  ref <309>: DATABASE ENTRY DATE: 2000-09-02
catcctccctggggtcctagagaacactcttcagttcagtccttcctcacagccaaagcagccacctagatcatgccttgtgtgtatggattcccagccttcacatcagccacagagctgctcctggccgtcaccacattctgccttggattctgggtggttagagtcacaagaacctgggttcccaaaggtctgaagagtccacccggaccctggggcttgcccttcatagggcacgtgctgaccctggggaagaacccacacctgtcactgacaaaactgagtcagcagtatggggacgtgctgcagatccgtattggctccacacccgtggtggtgctgagcggcctgaacaccatcaagcaggccctggtgaaacagggggatgacttcaaaggccggccagacctctacagcttcacacttatcgctaatggccagagcatgactttcaacccagactctggaccgctgtgggctgcccgccggcgcctggcccagaatgcgctgaagagtttctccatagcctcagacccaacactggcatcctcttgctacttggaagagcacgtgagcaaagaggctgaatacttaatcagcaagttccagaagctgatggcagaggttggccacttcgaccctttcaagtatttggtggtgtcagtggccaatgtcatctgtgccatatgctttggcagacgttatgaccacgatgaccaagagctgctcagcatagtcaatctaagcaatgagtttggggaggttactggttctggatacccagctgacttcattcctatcctccgttacctccctaactcttccctggatgccttcaaggacttgaataagaagttctacagtttcatgaagaagctaatcaaagagcactacaggacatttgagaagggccacatccgggacatcacagacagcctcattgagcattgtcaggacaggaggctggacgagaatgccaatgtccagctctcagatgataaggtcattacgattgtttttgacctctttggagctgggtttgacacaatcacaactgctatctcttggagcctcatgtacctggtaaccaaccctaggatacagagaaagatccaggaggagttagacacagtgattggcagggatcggcagccccggctttctgacagacctcagctgccctatctggaggccttcatcctggagaccttccgacattcatcctttgtcccattcaccatcccccacagcaccataagagatacaagtctgaatggcttctatatccccaagggacactgtgtctttgtgaaccagtggcaggttaaccatgaccaggaactatggggtgatccaaacgagttccggcctgaaaggtttcttacctccagtggcactctggacaaacacctgagtgagaaggtcattctctttggtttgggcaagcgaaagtgcattggggagaccattggccgactggaggtctttctcttcctggccatcttgctgcagcaaatggaatttaatgtgtcaccaggcgagaaggtggatatgactcctgcctatgggctgactttaaaacatgcccgctgtgagcacttccaagtgcagatgcggtcttctggtcctcagcatctccaggcttagactgtcctggatgctcaccagaccaggtggctgttcctaggattcaacttcagtcagaaacacagaccctggggcattgtgcctgcctcctactttggacttgtttctctatatgctgaacacagacactgggcacagcagagacccacaggaacctcagatccttctcaagttcagcatcaactaggagacctaaaagggttatgagatacctgggcctcagaaaacccctgaagagctctctaggtcctccagtggctggctggtttgaaaaatacttacaacaggtcatgccaggatctggctggttactttgacaaccgggagtagcccagaatggagggagaagagaactcaaaatactggcacggaggtgctcttgccatctgctgaggctcaactgtcttccaacatgggtttatgacactacatgtgggggtgtagcaccttcatttaccctacatagaaataaacaaggtctccttgtccttgcaaagcccatgttcctgtttaggaagggctgagagttgtgtgtagaaagacctaagaacatagggacagactttctgggcagtaagaccaggtttagagtaaaggaatgccttttgagacagtattgtgtagtccaggctgcctctgaacttgctaccaagggtggccttgaactccttaattcttttttctgcttttaccaccctaccaagtgctagggtacagtcatgaaccgctacaccagctcttggtctcttgtctttactgtataaaacgtttctttctttcttttttttttaaagaaaatgtttgtgcataagagttttttattgtggcctgtattttgcttatgcatttgtattagtcgtacttcaatagatttagataattcgcttagtgtaatagagaaaaatctaactcaagtatccagaaatatataggaaaaacgtacctgagctaaataaaaatattacctggaaaaaaaaaaaaaaaaaaaaaaaaaaaaaaaaaaaaaaaaaaaaaaaaaaaaaaaaaaaaaaaaaaaaaaaaaaaaaaaa

SEQ ID NO: 2349 - protein, 524 aa, Rattus norvegicus
  ref <308>: DATABASE ACCESSION NUMBER: SWISS-Prot / CAA25153
  ref <309>: DATABASE ENTRY DATE: 2002-06-15
MPSVYGFPAFTSATELLLAVTTFCLGFWVVRVTRTWVPKGLKSPPGPWGLPFIGHVLTLGKNPHLSLTKLSQQYGDVLQIRIGSTPVVVLSGLNTIKQALVKQGDDFKGRPDLYSFTLIANGQSMTFNPDSGPLWAARRRLAQNALKSFSIASDPTLASSCYLEEHVSKEAEYLISKFQKLMAEVGHFDPFKYLVVSVANVICAICFGRRYDHDDQELLSIVNLSNEFGEVTGSGYPADFIPILRYLPNSSLDAFKDLNKKFYSFMKKLIKEHYRTFEKGHIRDITDSLIEHCQDRRLDENANVQLSDDKVITIVFDLFGAGFDTITTAISWSLMYLVTNPRIQRKIQEELDTVIGRDRQPRLSDRPQLPYLEAFILETFRHSSFVPFTIPHSTIRDTSLNGFYIPKGHCVFVNQWQVNHDQELWGDPNEFRPERFLTSSGTLDKHLSEKVILFGLGKRKCIGETIGRLEVFLFLAILLQQMEFNVSPGEKVDMTPAYGLTLKHARCEHFQVQMRSSGPQHLQA

SEQ ID NO: 2350 - DNA, 2602 bp, Homo sapiens
  ref <308>: DATABASE ACCESSION NUMBER: Refseq / NM_000499
  ref <309>: DATABASE ENTRY DATE: 2001-03-12
ctcaccctgaaggtgacagttccttggaaccttccctgatccttgtgatcccaggctccaagagtccacccttcccagctcagctcagtacctcagccacctccaagatccctacactgatcatgcttttcccaatctccatgtcggccacggagtttcttctggcctctgtcatcttctgtctggtattctgggtaatcagggcctcaagacctcaggtccccaaaggcctgaagaatccaccagggccatggggctggcctctgattgggcacatgctgaccctgggaaagaacccgcacctggcactgtcaaggatgagccagcagtatggggacgtgctgcagatccgaattggctccacacccgtggtggtgctgagcggcctggacaccatccggcaggccctggtgcggcagggcgatgatttcaagggccggcccgacctctacaccttcaccctcatcagtaatggtcagagcatgtccttcagcccagactctggaccagtgtgggctgcccgccggcgcctggcccagaatggcctgaaaagtttctccattgcctctgacccagcctcctcaacctcctgctacctggaagagcatgtgagcaaggaggctgaggtcctgataagcacgttgcaggagctgatggcagggcctgggcactttaacccctacaggtatgtggtggtatcagtgaccaatgtcatctgtgccatttgctttggccggcgctatgaccacaaccaccaagaactgcttagcctagtcaacctgaataataatttcggggaggtggttggctctggaaacccagctgacttcatccctattcttcgctacctacccaacccttccctgaatgccttcaaggacctgaatgagaagttctacagcttcatgcagaagatggtcaaggagcactacaaaacctttgagaagggccacatccgggacatcacagacagcctgattgagcactgtcaggagaagcagctggatgagaacgccaatgtccagctgtcagatgagaagatcattaacatcgtcttggacctctttggagctgggtttgacacagtcacaactgctatctcctggagcctcatgtatttggtgatgaaccccagggtacagagaaagatccaagaggagctagacacagtgattggcaggtcacggcggccccggctctctgacagatcccatctgccctatatggaggccttcatcctggagaccttccgacactcttccttcgtccccttcaccatcccccacagcacaacaagagacacaagtttgaaaggcttttacatccccaaggggcgttgtgtctttgtaaaccagtggcagatcaaccatgaccagaagctatgggtcaacccatctgagttcctacctgaacggtttctcacccctgatggtgctatcgacaaggtgttaagtgagaaggtgattatctttggcatgggcaagcggaagtgtatcggtgagaccattgcccgctgggaggtctttctcttcctggctatcctgctgcaacgggtggaattcagcgtgccactgggcgtgaaggtggacatgacccccatctatgggctaaccatgaagcatgcctgctgtgagcacttccaaatgcagctgcgctcttaggtgcttgagagccctgaggcctagactctgtctacctggtctggttgggcagccagaccagcaggctggcctatgtggtctaagattcagcctgaaactcatagacactgatctggctgcagttttgctatctgggctgtgggcaagcctaagggatcctgcctgcccctaccctggacttgcctctgcacaccctccagagacaacaggtaaaacagggccacatagatgctgatggagccttcccaagttgtgcttgagccaggaggcctgctagggttaggaggtccttaggcctctgagaagctctgaagaactctctggaagcccctgggcccagtacctagctggctctgtgagggtgctgactggcttcagcaagttagaactagccaaaccaggaccctgtccaatctttgacaattgggagctgccaagagtgaagggaagagacagcccaggatactggcacagaggtagtctcactgcttgaactaggctgagcaatctgaccctatgggtctaggacacagttcctgggaacatcacattcctctgcccttcctgcaggcaggaacaaacagggctgccttctggccttgtaagacccttattgctgtcctggaggggctggggacttgtgtctgcggggatccagagcgcacagggagtgcacatatccaggcaccaggactagggctggagtgaggggggggtatttcaattaccttctattggtctcccttctctacactcttgtaataaaatgtctatttttaatgtttgtacacaacaatccttctattctagcctgcattgagcttgcatgcttgcataagagcttaagaaccattgatttaatgtaatagggaaaattctaacccaggtatccaaaaatgtgtaagaacaactacctgagctaaataaagatattgttcaga

SEQ ID NO: 2351 - protein, 512 aa, Homo sapiens [sequence omitted]

SEQ ID NO: 2352 - DNA, 660 bp, Rattus norvegicus
  ref <308>: DATABASE ACCESSION NUMBER: EMBL / E00898
  ref <309>: DATABASE ENTRY DATE: 2000-09-02
atatctaagtcaatattaggcatggaaatcttgggggccttcgaatgttatctcaggcatcttgaacttggggcccttcagttttgcatctgggtcctgacacatcaaggttcagccttgggtgggttcacatccacctcagggccctctgctttgaagccaagcatactgaacttgggcatcttcatcttgggcatcttcaggtgccagtctgggccctgcacattcacattcggaacatcaatgttcactttggggcctttgatgtcaacttcggaactttaatctcaccttccactttgggaagagacacgtccacatcacccttcactttggggcctttcagattcagatcaaagtcaggcatggagatctttgggggccttgatgttcatctcaggcatcttgaacttggggccttttagttttgcatccggacctccaatattcacatccggaacatcaatgtccaccctgggtcctgacacatcaaggtcagccttgggcaggctcatatccacctctgggccctctgctttgaagccaggcatactgaacttgggcatcttcatcttgggcatctccaggtgccagtctgggccctgcacatccacatctggagcattgatgaccactttggggcctttgatgtcaacttca

SEQ ID NO: 2353 - DNA, 1601 bp, Homo sapiens
  ref <308>: DATABASE ACCESSION NUMBER: EMBL / X74818
  ref <309>: DATABASE ENTRY DATE: 1994-09-03
aagggccccaaatttaaaatgcctgacctgcacctcaaggcaccgaagatctctatgcctgaagttgacctgaatctgaaaggtccaaagatgaagggcgacgtggacgtttctctgcccaaagtggaaggcgacctcaagggccctgaagttgacgtcaagggccccaaagtggacattgatgtcccagatgtggacgttcaaggcccagactggcacttaaaaatgcccaaagtgaaaatgcccaagttcagcatgcctggcttcaaaggagagggcccagatgtggatgtgaacctgcccaaggctgaccttgacgtctcaggacccaaggtggacattgatgttcctgatgtgaatatcgaaggtccagatgcgaaactaaagggccctaaattcaagatgcctgagatgaacatcaaagcccccaagatctccatgcctgactttgatttgcatctgaaaggtcccaaggtgaagggtgatgtggatgtttcccttcctaaagtggaaggtgacctcaagggcccagaagttgacatcaagggccccaaagtggacatcgatgcccctgatgtagatgttcatggcccagactggcacctgaagatgcccaaggtgaaaatgcccaaattcagcatgccaggattcaaaggagagggcccagatgtggatgttacccttcctaaggctgacattgagatttctggccccaaagtggacattgatgcccctgatgtcagtatcgaaggtccagatgcaaaactcaagggtccaaagttcaagatgccagagatgaacatcaaggcccccaaaatctccatgcctgacattgactttaacttgaagggtcccaaagtgaaaggtgatgtggatgtctctctgcccaaagtggaaggtgatctcaagggccctgaaattgacataaaaggccccagtttggacattgacacacctgatgtcaatattgaaggtccggaaggaaaattgaaggggcccaaatttaagatgcctgagatgaacatcaaagctcccaaaatctctatgcctgactttgatttgcacctgaaaggtcccaaggtgaagggtgatgtggatgtttcactacctaaggtggaaagtgatctgaaagggccagaggtagacattgaaggtcctgaagggaagctcaaaggtcccaagtttaagatgcctgatgtacatttcaaaagcccacaaatctccatgagtgacattgatttgaatttgaaaggacctaagataaaaggagatatggacatttccgttcctaaactggagggagatctgaaaggtcccaaagtggatgtcaaaggccctaaagtgggcattgacactcctgatattgacattcatggtccagaagggaaactgaagggccccaaatttaaaatgcctgacttacacctcaaggcaccgaagatctctatgcctgaagttgacctgaatctgaaaggtccaaaggtgaagggcgacatggacatttctctgcccaaagtggaaggcgacctcaagggccccgaagttgacatcagggaccccaaagtggacattgatgtcccagatgtggacgttcaaggccc

SEQ ID NO: 2354 - protein, 534 aa, Homo sapiens
  ref <308>: DATABASE ACCESSION NUMBER: SWISS-Prot / CAA52817
  ref <309>: DATABASE ENTRY DATE: 1998-08-01
KGPKFKMPDLHLKAPKISMPEVDLNLKGPKMKGDVDVSLPKVEGDLKGPEVDVKGPKVDIDVPDVDVQGPDWHLKMPKVKMPKFSMPGFKGEGPDVDVNLPKADLDVSGPKVDIDVPDVNIEGPDAKLKGPKFKMPEMNIKAPKISMPDFDLHLKGPKVKGDVDVSLPKVEGDLKGPEVDIKGPKVDIDAPDVDVHGPDWHLKMPKVKMPKFSMPGFKGEGPDVDVTLPKADIEISGPKVDIDAPDVSIEGPDAKLKGPKFKMPEMNIKAPKISMPDIDFNLKGPKVKGDVDVSLPKVEGDLKGPEIDIKGPSLDIDTPDVNIEGPEGKLKGPKFKMPEMNIKAPKISMPDFDLHLKGPKVKGDVDVSLPKVESDLKGPEVDIEGPEGKLKGPKFKMPDVHFKSPQISMSDIDLNLKGPKIKGDMDISVPKLEGDLKGPKVDVKGPKVGIDTPDIDIHGPEGKLKGPKFKMPDLHLKAPKISMPEVDLNLKGPKVKGDMDISLPKVEGDLKGPEVDIRDPKVDIDVPDVDVQGP

SEQ ID NO: 2355 - DNA, 1223 bp, Rattus norvegicus
  ref <308>: DATABASE ACCESSION NUMBER: EMBL / E01415
  ref <309>: DATABASE ENTRY DATE: 2000-09-02
agaccccagcaccatgcccatgacactgggttactgggacatccgtgggctagcgcatgccatccgcctgctcctggaatacacagactcgagctatgaggagaagagatacaccatgggagacgctcccgactttgacagaagccagtggctgaatgagaagttcaaactgggcctggacttccccaatctgccctacttaattgatggatcacacaagatcacccagagcaatgccatcctgcgctatcttggccgcaagcacaacctgtgtggggagacagaagaggagaggattcgtgtggacattctggagaatcagctcatggacaaccgcatggtgctggcgagactttgctataaccctgactttgagaagctgaagccagggtacctggagcaactgcctggaatgatgcggctttactccgagttcctgggcaagcggccatggtttgcaggggacaagatcacctttgtggatttcattgcttacgatgttcttgagaggaaccaagtgtttgaggccacgtgcctggacgcgttcccaaacctgaaggatttcatagcgcgctttgagggcctgaagaagatctccgactacatgaagtccagccgcttcctcccaagacctctgttcacaaagatggctatttggggcagcaagtaggaccctgacaggtgggctttaggagaaagataccaaatctcctgggtttgccaagagccctaaggagcgggcaggattcctgagccccagagccatgttttcttccttccttccattccagtccccaagccttaccagctctcattttttggtcatcaaattcctgccaaacacaggctcttaaaagccctagcaactcctttccattagcaaaatagccttctaaagttaaagtgccccgcccccacccctcgagctcatgtgattggatagttggctcccaacatgtgattattttgggcaggtcaggctccccggcagatggggtctatctggagacagtagattgctagcagctttgaccaccgtagccaagcccctcttcttgctgtttcccgagactagctatgagcaaggtgtgctgtgtccccagcacttgtcactgcctctgtaacccgctcctaccgctctttcttcctgctgctgtgagctgtacctcctgaccacaaaccagaataaatcattctccccttaaaaaaaaaaaaaaaaaaaa

SEQ ID NO: 2356 - protein, 218 aa, Rattus norvegicus
  ref <308>: DATABASE ACCESSION NUMBER: Refseq / NP_112416
  ref <309>: DATABASE ENTRY DATE: 2001-04-11
MPMTLGYWDIRGLAHAIRLLLEYTDSSYEEKRYTMGDAPDFDRSQWLNEKFKLGLDFPNLPYLIDGSHKITQSNAILRYLGRKHNLCGETEEERIRVDILENQLMDNRMVLARLCYNPDFEKLKPGYLEQLPGMMRLYSEFLGKRPWFAGDKITFVDFIAYDVLERNQVFEATCLDAFPNLKDFIARFEGLKKISDYMKSSRFLPRPLFTKMAIWGSK

SEQ ID NO: 2357 - DNA, 1133 bp, Homo sapiens
  ref <308>: DATABASE ACCESSION NUMBER: Refseq / NM_000848
  ref <309>: DATABASE ENTRY DATE: 2002-11-05
cgcagcaaccagcaccatgcccatgacactggggtactggaacatccgcgggctggcccattccatccgcctgctcctggaatacacagactcaagctacgaggaaaagaagtacacgatgggggacgctcctgattatgacagaagccagtggctgaatgaaaaattcaagctgggcctggactttcccaatctgccctacttgattgatgggactcacaagatcacccagagcaatgccatcctgcggtacattgcccgcaagcacaacctgtgcggggaatcagaaaaggagcagattcgcgaagacattttggagaaccagtttatggacagccgtatgcagctggccaaactctgctatgacccagattttgagaaactgaaaccagaatacctgcaggcactccctgaaatgctgaagctctactcacagtttctggggaagcagccatggtttcttggggacaagatcacctttgtggatttcatcgcttatgatgtccttgagagaaaccaagtatttgagcccagctgcctggatgccttcccaaacctgaaggacttcatctcccgatttgagggcttggagaagatctctgcctacatgaagtccagccgcttcctcccaagacctgtgttcacaaagatggctgtctggggcaacaagtagggccttgaaggcaggaggtgggagtgaggagcccatactcagcctgctgcccaggctgtgcagcgcagctggactctgcatcccagcacctgcctcctcgttcctttctcctgtttattcccatctttactcccaagacttcattgtccctcttcactccccctaaacccctgtcccatgcaggccctttgaagcctcagctacccactatccttcgtgaacatcccctcccatcattacccttccctgcactaaagccagcctgaccttccttcctgttagtggttgtgtctgctttaaagggcctgcctggccctcgcctgtggagctcagccccgagctgtccccgtgttgcatgaaggagcagcattgactggtttacaggccctgctcctgcagcatggtccctgccttaggcctacctgatggaagtaaagcctcaaccacaaaaaaaaaaaaa

SEQ ID NO: 2358 - protein, 217 aa, Homo sapiens
  ref <308>: DATABASE ACCESSION NUMBER: SWISS-Prot / P28161
  ref <309>: DATABASE ENTRY DATE: 2002-06-15
PMTLGYWNIRGLAHSIRLLLEYTDSSYEEKKYTMGDAPDYDRSQWLNEKFKLGLDFPNLPYLIDGTHKITQSNAILRYIARKHNLCGESEKEQIREDILENQFMDSRMQLAKLCYDPDFEKLKPEYLQALPEMLKLYSQFLGKQPWFLGDKITFVDFIAYDVLERNQVFEPSCLDAFPNLKDFISRFEGLEKISAYMKSSRFLPRPVFTKMAVWGNK

SEQ ID NO: 2359 - DNA, 487 bp, Rattus norvegicus
  ref <308>: DATABASE ACCESSION NUMBER: EMBL / E01534
  ref <309>: DATABASE ENTRY DATE: 2000-09-02
tttttcccagcagccgccaagatggccgaagtggagcagaagaaaaagcgaaccttccgcaagttcacctaccgtggcgtggacctcgaccagctgctggacatgtcctatgagcagctgatgcagttgtacagcgcccggcagagacggcgcctgaaccgaggcctgcggaggaagcagcactcactgctcaagcgcttgaggaaggccaagaaggaggcgccacccatggagaagccggaggtcgtgaagacccaccttagggacatgatcattctgcccgagatggtcggcagcatggtgggtgtgtacaacggcaagaccttcaaccaggtggagatcaaacccgagatgatcggccactacctgggcgagttctccatcacctacaagcctgtgaagcacggccggcccggcattggtgccacccactcctcccgatttatccccctcaagtagtggggacaataaagactcgttttcagcc

SEQ ID NO: 2360 - protein, 145 aa, Rattus norvegicus [sequence omitted]

SEQ ID NO: 2361 - DNA, 515 bp, Homo sapiens
  ref <308>: DATABASE ACCESSION NUMBER: Refseq / NM_001018
  ref <309>: DATABASE ENTRY DATE: 2002-11-05
ctgcgcaggcgcggaccaaagcgatctcttctgaggatccggcaagatggcagaagtagagcagaagaagaagcggaccttccgcaagttcacctaccgcggcgtggacctcgaccagctgctggacatgtcctacgagcagctgatgcagctgtacagtgcgcgccagcggcggcggctgaaccggggcctgcggcggaagcagcactccctgctgaagcgcctgcgcaaggccaagaaggaggcgccgcccatggagaagccggaagtggtgaagacgcacctgcgggacatgatcatcctacccgagatggtgggcagcatggtgggcgtctacaacggcaagaccttcaaccaggtggagatcaagcccgagatgatcggccactacctgggcgagttctccatcacctacaagcccgtaaagcatggccggcccggcatcggggccacccactcctcccgcttcatccctctcaagtaatggctcagctaataaaggcgcacatgactcc

SEQ ID NO: 2362 - protein, 144 aa, Homo sapiens
  ref <308>: DATABASE ACCESSION NUMBER: SWISS-Prot / P11174
  ref <309>: DATABASE ENTRY DATE: 2002-06-15
AEVEQKKKRTFRKFTYRGVDLDQLLDMSYEQLMQLYSARQRRRLNRGLRRKQHSLLKRLRKAKKEAPPMEKPEVVKTHLRDMIILPEMVGSMVGVYNGKTFNQVEIKPEMIGHYLGEFSITYKPVKHGRPGIGATHSSRFIPLK

SEQ ID NO: 2363 - DNA, 852 bp, Rattus norvegicus
  ref <308>: DATABASE ACCESSION NUMBER: EMBL / E03358
  ref <309>: DATABASE ENTRY DATE: 2000-09-02
gtaaagatggcagaacgcggttacagcttctcgctgactacattcagcccatctggtaaacttgtgcagattgaatatgctttggccgctgtagctggaggggccccttcagtgggaattaaagctgcaaatggcgtggtattagccactgagaaaaagcagaaatccatcctgtatgatgagaggagtgtacacaaagtggagcccataaccaagcacatcggtttggtgtacagcggcatgggtccagattacagagtccttgtacacagagctcggaaacttgctcagcagtactaccttgtttaccaagaacccattcccacagcccaactggtacagcgagtagcgtctgtgatgcaagagtatacccagtcaggtggtgttcgtccatttggtgtttctttacttatttgtgggtggaatgagggacgaccatatttatttcagtcagatccatctggagcttactttgcctggaaggccacagcaatgggaaagaactacgtgaacgggaaaactttccttgagaaaagatataatgaagacttagaactggaagatgcgattcacacagccatcttaacccttaaggaaagctttgaagggcagatgacagaagataacatagaagttgggatctgcaatgaagctggctttaggaggctcaccccaactgaagtgagggattacttggctgctatagcgtaatgaacatgtgccggaacaatcaaggaacactcattctacttattcatttttaaagtatgttttgtttgtgcagacttatttctacatgctttaatggattcacatttttaaataataatcataataaactgttaaaaccag

SEQ ID NO: 2364 - protein, 234 aa, Rattus norvegicus
  ref <308>: DATABASE ACCESSION NUMBER: Refseq / NP_058975
  ref <309>: DATABASE ENTRY DATE: 2002-11-05
MAERGYSFSLTTFSPSGKLVQIEYALAAVAGGAPSVGIKAANGVVLATEKKQKSILYDERSVHKVEPITKHIGLVYSGMGPDYRVLVHRARKLAQQYYLVYQEPIPTAQLVQRVASVMQEYTQSGGVRPFGVSLLICGWNEGRPYLFQSDPSGAYFAWKATAMGKNYVNGKTFLEKRYNEDLELEDAIHTAILTLKESFEGQMTEDNIEVGICNEAGFRRLTPTEVRDYLAAIA

SEQ ID NO: 2365 - DNA, 866 bp, Homo sapiens
  ref <308>: DATABASE ACCESSION NUMBER: Refseq / NM_002787
  ref <309>: DATABASE ENTRY DATE: 2002-11-05
atggcggagcgcgggtacagcttttcgctgactacattcagcccgtctggtaaacttgtccagattgaatatgctttggctgctgtagctggaggagccccgtccgtgggaattaaagctgcaaatggtgtggtattagcaactgagaaaaaacagaaatccattctgtatgatgagcgaagtgtacacaaagtagaaccaattaccaagcatataggtttggtgtacagtggcatgggccccgattacagagtgcttgtgcacagagctcgaaaactagctcaacaatactatcttgtgtaccaagaacccattcctacagctcagctggtacagagagtagcttctgtgatgcaagaatatactcagtcaggtggtgttcgtccatttggagtttctttacttatttgtggttggaatgagggacgaccatatttatttcagtcagatccatctggagcttactttgcctggaaagctacagcaatgggaaagaactatgtgaatgggaagactttccttgagaaaagatataatgaagatctggaacttgaagatgccattcatacagccatcttaaccctaaaggaaagctttgaagggcaaatgacagaggataacatagaagttggaatctgcaatgaagctggatttaggaggcttactccaactgaagttaaggattacttggctgccatagcataacaatgaagtgactgaaaaatccagaatttcagataatctatctacttaaacatgtttaaagtatgttttgttttgcagactttttgcatacttatttctacatggtttaaatcgactgtttttaaaatgacacttataaatcctaataaactgttaaaccc

SEQ ID NO: 2366 - protein, 233 aa, Homo sapiens
  ref <308>: DATABASE ACCESSION NUMBER: SWISS-Prot / P25787
  ref <309>: DATABASE ENTRY DATE: 2002-06-15
AERGYSFSLTTFSPSGKLVQIEYALAAVAGGAPSVGIKAANGVVLATEKKQKSILYDERSVHKVEPITKHIGLVYSGMGPDYRVLVHRARKLAQQYYLVYQEPIPTAQLVQRVASVMQEYTQSGGVRPFGVSLLICGWNEGRPYLFQSDPSGAYFAWKATAMGKNYVNGKTFLEKRYNEDLELEDAIHTAILTLKESFEGQMTEDNIEVGICNEAGFRRLTPTEVKDYLAAIA

SEQ ID NO: 2367 - DNA, 852 bp, Rattus norvegicus; identical to SEQ ID NO: 2363
  ref <308>: DATABASE ACCESSION NUMBER: EMBL / E03358
  ref <309>: DATABASE ENTRY DATE: 2000-09-02

SEQ ID NO: 2368 - protein, 234 aa, Rattus norvegicus; identical to SEQ ID NO: 2364
  ref <308>: DATABASE ACCESSION NUMBER: Refseq / NP_058975
  ref <309>: DATABASE ENTRY DATE: 2002-11-05

SEQ ID NO: 2369 - DNA, 866 bp, Homo sapiens; identical to SEQ ID NO: 2365
  ref <308>: DATABASE ACCESSION NUMBER: Refseq / NM_002787
  ref <309>: DATABASE ENTRY DATE: 2002-11-05

SEQ ID NO: 2370 - protein, 233 aa, Homo sapiens; identical to SEQ ID NO: 2366
  ref <308>: DATABASE ACCESSION NUMBER: SWISS-Prot / P25787
  ref <309>: DATABASE ENTRY DATE: 2002-06-15

SEQ ID NO: 2371 - DNA, 3225 bp, Rattus norvegicus
  misc_feature (1)..(3225): n=a, c, g or t
  ref <308>: DATABASE ACCESSION NUMBER: EMBL / E03428
  ref <309>: DATABASE ENTRY DATE: 2000-09-02
atggccggacgcgcccgcagcggtctgctactgctgctgctggggctgctcgccctgcagagcagctgcctggccttcagaagcccactttctgtctttaagaggtttaaagaaactaccagatcattttccaatgaatgccttggtaccattggaccagtcacccctcttgatgcatcagattttgcgctggatattcgcatgcctggggttacacctaaagagtctgacacatacttctgcatgtccatgcgtctgcctgtggatgaggaagccttcgtgattgacttcaagcctcgtgccagcatggatactgtccaccatatgctgctgtttggatgcaatatgccctcgtccactggaagttactggttttgtgatgaaggaacctgtacagataaagccaatattctatatgcctgggcaaggaatgctccccccacccggctcccgaaaggtgttggattcagagttggaggagaaactggaagcaaatacttcgtccttcaagttcactatggcgatatcagtgcttttcgagataatcacaaagactgctctggcgtgtccgtacatctcacacgtgtgccccagcctttaattgcgggcatgtaccttatgatgtctgttgacactgtcataccaccaggagagaaagtagtgaatgctgacatttcgtgccaatacaaaatgtatccaatgcatgtgtttgcctacagagtccacactcaccatttaggtaaggtggtgagcggatacagagtaagaaacggacagtggacactgattggacgccagaacccccagctgccacaggctttctaccctgtggaacaccccgttgatgttacttttggtgatatactggcagccagatgtgtgttcactggtgaagggaggacagaggccacccacatcggcggcacttctagtgacgaaatgtgtaacctgtacatcatgtattacatggaagccaaatatgcactttccttcatgacctgtacaaagaacgtggctccagatatgttcagaactatcccagcagaggccaatatcccaattcctgtcaaaccggacatggttatgatgcacgggcatcacaaagaagcagaaaacaaagaaaagagtgctttaatgcagcagccaaaacagggagaggaagaagtattagagcaggatttccatgtggaagaagaactggactggcctggagtgtacttgttaccaggccaggtttctggggtggccctggattctaagaataacctngtgattttccacagaggtgaccatgtttgggatggaaactcttttgacagcaagtttgtttaccagcaaagaggtcttgggccaattgaagaagacaccatcctggtcattgacccaaataatgctgaaatcctccagtccagtggcaagaacctgttttatttaccacacggcttgagcatagatacagatggaaattattgggtcacagatgtggctctccaccaggtgttcaaattggacccgcatagcaaagaaggccctctcttaattctgggaaggagcatgcaacctgggagtgaccaaaatcatttctgccagcccaccgatgtggctgtggagcccagtactggagctgtcttcgtgtcagacggttactgtaacagtcggattgtgcagttttcaccaagcggaaagttcgtcacccagtggggagaagagtcctctggaagcagtcctaggccaggccagttcagtgttcctcacagtttggcccttgtgcctcatttggaccagttgtgtgtggcagacagggaaaatggccgaatccaatgcttcaaaactgacaccaaagaatttgtgagagagattaagcacgcatcatttggaaggaatgtctttgccatttcatatataccaggtttcctctttgccgtaaacgggaagccttactttggagaccaagagcccgtgcaaggatttgtgatgaacttttccagtggggaaattatagacgtcttcaagccagtacgcaagcacttcgacatgcctcatgatattgtggcttctgaagatgggactgtgtacattggagacgcacacacaaacaccgtgtggaagttcaccctgactgaaaaaatggagcatcggtcagttaaaaaggctggcattgaagtccaggaaatcaaagaagccgaggcagttgttgaacccaaagtggagaacaaacccacctcctcagaattgcagaagatgcaagagaaacagaaactgagcacagagcccggctcgggagtgtccgtggttctcattacaacccttctggttattcctgtgctggtcctgctggccattgtcatgtttattcggtggaaaaaatcaagggcctttggaggaaagggaagcggcggcttaaatctgggaaatttctttgcaagtcgaaaaggctacagcagaaaagggtttgaccgagtgagcacagaggggagtgaccaagagaaagatgaggacgacggaagtgagtctgaagaggagtactcggccccgctgcccaagcctgcaccttcctcctgagctccagccttcgcccgggtagctggactgaggtttaccaggatgcccagactccttcccctttagcgcgtgtaaagttctgtgcatttgattgtaaactgtactcgtcagtgtgggactgtacacaccttatttacttcatttggctccgttggcttctgttttctaggtgaggagttccccaccagttcactccagtgccattgtctttatatgaacttagcgtagagaagccgccctcctcttccaaggtagcgctccaacccccgagggaagtttagctcattcacatttggagacgttttagttggtggatgtaaatagccctattctctgcttgaacacagtattctcccagtccacacccatcgccagtgtctttctttggtgcctttcctgttcagcattctcagcctgtggcagtgaagagaaccaacctgccacacgacgaaaagctgctaaatctccttctatttttttaaaatcactaacattatattgcaatgagagaaattttaaaaagtctctatttaaattctttttttaaatttctcctcagttggtgtgtttccgggatgtcttatttttagatggttacactgttagaacactatttttcagaatctgaatgtaatttgtgtaataaagtgttttcagagcatt

SEQ ID NO: 2372 - protein, 976 aa, Rattus norvegicus
  ref <308>: DATABASE ACCESSION NUMBER: SWISS-Prot / CAA42210
  ref <309>: DATABASE ENTRY DATE: 2002-06-15
MAGRARSGLLLLLLGLLALQSSCLAFRSPLSVFKRFKETTRSFSNECLGTIGPVTPLDASDFALDIRMPGVTPKESDTYFCMSMRLPVDEEAFVIDFKPRASMDTVHHMLLFGCNMPSSTGSYWFCDEGTCTDKANILYAWARNAPPTRLPKGVGFRVGGETGSKYFVLQVHYGDISAFRDNHKDCSGVSVHLTRVPQPLIAGMYLMMSVDTVIPPGEKVVNADISCQYKMYPMHVFAYRVHTHHLGKVVSGYRVRNGQWTLIGRQNPQLPQAFYPVEHPVDVTFGDILAARCVFTGEGRTEATHIGGTSSDEMCNLYIMYYMEAKYALSFMTCTKNVAPDMFRTIPAEANIPIPVKPDMVMMHGHHKEAENKEKSALMQQPKQGEEEVLEQGDFYSLLSKLLGEREDVHVHKYNPTEKTESGSDLVAEIANVVQKKDLGRSDAREGAEHEEWGNAILVRDRIHRFHQLESTLRPAESRAFSFQQPGEGPWEPEPSGDFHVEEELDWPGVYLLPGQVSGVALDSKNNLVIFHRGDHVWDGNSFDSKFVYQQRGLGPIEEDTILVIDPNNAEILQSSGKNLFYLPHGLSIDTDGNYWVTDVALHQVFKLDPHSKEGPLLILGRSMQPGSDQNHFCQPTDVAVEPSTGAVFVSDGYCNSRIVQFSPSGKFVTQWGEESSGSSPRPGQFSVPHSLALVPHLDQLCVADRENGRIQCFKTDTKEFVREIKHASFGRNVFAISYIPGFLFAVNGKPYFGDQEPVQGFVMNFSSGEIIDVFKPVRKHFDMPHDIVASEDGTVYIGDAHTNTVWKFTLTEKMEHRSVKKAGIEVQEIKEAEAVVEPKVENKPTSSELQKMQEKQKLSTEPGSGVSVVLITTLLVIPVLVLLAIVMFIRWKKSRAFGDHDRKLESSSGRVLGRFRGKGSGGLNLGNFFASRKGYSRKGFDRVSTEGSDQEKDEDDGTESEEEYSAPLPKPAPSS

SEQ ID NO: 2373 - DNA, 3744 bp, Homo sapiens
gaccgagacgcctcgccgcggccagctcgctgctctcgctggcggatggtgtgtggccgccgcaggacgcccgccgtgcccgggccatgaagtagcggctgctggcggcgccgctgcccaaccgccagccccagccccgcgctgcgctgcccggtcctctcccggcggggtcgtatcggcgtggacatggctggccgcgtccctagcctgctagttctccttgtttttccaagcagctgtttggctttccgaagcccactttctgtctttaagaggtttaaagaaactaccagaccattttccaatgaatgtcttggtaccaccagacccgtagttcctattgattcatcagattttgcattggatattcgcatgcctggggttacacctaaacagtccgatacatacttctgcatgtctatgcgaataccagtggatgaggaagccttcgtgattgacttcaagcctcgagccagcatggatactgtccatcacatgttactttttggatgcaatatgccttcatccactggaagttactggttttgtgatgaaggaacctgtacagataaagccaatattctgtatgcctgggcgagaaatgctccccctacccggctccccaaaggtgttggattcagagttggaggagagactggaagtaaatactttgtactacaggtacactatggggatattagtgcttttagagataataacaaggactgttctggtgtgtccttacacctcacacgtctgccacagcctttaattgctggcatgtaccttatgatgtctgttgacactgttatcccagcaggagaaaaagtggtgaattctgacatttcatgccattataaaaattatccaatgcatgtctttgcctatagagttcacactcaccatttaggtaaggtagtaagtggatacagagtaagaaatggacagtggacactgattggacggcagagccctcagctgccacaggctttctaccctgtggggcatccagttgatgtaagttttggtgacctactggctgcaagatgtgtattcactggtgaaggaaggacagaagccacacacattggtggcacgtctagtgatgaaatgtgcaacttatacattatgtattacatggaagccaagcatgcagtttctttcatgacctgtacccagaatgtagctccagatatgttcagaaccataccaccagaggccaacattccaattcccgtgaagtctgatatggttatgatgcatgaacatcataaagaaacagaatataaagataagattcctttactacagcagccaaaacgagaagaagaagaagtgttagaccagggtgatttctattcactactttccaagctgctaggagaaagggaagatgttgttcatgtgcacaaatataatcctacagaaaaggcagaatcagagtcagacctggtagctgagattgcaaatgtagtccaaaaaaaggatcttggtcgatctgatgccagagagggtgcagaacatgagaggggtaatgctattcttgtcagagacagaattcacaaattccacagactagtatctaccttgaggccaccagagagcagagttttctcattacagcagcccccacctggtgaaggcacctgggaaccagaacacacaggagatttccacatggaagaggcactggattggcctggagtatacttgttaccaggccaggtttctggggtggctctagaccctaagaataacctggtgattttccacagaggtgaccatgtctgggatggaaactcgtttgacagcaagtttgtttaccagcaaataggactcggaccaattgaagaagacactattcttgtcatagatccaaataatgctgcagtactccagtccagtggaaaaaatctgttttacttgccacatggcttgagtatagataaagatgggaattattgggtcacagacgtggctctccatcaggtgttcaaactggatccaaacaataaagaaggccctgtattaatcctgggaaggagcatgcaaccaggcagtgaccagaatcacttctgtcaacccactgatgtggctgtggatccaggcactggagccatttatgtatcagatggttactgcaacagcaggattgtgcagttttcaccaagtggaaagttcatcacacagtggggagaagagtcttcagggagcagtcctctgccaggccagttcactgttcctcacagcttggctcttgtgcctcttttgggccaattatgtgtggcagaccgggaaaatggtcggatccagtgttttaaaactgacaccaaagaatttgtgagagagattaagcattcatcatttggaagaaatgtatttgcaatttcatatataccaggcttgctctttgcagtgaatgggaagcctcattttggggaccaagaacctgtacaaggatttgtgatgaacttttccaatggggaaattatagacatcttcaagccagtgcgcaagcactttgatatgcctcatgatattgttgcatctgaagatgggactgtgtacattggagatgctcataccaacaccgtgtggaagttcaccttgactgagaaattggaacatcgatcagttaaaaaggctggcattgaggtccaggaaatcaaagaagccgaggcagttgttgaaaccaaaatggagaacaaacccacctcctcagaattgcagaagatgcaagagaaacagaaactgatcaaagagccaggctcgggagtgcctgttgttctcattacaacccttctggttattccggtggttgtcctgctggccattgccatatttattcggtggaaaaaatcaagggcctttggagcagattctgaacacaaactcgagacgagttcaggaagagtactgggaagatttagaggaaagggaagtggaggcttaaaccttggtaatttctttgcaagccgtaagggctacagtcgaaaagggtttgaccggcttagcactgagggcagtgaccaagagaaagaggatgatggaagtgaatcagaagaggagtattcagcacctctgcctgcgctcgcaccttcctcctcctgaaaaccaagctttgatttagattgagtaagatttacccagaatgtcagattcctttccctttagcacgtttaaagttctgtgtatttaattgtaaactgtactagtctgtgtgggactgtacacactttatttacttcgttttggttaagttggcttctgtttctagttgaggagtttcctaaaagttcataacagtgccattgtctttatatgaacatagactagagaaaccgtcctctttttccatcataattctaatctaacaatggaagatttgcccatttacacttttgagactttttggtggatgtaaataaccccattctttgcttgaacacagtattttcccaatagcactttcattgccagtgtctttctttggtgcctttcctgttcagcattcttagcctgtggcagtaaagagaaactttgtgctacatgacgacaaagctgctaaatctcctatttttttaaaatcactaacattatattgcaatgaaggaaataaaaaagtctctatttaaattcttttttaaattttcttcagttggtgtgtttttgggatgtcttatttttagatggttacactgttagaacactattttcagaatctgaatgtaatttgtgtaataa

SEQ ID NO: 2374 - protein, 974 aa, Homo sapiens
MAGRVPSLLVLLVFPSSCLAFRSPLSVFKRFKETTRPFSNECLGTTRPVVPIDSSDFALDIRMPGVTPKQSDTYFCMSMRIPVDEEAFVIDFKPRASMDTVHHMLLFGCNMPSSTGSYWFCDEGTCTDKANILYAWARNAPPTRLPKGVGFRVGGETGSKYFVLQVHYGDISAFRDNNKDCSGVSLHLTRLPQPLIAGMYLMMSVDTVIPAGEKVVNSDISCHYKNYPMHVFAYRVHTHHLGKVVSGYRVRNGQWTLIGRQSPQLPQAFYPVGHPVDVSFGDLLAARCVFTGEGRTEATHIGGTSSDEMCNLYIMYYMEAKHAVSFMTCTQNVAPDMFRTIPPEANIPIPVKSDMVMMHEHHKETEYKDKIPLLQQPKREEEEVLDQGDFYSLLSKLLGEREDVVHVHKYNPTEKAESESDLVAEIANVVQKKDLGRSDAREGAEHERGNAILVRDRIHKFHRLVSTLRPPESRVFSLQQPPPGEGTWEPEHTGDFHMEEALDWPGVYLLPGQVSGVALDPKNNLVIFHRGDHVWDGNSFDSKFVYQQIGLGPIEEDTILVIDPNNAAVLQSSGKNLFYLPHGLSIDKDGNYWVTDVALHQVFKLDPNNKEGPVLILGRSMQPGSDQNHFCQPTDVAVDPGTGAIYVSDGYCNSRIVQFSPSGKFITQWGEESSGSSPLPGQFTVPHSLALVPLLGQLCVADRENGRIQCFKTDTKEFVREIKHSSFGRNVFAISYIPGLLFAVNGKPHFGDQEPVQGFVMNFSNGEIIDIFKPVRKHFDMPHDIVASEDGTVYIGDAHTNTVWKFTLTEKLEHRSVKKAGIEVQEIKEAEAVVETKMENKPTSSELQKMQEKQKLIKEPGSGVPVVLITTLLVIPVVVLLAIAIFIRWKKSRAFGADSEHKLETSSGRVLGRFRGKGSGGLNLGNFFASRKGYSRKGFDRLSTEGSDQEKEDDGSESEEEYSAPLPALAPSSS

SEQ ID NO: 2375 - DNA, 1218 bp, Rattus norvegicus
  ref <308>: DATABASE ACCESSION NUMBER: EMBL / E06822
  ref <309>: DATABASE ENTRY DATE: 2000-09-02
gactcttctagggaagagcagcatctgagaatgaattccaaaattcagaagatggagttaaacgatggtcactccatccctgtactgggctttggcacctatgcaaccgaagagaatctcagaaaaaagtctatggagtccacgaaaatagctatagatgttgggttccgccatattgattgttctcacttgtaccagaatgaagaagagataggtcaggccattgtaagcaagattgaagatggcactgtgaaaagggaagatatattctatacttcaaagctttggtcaacttcccatcgtccagagttggtcagacccagcttggaaaattcactgaggaaacttaatttggactatgtagacctctatctcattcatttcccggtatctctgaagccaggggatgagcttttacctcaagatgagcatggaaacttaatacttgacacagtggatctctgcgacacctgggaggccatggagaagtgtaaggatgcaggattggccaagtccatcggggtgtccaactttaaccgcaggcagctggagaagatcctgaataagccggggctcaagcacaggcctgtgtgcaaccaggtagaatgccatctttatctcaaccagagcaagctgctcgcttactgcaagatgaatgacatcgttctggttgcctatggtgccctgggaactcagagatacaaatactgtattaatgaagataccccagttctcttggatgatcccattctttgtaccatggcaaagaagtacaagcggactccagccctgattgcccttcgctaccagctggagcgtgggattgtgaccctagtcaagagtttcaatgaggagagaatcagagagaacctgcaggtctttgatttccagttggcttcagatgacatggaaattttagataacctggacagaaatcttcggtactttcctgctaatatgtttaaggctcaccctaactttccattctctgatgaatactaagatggcagccctagccatgagttctgctcgaagctcctttgtgtgatgctggactctcagaggccaataatacaacacactgactccaatccatactgcttagcaactcaccccccagtttgagctgtgtctgtacatcggggagcaaattcactaaattttcctgcttttctgtaaataaataaaaatattttgcttcagcctcaaaaaaaaaaa

SEQ ID NO: 2376 - protein, 323 aa, Rattus norvegicus
  ref <308>: DATABASE ACCESSION NUMBER: SWISS-Prot / BAA03317
  ref <309>: DATABASE ENTRY DATE: 2002-06-15
MNSKIQKMELNDGHSIPVLGFGTYATEENLRKKSMESTKIAIDVGFRHIDCSHLYQNEEEIGQAIVSKIEDGTVKREDIFYTSKLWSTSHRPELVRPSLENSLRKLNLDYVDLYLIHFPVSLKPGDELLPQDEHGNLILDTVDLCDTWEAMEKCKDAGLAKSIGVSNFNRRQLEKILNKPGLKHRPVCNQVECHLYLNQSKLLAYCKMNDIVLVAYGALGTQRYKYCINEDTPVLLDDPILCTMAKKYKRTPALIALRYQLERGIVTLVKSFNEERIRENLQVFDFQLASDDMEILDNLDRNLRYFPANMFKAHPNFPFSDEY

SEQ ID NO: 2377 - DNA, 1204 bp, Homo sapiens
  ref <308>: DATABASE ACCESSION NUMBER: Refseq / NM_003739
  ref <309>: DATABASE ENTRY DATE: 2002-11-03
ctctgaggagaagcagcagcaaacatttgctagtcagacaagtgacagggaatggattccaaacagcagtgtgtaaagctaaatgatggccacttcatgcctgtattgggatttggcacctatgcacctccagaggttccgagaagtaaagctttggaggtcacaaaattagcaatagaagctgggttccgccatatagattctgctcatttatacaataatgaggagcaggttggactggccatccgaagcaagattgcagatggcagtgtgaagagagaagacatattctacacttcaaagctttggtccacttttcatcgaccagagttggtccgaccagccttggaaaactcactgaaaaaagctcaattggactatgttgacctctatcttattcattctccaatgtctctaaagccaggtgaggaactttcaccaacagatgaaaatggaaaagtaatatttgacatagtggatctctgtaccacctgggaggccatggagaagtgtaaggatgcaggattggccaagtccattggggtgtcaaacttcaaccgcaggcagctggagatgatcctcaacaagccaggactcaagtacaagcctgtctgcaaccaggtagaatgtcatccgtatttcaaccggagtaaattgctagatttctgcaagtcgaaagatattgttctggttgcctatagtgctctgggatctcaacgagacaaacgatgggtggacccgaactccccggtgctcttggaggacccagtcctttgtgccttggcaaaaaagcacaagcgaaccccagccctgattgccctgcgctaccagctgcagcgtggggttgtggtcctggccaagagctacaatgagcagcgcatcagacagaacgtgcaggtttttgagttccagttgactgcagaggacatgaaagccatagatggcctagacagaaatctccactattttaacagtgatagttttgctagccaccctaattatccatattcagatgaatattaacatggagagctttgcctgatgtctaccagaagccctgtgtgtggatggtgacgcagaggacgtctctatgccggtgactggacatatcacctctacttaaatccgtcctgtttagcgacttcagtcaactacagctgagtccataggccagaaagacaataaatttttatcattttgaaat

SEQ ID NO: 2378 - protein, 323 aa, Homo sapiens
  ref <308>: DATABASE ACCESSION NUMBER: SWISS-Prot / P42330
  ref <309>: DATABASE ENTRY DATE: 2002-06-15
MDSKQQCVKLNDGHFMPVLGFGTYAPPEVPRSKALEVTKLAIEAGFRHIDSAHLYNNEEQVGLAIRSKIADGSVKREDIFYTSKLWSTFHRPELVRPALENSLKKAQLDYVDLYLIHSPMSLKPGEELSPTDENGKVIFDIVDLCTTWEAMEKCKDAGLAKSIGVSNFNRRQLEMILNKPGLKYKPVCNQVECHPYFNRSKLLDFCKSKDIVLVAYSALGSQRDKRWVDPNSPVLLEDPVLCALAKKHKRTPALIALRYQLQRGVVVLAKSYNEQRIRQNVQVFEFQLTAEDMKAIDGLDRNLHYFNSDSFASHPNYPYSDEY

SEQ ID NO: 2379 - DNA, 1733 bp, Rattus norvegicus
  ref <308>: DATABASE ACCESSION NUMBER: EMBL / E12625
  ref <309>: DATABASE ENTRY DATE: 2000-09-02
ggccgctgcacctgcccggtcttgcgccgagaccgctgtcaatcgcggggcaccaggaataaaaggccccttgcagagatttgaaaatggccatgaacaaaagtgttggcctcttcagctccgcatccctggctgtggactacgtagattccctgctgcctgagaatcctctgcaggaaccctttaagaatgcttgggtctacatgttggacaactatacaaagttccagatcgcaacctggggctccctgatcgttcatgagacgatctatttcctgttctctttacctggctttctattccagtttatacctttcatgagaaagtacaagattcaaaaggataaaccagaaacctttgaaggccagtggaagtgtttgaaaggaattctgtttaatcatttttttatccagttgcctctgatttgtggaacatactattttacagagtttttcaatattccttatgattgggaaagaatgccaagatggtatttcactttggcaaggtgtttgggctgtgcagtcatcgaggatacctggcactatttcctgcacagactccttcaccacaagaggatttataaatacattcataaagtccatcacgagttccaggctccatttggaatcgaagcagaatatgcacatcccttggaaaccctaattcttgggactggatttttcattggaattgtgcttttgtgtgatcatgtaattcttctgtgggcatgggtgaccatgcgtttgctagaaaccatcgatgtgcacagtggttatgatatccctctcaacccgttgaactacatccctttttataccggggctcggcatcacgatttccaccacatgaacttcattgggaattacgcctccaccttcacgtggtgggacagaatctttgggacggatgtccagtaccatgcctacactgaaaagatgaagaagcttgggaaaaagtctgagtgagcacctgctctccgccctcctgactgcagctggcaactaacattgcttctggggagcagaactaagcacgtgactcggctgctggtgataggaacattaacaacctttaagtactctgcgggatgagaactcttctgctcgacacccaagatctgtaaatgtgggaacaaagaaatagatacataagtacagttttcaggaggaggttttaaaggccatattgccaacctcaccgaaaggtttcaggaacccgaggaagtgttaatgtacaactcaccacttcacgccacccgaggctgaagttgacgttgccttttaagcctttttacatacactggccatttcagaaaattctcaacaataatgtctgccttcgagtttaagtcatggtgttttttagaattgacttgaaatgaaaatatcacaaagtgaatatatcagctggtgatcgagtgactgaaacccccctggtctgcggttgaccagttcaggactattctttctgtgaaggattgtttgattgtagtatctttatcagcatcttgtaaattggctcatttcctacgtgatgtacatagaatactataacttaacgactttcaagttacttggggcatttttaaattgaggagccccacttctgatgtccacccccttgtctttgtgtgtcaggtggtctcggagctttgtgaattctctatctgcacctgtcagagctggtgaaataaatgtgatttttgtccgaaaaaaaaaaaaaaaaaaaaa

SEQ ID NO: 2380 - protein, 293 aa, Rattus norvegicus
  ref <308>: DATABASE ACCESSION NUMBER: SWISS-Prot / BAA23329
  ref <309>: DATABASE ENTRY DATE: 2002-10-01
MAMNKSVGLFSSASLAVDYVDSLLPENPLQEPFKNAWVYMLDNYTKFQIATWGSLIVHETIYFLFSLPGFLFQFIPFMRKYKIQKDKPETFEGQWKCLKGILFNHFFIQLPLICGTYYFTEFFNIPYDWERMPRWYFTLARCLGCAVIEDTWHYFLHRLLHHKRIYKYIHKVHHEFQAPFGIEAEYAHPLETLILGTGFFIGIVLLCDHVILLWAWVTMRLLETIDVHSGYDIPLNPLNYIPFYTGARHHDFHHMNFIGNYASTFTWWDRIFGTDVQYHAYTEKMKKLGKKSE

SEQ ID NO: 2381 - DNA, 1741 bp, Homo sapiens
  ref <308>: DATABASE ACCESSION NUMBER: Refseq / NM_006745
  ref <309>: DATABASE ENTRY DATE: 2000-11-01
ttggaacacctggcgagtcctcggtgtcggtggccggcagtcatctcgcggccgttcagaattataaggctgtctgcagagatttgaaaaatggcaacaaatgaaagtgtcagcatctttagttcagcatccttggctgtggaatatgtagattcacttttacctgagaatcctctgcaagaaccatttaaaaatgcttggaactatatgttgaataattatacaaagttccagattgcaacatggggatcccttatagttcatgaagccctttatttcttattctgtttacctggatttttatttcaatttataccttatatgaaaaaatacaaaattcaaaaggataagccagagacatgggaaaaccaatggaagtgtttcaaagttcttctctttaatcacttctgtatccagctgcctttgatttgtggaacctattattttacagagtatttcaatattccttatgattgggaaagaatgccaagatggtattttcttttggcaagatgctttggttgtgcagtcattgaagatacttggcactattttctgcatagactcttacaccacaaaagaatatacaagtatattcataaagttcatcatgagtttcaggctccatttggaatggaagctgaatatgcacatcctttggagactctaattcttggaactggatttttcattggaatcgtgcttttgtgtgatcatgtaattcttctttgggcatgggtgaccattcgtttattagaaactattgatgtccatagtggttatgatattcctctcaaccctttaaatctgatccctttctatgctggttctcggcatcatgatttccaccacatgaacttcattggaaactatgcttcaacatttacatggtgggatcgaatttttggaacagactctcagtataatgcctataatgaaaagaggaagaagtttgagaaaaagactgaataaatatctcacgtaaaccttcctgaaagataaacgttttcctgaattcagaaactagtagctaacattgcttctggagagcagaaataagcatgtcttctggctactaagtgataaaaagaacattaacaacctttaattaccttcctagtgggaactttttctactttacctacaagttctatatatgtagaaatgaataaatatatatttaagtacagttttcatgaggaagttttaaaagaccatgttcctaagcttccaagaaggttttggatactagaagtattaatctatggcttttctcccagtaaaaccataggcctgaagttcacattgggtctttaaatcttttagatatatactggtcatttcagaaaattcttcatagtggtattggccttatatttaactttttttttattttttttttgagacaaagccacactctgtctccttgtctggagtgtggtggcacagtctcagctcactgcaacctctgcctcccagttcaagcaattcttctgcctcagcctcccaagtagctgggattacaggcacccgccaccacgcccagctaatttttgtatttttgtagagatggggtttctcgatgttggccaggctggtctcaaacttctgacctcaagtgatctgcccaccttggcctcccaaagtgctgggattacaggtgtaagccactgcgcccggcctttttaactttaaacatgttttagaattcacctaaagatcaaaatatcatggattgaac

SEQ ID NO: 2382 - protein, 293 aa, Homo sapiens
  ref <308>: DATABASE ACCESSION NUMBER: SWISS-Prot / Q15800
  ref <309>: DATABASE ENTRY DATE: 2002-06-15
MATNESVSIFSSASLAVEYVDSLLPENPLQEPFKNAWNYMLNNYTKFQIATWGSLIVHEALYFLFCLPGFLFQFIPYMKKYKIQKDKPETWENQWKCFKVLLFNHFCIQLPLICGTYYFTEYFNIPYDWERMPRWYFLLARCFGCAVIEDTWHYFLHRLLHHKRIYKYIHKVHHEFQAPFGMEAEYAHPLETLILGTGFFIGIVLLCDHVILLWAWVTIRLLETIDVHSGYDIPLNPLNLIPFYAGSRHHDFHHMNFIGNYASTFTWWDRIFGTDSQYNAYNEKRKKFEKKTE

SEQ ID NO: 2383 - DNA, 4396 bp, Rattus norvegicus
  ref <308>: DATABASE ACCESSION NUMBER: EMBL / E12829
  ref <309>: DATABASE ENTRY DATE: 2000-09-02
tctggcctcttgccctaagaagcgagtgcggagggagtgggagcgagactgcccgaacgcaagtgtctggcttcccggcgaggcccaggcgtccgtcccgccgcccatgaactcgttgccccgcgagcagcgccgtcgttaggccgtccccgtcactctcgctcgcccccatccccgggcagccattcccccctacccacgtctggccggggactggacgtcgtgtcgaagcgccttccccagtccgcgtcgcgctgcgaccctggaagcgggcgccgccgccaacgagaggaggagccccggccgcggggcccagcagccactgagccagcaggcgggatcgaggccggcaacatggcgagcgcttcgtaccacatctccaacttgctggaaaaaatgacatccagcgacaaggacttcaggtttatggctacaaatgatctgatgacagaactgcagaaagactccatcaagctggatgatgacagcgaaaggaaagtcgtaaagatgattctgaagttgctggaggataaaaatggcgaagtgcagaacttagctgtgaaatgtcttggtcctttagtgagtaaagtgaaagagtaccaagttgagacgattgtagacaccctctgtacaaacatgctttctgacaaggagcagcttcgagatatttccagtattggccttaaaacagtaattggagaactccctccagcttccagtggctctgcattagctgctaatgtatgtaaaaagattactggacgccttaccagtgcaatagcaaagcaggaagatgtttctgttcagctagaagctttagatattatggctgatatgttgagcaggcaaggaggactgcttgttaatttccatccttcaattctgacctgtctacttccccagctgactagccctagacttgcagtcaggaaaagaacaattattgctcttggccacctagttatgagctgcggaaacatagtttttgtagaccttattgaacatctgttgtcagagttgtccaaaaatgactccatgtcaacaacaaggacctacatacagtgtattgctgctattagtaggcaagctggccatagaataggtgaataccttgaaaagataattcctttggtggtaaaattttgtaatgtagatgatgatgaattaagagaatactgcattcaagcttttgaatcatttgtgagaagatgccctaaggaagtttatcctcatgtttctaccattataaacatttgtctaaaataccttacctatgatccaaattacaactatgatgatgaagatgaagatgagaatgctatggatgctgatggcggagatgacgatgaccaagggagtgacgatgaatacagtgatgacgatgacatgagttggaaagtgaggcgtgcggctgccaagtgcctggatgccgtagttagcacacggcatgagatgctcccggaattctacaagaccgtctctcctgcactgatatccagatttaaagagcgcgaagagaatgtaaaggcagatgtttttcatgcatacctttctcttttgaagcaaactcgtccagtacaaagttggctgtgcgaccctgatgcaatggagcaaggagaaacacccttaacaatgcttcagagtcaggttcccaacattgttaaagccctacataaacagatgaaagaaaaaagtgtaaagacccgacagtgttgttttaacatgttaactgaactggtaaatgtgttgcctggggcactaacccaacacattcctgtacttgtaccaggaatcattttctcactcaatgataagtccagctcatcgaatctgaagattgatgcattgtcctgtctgtatgtgatcctctgtaaccactctccgcaagttttccacccgcatgttcaggctttggtccctccagtggtggcttgtgttggtgacccattttacaagatcacatcagaagcccttcttgtcactcagcagcttgtcaaagtaatccgtcctctggaccaaccctcctccttcgatgcaacgccttacatcaaagatctcttcacttgtacaattaagcgcttaaaagcagctgacattgatcaggaagtcaaggagagggctatttcctgtatgggacagattatttgcaatcttggagacaatttgggccctgacttatcaaatacacttcagattttcttggagagactcaagaatgaaatcacccggctaacgacagtgaaagcactgaccctgattgctgggtcacctttgaagatagatctgaggcctgtgctgggagagggagtccctatccttgcttcatttctcaggaaaaatcagagagctttgaaactggggaccctctctgccctagatattctcattaaaaactatagtgacagtttgacggccgccatgattgatgcagttctggatgagctccctcctcttatcagcgaaagtgatatgcacgtgtcccagatggctatcagcttccttactaccctggcaaaagtatatccctcctccctttcaaagataagcggatctattctcaatgaactgattggacttgtaaggtcacctctgctgcagggaggagctcttagtgccatgctagacttcttccaagctttggttgtcactggaacaaacaatctaggatacatggatttgctgcgcatgctaacgggtccagtttactctcagagcacagctcttactcataagcagtcttactattccattgccaaatgtgtagctgcccttactcgagcatgccctaaagagggaccggctgtagtaggtcagtttattcaagatgtcaagaactccaggtctacagattccattcgtctcttagcgctcctttctctaggagaagttggacaccatattgacttaagtgggcagttggagctaaaatctgtaatattagaggctttctcctctcctagtgaagaagttaaatcagctgcatcctatgcgttaggcagcatcagtgtaggcaacctccctgagtatctgccatttgtactacaagaaataaccagtcagcccaaaaggcagtacctgctgctgcattccctgaaggaaatcattagctctgcgtcagtggtcggccttaagccgtatgtcgagaacatctgggccttgctgctaaagcactgtgagtgcgcggaggagggcaccagaaacgtcgtcgccgagtgtctagggaagctcactcttattgatcctgaaactctcctcccgaggcttaaagggtatttgatatcagggtcatcctatgccagaagctcagtggttacagctgtgaagttcactatttctgaccaccctcagcccattgatccactgctcaagaactgcataggtgattttctaaaaacgttggaagacccagatttgaatgtaagaagagtggccttggtcacattcaattctgcagcccataacaagccgtcactgatacgggaccttctggattctgttcttccacatctttacaatgagacaaaagttaggaaggaacttataagagaggtagagatgggcccgtttaagcacacggttgatgacggcctggacattagaaaggcagcttttgagtgtatgtacacacttctagacagctgtcttgacagactggatatctttgaatttctaaatcatgtggaagatggtttgaaggaccattatgatattaagatgctaacatttttaatgttggtgagactatctaccctttgtccaagtgcagtactacagaggttggaccggcttgttgagccactacgagctacgtgtacaactaaggtgaaggcgaactctgtaaagcaggagtttgaaaagcaggacgagttaaagcgctcggccatgagggcagtagctgcactgctcaccattccagaggcagagaagagccctctcatgagtgagttccagtcacagatcagctccaacccggagctggcagccatctttgaaagtatccagaaagattcttcgtccactaacttggaatcaatggacactagttagacgtgtgttccacatgaggaccattacatttgaccgcacagtgcactgaaccgacaagttgaccatagacacgggagagaagtgtctagagcttcaggatgttccacttttattttcattcatgggaagtttgttcagctttcttccattgttgtttttgtagcttttacttcagaaatctgtatttccataatccagaggttgtaagaccactgatggttttagtggttagggcaacgtttgaaatgggaactaaagtttggatttatggaatgtggaaatagggtccagtatctgtttgccctgtaatgtgtaggattaaaatgttaaaactttaaaaaaaaaaaaa

SEQ ID NO: 2384 - protein, 1230 aa, Rattus norvegicus
  ref <308>: DATABASE ACCESSION NUMBER: SWISS-Prot / BAA13432
  ref <309>: DATABASE ENTRY DATE: 2002-10-01
MASASYHISNLLEKMTSSDKDFRFMATNDLMTELQKDSIKLDDDSERKVVKMILKLLEDKNGEVQNLAVKCLGPLVSKVKEYQVETIVDTLCTNMLSDKEQLRDISSIGLKTVIGELPPASSGSALAANVCKKITGRLTSAIAKQEDVSVQLEALDIMADMLSRQGGLLVNFHPSILTCLLPQLTSPRLAVRKRTIIALGHLVMSCGNIVFVDLIEHLLSELSKNDSMSTTRTYIQCIAAISRQAGHRIGEYLEKIIPLVVKFCNVDDDELREYCIQAFESFVRRCPKEVYPHVSTIINICLKYLTYDPNYNYDDEDEDENAMDADGGDDDDQGSDDEYSDDDDMSWKVRRAAAKCLDAVVSTRHEMLPEFYKTVSPALISRFKEREENVKADVFHAYLSLLKQTRPVQSWLCDPDAMEQGETPLTMLQSQVPNIVKALHKQMKEKSVKTRQCCFNMLTELVNVLPGALTQHIPVLVPGIIFSLNDKSSSSNLKIDALSCLYVILCNHSPQVFHPHVQALVPPVVACVGDPFYKITSEALLVTQQLVKVIRPLDQPSSFDATPYIKDLFTCTIKRLKAADIDQEVKERAISCMGQIICNLGDNLGPDLSNTLQIFLERLKNEITRLTTVKALTLIAGSPLKIDLRPVLGEGVPILASFLRKNQRALKLGTLSALDILIKNYSDSLTAAMIDAVLDELPPLISESDMHVSQMAISFLTTLAKVYPSSLSKISGSILNELIGLVRSPLLQGGALSAMLDFFQALVVTGTNNLGYMDLLRMLTGPVYSQSTALTHKQSYYSIAKCVAALTRACPKEGPAVVGQFIQDVKNSRSTDSIRLLALLSLGEVGHHIDLSGQLELKSVILEAFSSPSEEVKSAASYALGSISVGNLPEYLPFVLQEITSQPKRQYLLLHSLKEIISSASVVGLKPYVENIWALLLKHCECAEEGTRNVVAECLGKLTLIDPETLLPRLKGYLISGSSYARSSVVTAVKFTISDHPQPIDPLLKNCIGDFLKTLEDPDLNVRRVALVTFNSAAHNKPSLIRDLLDSVLPHLYNETKVRKELIREVEMGPFKHTVDDGLDIRKAAFECMYTLLDSCLDRLDIFEFLNHVEDGLKDHYDIKMLTFLMLVRLSTLCPSAVLQRLDRLVEPLRATCTTKVKANSVKQEFEKQDELKRSAMRAVAALLTIPEAEKSPLMSEFQSQISSNPELAAIFESIQKDSSSTNLESMDTS

SEQ ID NO: 2385 - DNA, 5387 bp, Homo sapiens
  ref <308>: DATABASE ACCESSION NUMBER: Refseq / NM_018448
  ref <309>: DATABASE ENTRY DATE: 2002-11-05
gggagcgagtgcggagcgagtgggagcgagacggccctgagtggaagtgtctggctccccgtagaggcccttctgtacgccccgccgcccatgagctcgttctcacgcgaacagcgccgtcgttaggctggctctgtagcctcggcttaccccgggacaggcccacgcctcgccagggagggggcagcccgtcgaggcgcctccctagtcagcgtcggcgtcgcgctgcgaccctggaagcgggagccgccgcgagcgagaggaggagctccagtggcggcggcggcggcggcagcggcagcgggcagcagctccagcagcgccagcaggcgggatcgaggccgtcaacatggcgagcgcctcgtaccacatttccaatttgctggaaaaaatgacatccagcgacaaggactttaggtttatggctacaaatgatttgatgacggaactgcagaaagattccatcaagttggatgatgatagtgaaaggaaagtagtgaaaatgattttgaagttattggaagataaaaatggagaggtacagaatttagctgtcaaatgtcttggtcctttagtgagtaaagtgaaagaataccaagtagagacaattgtagataccctctgcactaacatgctttctgataaagaacaacttcgagacatttcaagtattggtcttaaaacagtaattggagaacttcctccagcttccagtggctctgcattagctgctaatgtatgtaaaaagattactggacgtcttacaagtgcaatagcaaaacaggaagatgtctctgttcagctagaagccttggatattatggctgatatgttgagcaggcaaggaggacttcttgttaatttccatccttcaattctgacctgtctacttccccagttgaccagccctagacttgcagtgaggaaaagaaccattatcgctcttggccatctggttatgagctgtggaaatatagtttttgtagatcttattgaacatctgttgtcagagttgtccaaaaatgattctatgtcaacaacaagaacctacatacaatgtattgctgctattagtaggcaagctggtcatagaataggtgaataccttgagaagataattcctttggtggtaaaattttgcaatgtagatgatgatgaattaagagagtactgtattcaagcctttgaatcatttgtaagaagatgtcctaaggaagtatatcctcatgtttctaccattataaatatttgtcttaaatatcttacctatgatccaaattataattacgatgatgaagatgaagatgaaaatgcaatggatgctgatggtggtgatgatgatgatcaagggagtgatgatgaatacagtgatgatgatgacatgagttggaaagtgagacgtgcagctgcgaagtgcttggatgctgtagttagcacaaggcatgaaatgcttccagaattctacaagaccgtctctcctgcactaatatccagatttaaagagcgtgaagagaatgtaaaggcagatgtttttcacgcatacctttctcttttgaagcaaactcgtcctgtacaaagttggctatgtgaccctgatgcaatggagcagggagaaacacctttaacaatgcttcagagtcaggttcccaacattgttaaagctcttcacaaacagatgaaagaaaaaagtgtgaagacccgacagtgttgttttaacatgttaactgagctggtaaatgtattacctggggccctaactcaacacattcctgtacttgtaccaggaatcattttctcactgaatgataaatcaagctcatcgaatttgaagatcgatgctttgtcatgtctatacgtaatcctctgtaaccattctcctcaagtcttccatcctcacgttcaggctttggttcctccagtggtggcttgtgttggagacccattttacaaaattacatctgaagcacttcttgttactcaacagcttgtcaaagtaattcgtcctttagatcagccttcctcgtttgatgcaactccttatatcaaagatctatttacctgtaccattaagagattaaaagcagctgacattgatcaggaagtcaaggaaagggctatttcctgtatgggacaaattatttgcaaccttggagacaatttgggttctgacttgcctaatacacttcagattttcttggagagactaaagaatgaaattaccaggttaactacagtaaaggcattgacactgattgctgggtcacctttgaagatagatttgaggcctgttctgggagaaggggttcctatccttgcttcatttcttagaaaaaaccagagagctttgaaactgggtactctttctgcccttgatattctaataaaaaactatagtgacagcttgacagctgccatgattgatgcagttctagatgagctcccacctcttatcagcgaaagtgatatgcatgtttcacaaatggccatcagttttcttaccactttggcaaaagtatatccctcctccctttcaaagataagtggatccattctcaatgaacttattggacttgtgagatcacccttattgcaggggggagctcttagtgccatgctagactttttccaagctctggttgtcactggaacaaataatttaggatacatggatttgttgcgcatgctgactggtccagtttactctcagagcacagctcttactcataagcagtcttattattccattgccaaatgtgtagctgcccttactcgagcatgccctaaagagggaccagctgtagtaggtcagtttattcaagatgtcaagaactcaaggtctacagattccattcgtctcttagctctactttctcttggagaagttgggcatcatattgacttaagtggacagttggaactaaaatctgtaatactagaagctttctcatctcctagtgaagaagtcaaatcagctgcatcctatgcattaggcagcattagtgtgggcaaccttcctgaatatctgccgtttgtcctgcaagaaataactagtcaacccaaaaggcagtatcttttacttcattccttgaaggaaattattagctctgcatcagtggtgggccttaaaccatatgttgaaaacatctgggccttattactaaagcactgtgagtgtgcagaggaaggaaccagaaatgttgttgctgaatgtctaggaaaactcactctaattgatccagaaactctccttccacggcttaaggggtacttgatatcaggctcatcatatgcccgaagctcagtggttacggctgtgaaatttacaatttctgaccatccacaacctattgatccactgttaaagaactgcataggtgatttcctaaaaactttggaagacccagatttgaatgtgagaagagtagccttggtcacatttaattcagcagcacataacaagccatcattaataagggatctattggatactgttcttccacatctttacaatgaaacaaaagttagaaaggagcttataagagaggtagaaatgggtccatttaaacatacggttgatgatggtctggatattagaaaggcagcatttgagtgtatgtacacacttctagacagttgtcttgatagacttgatatctttgaatttctaaatcatgttgaagatggtttgaaggaccattatgatattaagatgctgacatttttaatgttggtgagactgtctaccctttgtccaagtgcagtactgcagaggttggaccgacttgttgagccattacgtgcaacatgtacaactaaggtaaaggcaaactcagtaaagcaggagtttgaaaaacaagatgaattaaagcgatctgccatgagagcagtagcagcactgctaaccattccagaagcagagaagagtccactgatgagtgaattccagtcacagatcagttctaaccctgagctggcggctatctttgaaagtatccagaaagattcatcatctactaacttggaatcaatggacactagttagatgtttgttcaccatggggaccattacatatgaccatacaatgcactgaattgacaggttaatcataagacatggaaagagaagtgtctaaaagcttcaaaatgttccacttttttttccttcatggagactgtttgtttggctttcttccattgttgtttttgtagcatttatttcagaaatgtgtatttccataatccagaggttgtaaaaccactagtgttttagtggttacagcaacatttgaaatggaaactaaaagttaggattttatggagtatggagatagggtccagtatctatttaccctgtaatgtttaggattaaaatgttaaaattttgtgaccatgaatttctttcttttataaattttctcatttaaaaatcaaaaatcttgcaaaacaaaaaccatgtttctttttcttgtataactttttgttttcagcaacataaattgatttttagctggcagacaagaatatccatataagatttgttaaccatttcagagagtttggcaatttttaaaagataataaggtatcatttttaagtatgaaaattaacaatatccctgttgcgcacactaattttgcatgagtaagtttacaaatatgtatcgtctgtaaagcagcatgtgcagattattcataatatagaagttaaaataagtattagtgcaattttcagatatttatttttgcacagaaaacacattatctggagagaaagaaaggagaatttttgagacttgggttttcttaatgccagtgtgaatttgcagatgttttcagaaaatcaagtcacagtaacaatttgccacttttttctattataaatcttcttacttaaattttgaatatttagtttttctcagttacccatttgtgtgtgtgtgattccacttagaaattcttaaaaccagatttttctttcattccgtttggatgtctacattccttatcaaaggatataaatactgtgtatgcttttgaattttatttttaggaaaattctgaagccagctatcacaggtttgttagctaataatagtattttcttttagttgagttaggtttttccccatctcctgtagagcgaatttacatattgtattgggtaagtgttcactacttttcctgattaagggatctgtgctggggaacaaagcttttgcagtaccttatattgtagttaaaattttatttaacatatccttcagtgagctcatttcacactgtagcctcttccttaaaatttgtggtgctcctgtaacagtaagaactaattctgaaataaaagacatctcctaaaaaaaaaaaaaaaaaaaaaaaaaaaaaaaaaaa

SEQ ID NO: 2386 - protein, 1230 aa, Homo sapiens
  ref <308>: DATABASE ACCESSION NUMBER: Refseq / NP_060918
  ref <309>: DATABASE ENTRY DATE: 2002-11-05
MASASYHISNLLEKMTSSDKDFRFMATNDLMTELQKDSIKLDDDSERKVVKMILKLLEDKNGEVQNLAVKCLGPLVSKVKEYQVETIVDTLCTNMLSDKEQLRDISSIGLKTVIGELPPASSGSALAANVCKKITGRLTSAIAKQEDVSVQLEALDIMADMLSRQGGLLVNFHPSILTCLLPQLTSPRLAVRKRTIIALGHLVMSCGNIVFVDLIEHLLSELSKNDSMSTTRTYIQCIAAISRQAGHRIGEYLEKIIPLVVKFCNVDDDELREYCIQAFESFVRRCPKEVYPHVSTIINICLKYLTYDPNYNYDDEDEDENAMDADGGDDDDQGSDDEYSDDDDMSWKVRRAAAKCLDAVVSTRHEMLPEFYKTVSPALISRFKEREENVKADVFHAYLSLLKQTRPVQSWLCDPDAMEQGETPLTMLQSQVPNIVKALHKQMKEKSVKTRQCCFNMLTELVNVLPGALTQHIPVLVPGIIFSLNDKSSSSNLKIDALSCLYVILCNHSPQVFHPHVQALVPPVVACVGDPFYKITSEALLVTQQLVKVIRPLDQPSSFDATPYIKDLFTCTIKRLKAADIDQEVKERAISCMGQIICNLGDNLGSDLPNTLQIFLERLKNEITRLTTVKALTLIAGSPLKIDLRPVLGEGVPILASFLRKNQRALKLGTLSALDILIKNYSDSLTAAMIDAVLDELPPLISESDMHVSQMAISFLTTLAKVYPSSLSKISGSILNELIGLVRSPLLQGGALSAMLDFFQALVVTGTNNLGYMDLLRMLTGPVYSQSTALTHKQSYYSIAKCVAALTRACPKEGPAVVGQFIQDVKNSRSTDSIRLLALLSLGEVGHHIDLSGQLELKSVILEAFSSPSEEVKSAASYALGSISVGNLPEYLPFVLQEITSQPKRQYLLLHSLKEIISSASVVGLKPYVENIWALLLKHCECAEEGTRNVVAECLGKLTLIDPETLLPRLKGYLISGSSYARSSVVTAVKFTISDHPQPIDPLLKNCIGDFLKTLEDPDLNVRRVALVTFNSAAHNKPSLIRDLLDTVLPHLYNETKVRKELIREVEMGPFKHTVDDGLDIRKAAFECMYTLLDSCLDRLDIFEFLNHVEDGLKDHYDIKMLTFLMLVRLSTLCPSAVLQRLDRLVEPLRATCTTKVKANSVKQEFEKQDELKRSAMRAVAALLTIPEAEKSPLMSEFQSQISSNPELAAIFESIQKDSSSTNLESMDTS

SEQ ID NO: 2387 - DNA, 6849 bp, Rattus norvegicus
  misc_feature (1)..(6849): n=a, c, g or t
  ref <308>: DATABASE ACCESSION NUMBER: EMBL / J01435
  ref <309>: DATABASE ENTRY DATE: 2002-10-25
ccctcacagtattaagtacccttaccctaccgctttcctcccaactaatcacatagaagtttaggatatacagttcaagagccttcaaagcccttagaaaacaaacaagtttaacttctgataaggactgtaagactatatcttacatctgttaaatgcaaatcaactgctttaattaagctaaatcctcaactagattggaaggattcaaacctacgaaaatttagttaacaactaaataccctacttactggcttcaatctacttctcccgcctatcagaaaagaggcgggagaagccttagtagaggagattctctacaccttccaatttgcaattcgacatgataatcaccttaaggctttttggtaaaaagggggctcaacccctgtctttagatttacagtctaatgcttactcagccattttacctatgttcgtaaacggttgactcttttcaactaaccctaaagatatcggaaccctctacctattatttggagcctgagcaggaatagtagggacagctttaagtattctaattcgagctgaactaggacagctaggcgcactcctaggagatgaccaaatctataatgtcctcgtcacagcccatgcattcgtaataattttctttatagtaatacctataataattggaggcttcggaaactgacttgtaccactaataattggagcccctgatatagcattcccacgaataaataacataagcttttgactgcttcctccatcatttctactccttttagcatcctccatagtagaagctggagctggaacaggatgaacagtatatccccccttagccggaaacctagcccatgctggggtatccgtagatttaactattttttccctccacctagccggggtgtcttctatcttaggagctatcaactttatcaccactatcattaatataaaaccccctgctataacccaatatcagacacctctctttgtatgatccgtactaattacagccgtcctactacttctctcactgccagtattagcagcaggtatcactatactccttacagaccgaaatctaaatactactttcttcgaccccgctggaggcggaggcccaattctttatcaacacctattctgattcttcggccacccagaagtgtacatcttaattcttctagggtttgaaattatttcacatgtagttacctattactctggaaaaaaagaacccttcggatatataggtatggtatgaaccataatatctattggcttcctaggatttattgtatgagcacatcacatattcactgtaggcctggatgtagacacccgagcctactttacatctgccactataattatcgcaattcctacaggcgtaaaagtattcagctgactcgctacactacatggaggaaatatcaaatgatcccccgccatattatgagccttagggtttatcttcttattcacagtagggggcctaacagggatcgtactatctaactcatcccttgacattgtacttcatgatacatactacgtagtagctcacttccactatgtcttatctataggagcagtattcgccatcatagcttgcttcgtccactgattcccactattctcaggctataccctaaatgacacatgagcaaaagccctctttgccattatatttgtaggtgtaaacataacattttttcctcaacacttcctaggattagcagggatacctcgtcgttactctgattatccagatgcttataccacatgaaatacagtctcctctataggctcattcatctcacttacggccgtccttgtaatgatcttcatgatttgagaagccttcgcatcaaaacgagaagtgctctcaatttcctactcttcaactaacctagaatgactgcatggatgccccccaccttaccacacattcgaagaaccttcctatgtaaaagttaaataagaaaggaaggattcgaaccccctacaactggtttcaagccaatttcataaccattatgtctttctcaatgagatattagtaaaataattacataaccttgtcaaggttaagttatagacttaaatctatatatcttacatggcttacccatttcaacttggcttacaagacgccacatcaccaatcatagaagaacttacaaactttcatgaccacaccctaataattgtattcctcatcagctccctagtactttatattatttcactaatactaacaacaaaactaacacacacaagcacaatagacgcccangaagtagaaacaatttgaacaattctcccagctgtcattcttattctaatcgcccttccctccctacgaattctatacataatagacgagattaataacccagttctaacagtaaaaactataggacaccaatgatactgaagctatgaatatactgactatgaagacctatgctttgactcctacataatcccaaccaatgacctaaaactaggtgaacttcgcttattagaagttgataatcgggtagtcttaccaatagaacttccaattcgtatactaatctcatccgaagacgtcctgcactcatgacccatcccttcactagggttaaaaaccgacgcaatccccggccgcctaaaccaagctacagtcacatcaaaccgactaggtctattctatggccaatgctctgaaatttgcggctcaaatcacagcttcatactcattgtactagaaatagtgcctctaaaatatttcgaaaactgatcagcttctataatttaaactcattgcgaagcttagagcgttaaccttttaagttaaagttagagacaacaaatctccacattgacatgccacaactagacacatccacatgatttattacaatcatctcctcaatagccacactatttaatttatttcaattaaaaatttcttcccaaacctttcctgcacctccctcacccaaaactatagccacagaaaaaacgaataacccttgagaatcaaaatgaacgaaaatctatttccctctttcattacccccacaataataggtctaccaattgttgtgaccattattatgttcccatcaattctattcccatcatcagaacgcctaatcagcaaccgactacactcatttcaacactgactaatcaaacttatcatcaaacaaataatgttaattcacacaccaaaaggacgaacctgagccctaataattgtatccctaattatatttatcggctcaaccaaccttctagggcttcttccccatacatttacccctaccactcagctatctataaacctaagcatagccatccccctatgagcaggagccgtaattctaggcttccgacacaaactaaaaaattctttagcccacttcttaccgcaaggaacccccatctcactaattcccatactaatcatcatcgaaactatcagcctatttattcaaccgatagcactagcagtacgactaacagcaaacattacagcaggccatctattaatgcatctaatcggaggagctaccctagtacttatagacatcagcccaccaaccgctacaattacatttattattctacttctacttacagtacttgaatttgtcgtagccttaattcaagcctatgtattcacccttctagtaagcctgtacctacatgataacacataatgacccaccaaacccatgcataccatatagtaaacccaagcccatgaccactaacaggagccctatcagctcttctactcacatccggcttagtaatatgattccattacaactccacaattctcctatcattaggcctcctgacaaacatcctaactatatatcaatgatgacgagatatcatccgtgaaggaacataccaaggccaccacacccctattgtacaaaaaggcctccgatacggaataatcctgtttattgtctccgaagtattcttctttgccggatttttctgagcattttatcattccagcctagttcctacccacgacctaggcggttgctgacccccaacaggaatcacccctttaaatcccctagaagtaccccttctaaatacatcagtcctcttagcatcaggagtctcaattacatgagcccatcacagcctaatagaaggcaaccgaaaccatataaaccaagccctactaatcaccattctcttaggattatatttcactatcttacaagcctcagagtatttcgaaacatcattttctatctcagacggaatttacggctcaacattcttcatagcaacgggatttcatggccttcacgtaattattggctcaactttcctaattgtctgtctactacgacaactaaaattccacttcacatcaaaacatcatttcggatttgaagccgcagcatgatactgacacttcgtagatgtagtttgactattcctatacgtttctatctattgatgaggatcctactcccttagtataaacaatacaactgacttccaatcagttaattctgaaaaaactcagaagagagtaattaacctacccattatcatcacaattaacatcaccttatcttttatcctcatttcaattgcattctgattgcctcaaataaacttatactccgaaaaagcaaacccatatgaatgtggcttcgacccaacaagttctgcacgccttcctttttcaataaaatttttcttagtagccattacatttctactattcgacctagaaatcgccttactacttcccctcccatgagcgattcaaacaaccaataccgctacaataatagcaactgcctttattttagtcactattttagctcttggcctaagctacgaatgaacacaaaaaggactagaatgaacagaataattggtaattagtttaaataaaattaatgatttcgactcattagattatgataataatcataattaccaacaatgacatctgctttcctaaatttaactatagcctttacattatctctactaggtacttttatatttcgctcccacttaatatctactctcctctgcctagaaggaataatactatcactatttgtcataacttcaacatccacattaaactccaactccataatctccataaccatcccaattaccattctagtttttgcagcctgcgaagtagcagtaggtttagccttactagtaaaaatttcaaatacccacggaacagactacgtacaaaacctcaaccttctacaatgttaaaaatcattttcccatctatcatactcctcccactaacatgactctcagccaacaaaaaaatctgaaccaatgtcacctcctacagctttctagtgagcctattaagcttatcactcctatgacaaaatgacgaaaattacctaaatttctcagttatattctcctccgatccattatccaccccactaatcattctaacaacttgactcctcccactaataatgctcgctagccaaaatcacataaaaaaagaaaatataatgcatcaaaaactttacatctcaatacttattagcctccaaattttactcatcataacattctccgcaacagaactaattttattttatatcctgttcgaagccactctaatcccaacactaattatcattacacgatgaggcaaccaaacagaacgcttaaatgcaggaatttatttcctgttttatacactaattggctccatcccactcttaattgccctcatttcaatccaaaactcaataggaacactcaacttcctaatcctctccctcacaacacaccccctaccctcaacatgatccaacaccattctatgactagcatgtataatagcatttataatcaaaataccattatacggagtccatctatgattaccaaaagcccacgtagaagctccaattgcaggctctataattttagcagcaattctcctaaagctagggggttatgggataatacgagtttccatcattctagaccccctaacaaaatctttagcctacccattcatcatcctctcattatgaggcataattataactagctcggtctgcctacgccaaacagatctaaaatcattaattgcttactcatcagtaagccatatagccctagtcatcacagccattataatccagacaccatgaagcttcatgggagctacaatactaataatcgcccacggcttaacctcatcactcttattctgcctagcaaacaccaactacgaacgaattcacagccgaactataattatagctcgaggattacaaataatcttttcattgatagcaacatgatgattattagcaagcttagccaacctagcactaccacccctaattaacctcataggcgagttattcattgttatagcaacattttcctgatcgaacccctctatcatccttatagcaactaacattgtcactacaggaatatactcaatatatatgattatcacaacccaacgaggaaaactaaccagccacataaacaacctccaaccttcccacacacgagaattaacactcatagctctacacattattcccctcatactattaacaatcaaccctaaactcatcacaggcctaacaatatgtagatatagtttacaaaaaacattagactgtgaatctaacaacaggaaatcaaattccttatttaccaagaaagtatgcaagaactgctaattcatgcacccatacctaaaacatatggctttcttacttttataggatagaagtaatccattggtcttaggaaccaaaaaccttggtgcaactccaaataaaagtaata

SEQ ID NO: 2388 - DNA, 6849 bp, Rattus norvegicus; identical to SEQ ID NO: 2387
  misc_feature (1)..(6849): n=a, c, g or t
  ref <308>: DATABASE ACCESSION NUMBER: EMBL / J01435
  ref <309>: DATABASE ENTRY DATE: 2002-10-25

SEQ ID NO: 2389 - DNA, 1912 bp, Rattus norvegicus
  ref <308>: DATABASE ACCESSION NUMBER: EMBL / J01436
  ref <309>: DATABASE ENTRY DATE: 2000-03-04
ccggtactcctcagtagccatagcagttgtatacccaaatacaaccaacatcccacccaaataaattaaaaatactattaaacctaaaaacgaacccccaaaccctaaaactattaagcacccaatacatccactaacaatcaatccaaacccaccataaataggtgaaggcttcaacgccaaccctagacaaccagtcaaaaacagtaaacttaaaataaacatataatttgtcattatttctacacagcatttaactgtgactaatgacatgaaaaatcatcgttgtaattcaactatagaaacacctaatgacaaatatccgaaaatctcaccccctattcaaaatcatcaaccactcctttatcgacctccccgccccatctaacatctcatcatgatgaaacttcggttctctactaggagtatgcctcatagtacaaatcctcacaggcttattcctagcaatacactacacgtctgataccataacagcattctcatcagtcacccacatctgccgagacgtaaactacggctgactaatccgatacctacacgccaacggcgcctcaatatttttcatctgcctattcctccatgtgggacgaggactatactatggatcctacactttcctagaaacctgaaacattgggatcatcctactatttgcagtcatagcaactgcattcatgggctatgtactcccatgaggacaaatatcattctgaggagctacagtaattacaaacctattatcagctaccccttacattgggactaccctagtcgaatgaatctgaggaggcttctcagtagacaaagcaaccctaacacgcttcttcgcattccacttcatcctcccattcattatcgccgcccttgcaattgtacatcttcttttcctccacgaaacaggatcaaataaccccacaggattaaactccgacgcagacaaaatcccattccatccatattatacaattaaagacctcctaggtgtatttatattactattattcctaataaccctagtactattcttcccagacctactaggagacccagacaattatacacccgctaaccccctcaacaccccaccccacatcaaaccagaatgatattttctctttgcctacgctattctacgctccattcccaacaaactaggaggggtcgtagccctaatcttatcaatcctaatcttagccttcctaccattcctgcatacctcaaaacaacgcagcttaacattccgcccaatcacccaaatcctttactgaatcctagtagccaacctcctagtcttaacatgaatcggaggccaaccagtagaacacccatttatcattattggtcaactagcctccatcagctatttttcaattatcctcattctcataccaatctctggaattgttgaagacaaaatgttaaaatgaaattaatgtcccgatagtataaaaattactctggtcttgtaaaccaaaaatgaagagtcagtcttctcaggacaatcaagaagaaggaactacctccccaccatcaacacccaaagctgatattctacttaaactacttcttgtcagtacataaaatgatatggacattaaaaaacatttatgtatatcgtacattaaattattttcccaagcatataagcatgtaatatatatctaatgatttaggacatagatttaaactcaactataaattcacaacaacatgtctattctcaaatacattagataatgtctattagacatatctgtgttattagacatgcaccattaagtcataaacctttctcttccatatgactatccctgtccccaattggtctctatttctaccatcctccgtgaaatcaacaacccgcccactcgtccccctcttctcgctccgg

SEQ ID NO: 2390 - protein, 380 aa, Rattus norvegicus
  ref <308>: DATABASE ACCESSION NUMBER: SWISS-Prot / AAA99907
  ref <309>: DATABASE ENTRY DATE: 2000-05-30
MTNIRKSHPLFKIINHSFIDLPAPSNISSWWNFGSLLGVCLMVQILTGLFLAMHYTSDTMTAFSSVTHICRDVNYGWLIRYLHANGASMFFICLFLHVGRGLYYGSYTFLETWNIGIILLFAVMATAFMGYVLPWGQMSFWGATVITNLLSAIPYIGTTLVEWIWGGFSVDKATLTRFFAFHFILPFIIAALAIVHLLFLHETGSNNPTGLNSDADKIPFHPYYTIKDLLGVFMLLLFLMTLVLFFPDLLGDPDNYTPANPLNTPPHIKPEWYFLFAYAILRSIPNKLGGVVALILSILILAFLPFLHTSKQRSLTFRPITQILYWILVANLLVLTWIGGQPVEHPFIIIGQLASISYFSIILILMPISGIVEDKMLKWN

SEQ ID NO: 2391 - DNA, 2509 bp, Rattus norvegicus
  ref <308>: DATABASE ACCESSION NUMBER: EMBL / J02596
  ref <309>: DATABASE ENTRY DATE: 2000-03-04
taaagagacggatgacctacagccccaggcccacccattcaacaggcctagctcattcccaagcccagacatcaaggcatgggacacccacgcatggcagcttcgtgtccagctttattagggacagcatgtttaggtgaggtctggggagggataaaggcatgagaatatactttccccttagagcaaccttcggaggcagcaggatagatggccagacacatctggaacatggaggtctcacggctcaagagttggtgttgttagttggtcctcagggccagactcccagaggccagtgaacttatcagtgaacttgctccagtagcctttcagggatttgaagcgattgtccatccagcccctgggggttaaaacagtaataggtgtgtgtgtgtgtgtgtgtgtgtgtgtgtgtgtgtgtgtgtgtgtgtgtgtgtgaaaagatctcctgtgggcagctagacccaggggtgcacctaggcctccactggctccctaagccaccagcaccaccttacctagcaccaccctcagaatcacctgcagctaccactcaaggtggaggagatggtaaaggctaagaaaacccaccttcatcagagccccattacctcccgtccaatctctcttcaggcctgaggcaccaaccactggggaggtggatactaaggtcagcttgcctttgtagtccatagaaacagtgtccttgaggtgtcccatccctggctctaagtggatggatcaagggaggggtgaactttctgtttggaaacattaccagagggcttctaagctctgtgatctaggccaggttatctaactctttcccagctgcggaggtagatagtacctctccacaacctgttctgggcacagagactgtcaacatcttttgctacataggcaatgatcaaatgtcacgtaaacgattggcagggtaatgtttcatcacgggcaagatgcctcacttaggttgagcccagggatggaaacagggcagaacccccaacccgtaatgctcaaccttccaacttccctgtaatcagagcaggaaggcctcccagagcacaccctagaccctgtgctcaaagaagaaaacctgcagggaggctgaacgctcctcaggctgctctgaggagaagcagaggagatagaagaagtctgcttgcactgcctgtcatcttagtcacagtccccagcaaaggccccgtgagagactggatgctcagacgggcccaagaccctggtaaacttggtgggccacagtctccgtgtccagggcctcagcaccagggcaggaggggcgaggaccaggaaaggaggtccgtgtgcatacctggccaccacagctatatcagactcctgcatgctgcttagtgcatcctggaccgtcttggaggcttgttccatgtagccctgcatagagcccagcagcaaggatccctctccctcatcagctcctgcaagagagcagagttgagccaggccagccctcagctcttgcccagccatcgcttttcagggtagggtccccagaccagctcccgcagaaatcccagccccacttccaccagcttacgggcagaggccaggagagccacgagggccacgatgaggagcattcggggctgcatggcacctgtgcacctgcgggagaccatcttgtgagagggtattgtggatctccacatctaagcccttccctggagaacaccacggcccctctgtcatgaatccccaagcctttctcctactgatatcagctctcggagagagaactaagaagacccagacccaccccaaggggctggaaggtggaatgtgggaatcctctgcaaagcagaacatctacccagcctctgccccaatatatggagaaacaacaggtttctttttctctctaggcttcaggcttttcagtctggggtaggcacggatatcaaaggcttctaatagctcagagcaagacgaacaaggggcagcatgacccagttcccaatcagctctgccactacccagtgcaaggcttttttgcccagtggcctccctttcctcagcttctagcctcccccacccaccaggatacccaagggctggaggccgtgaattccaagcattctgtaggctagctggctgagtggccagagcgtcttctctctgtctcctccctcccttcctctcctccccaggggcattacctggagtagctagctgcttctagggataaaactgggcaggcaagccgggacgctctgatctgttttatattggctccaggatgggacagcgggcacagaaggcccagtgagctggtcaaaggtcacctgctgaacagtccagaccagagcccgaggcagggaggccatgcagccagctgccagaggagttgagaaatccctcagagattgcccacaccgttcacttccacctccgcagccaagagatcagctactgacctgcctcgatgagactggtgagacaggaaaagactcaggggacaagcctt

SEQ ID NO: 2392 - protein, 101 aa, Rattus norvegicus
  ref <308>: DATABASE ACCESSION NUMBER: SWISS-Prot / AAA40746
  ref <309>: DATABASE ENTRY DATE: 2002-06-15
MQPRMLLIVALVALLASARADEGEGSLLLGSMQGYMEQASKTVQDALSSMQESDIAVVASRGWMDNRFKSLKGYWSKFTDKFTGLWESGPEDQLTTPTLEP

SEQ ID NO: 2393 - DNA, 533 bp, Homo sapiens
  ref <308>: DATABASE ACCESSION NUMBER: Refseq / NM_000040
  ref <309>: DATABASE ENTRY DATE: 2002-11-05
tgctcagttcatccctagaggcagctgctccaggaacagaggtgccatgcagccccgggtactccttgttgttgccctcctggcgctcctggcctctgcccgagcttcagaggccgaggatgcctcccttctcagcttcatgcagggttacatgaagcacgccaccaagaccgccaaggatgcactgagcagcgtgcaggagtcccaggtggcccagcaggccaggggctgggtgaccgatggcttcagttccctgaaagactactggagcaccgttaaggacaagttctctgagttctgggatttggaccctgaggtcagaccaacttcagccgtggctgcctgagacctcaataccccaagtccacctgcctatccatcctgcgagctccttgggtcctgcaatctccagggctgcccctgtaggttgcttaaaagggacagtattctcagtgctctcctaccccacctcatgcctggcccccctccaggcatgctggcctcccaataaagctggacaagaagctgctatg

SEQ ID NO: 2394 - protein, 99 aa, Homo sapiens
  ref <308>: DATABASE ACCESSION NUMBER: SWISS-Prot / P02656
  ref <309>: DATABASE ENTRY DATE: 2002-06-15
MQPRVLLVVALLALLASARASEAEDASLLSFMQGYMKHATKTAKDALSSVQESQVAQQARGWVTDGFSSLKDYWSTVKDKFSEFWDLDPEVRPTSAVAA

SEQ ID NO: 2395 - DNA, 1927 bp, Rattus norvegicus
  ref <308>: DATABASE ACCESSION NUMBER: EMBL / J02612
  ref <309>: DATABASE ENTRY DATE: 2000-03-04
gaggaaacccggaattcagatggtggctgagggtggctgactgaaaaacggacttccagatttcttactcttccacaagggccctcatcacgtgcgcaggtctctaaccttactctctgaaaggatggcttgccttcttcctgctgctcgacttcctgcaggctttctcttcttagtgctctggggctcagttctaggtgacaagctgctggtggtcccccaggatggcagccactggcttagcatgaaggagatagtggagcacctcagtgaacgcggacacgacattgtggtgctagtgccagaagtcaatttgcttttgggagaatccaaatactacaggaggaaaagctttccggtcccctacaacctagaagagttacggacccgctatcgctcctttgggaacaaccactttgctgccagttcccccctgatggctcctctaagagagtacaggaacaacatgattgtcattgacatgtgctttttcagctgccagagcctcctgaaggactcggccaccctcagcttcctcagggagaaccagtttgatgctctgttcacagacccggccatgccctgtggtgtgatcctggctgagtatctcaagctgccttccatctacctcttcagaggtttcccatgctctctggagcacattggtcaaagcccaagccccgtatcctatgttcccagattctacaccaaattctcagaccacatgacatttccccaacggctggccaacttcattgctaacatcttggagaactacctttatcattgtctgtactcaaagtatgagatccttgcctcagacctcctcaagagagatgtgtccctacctgccttacaccagaactctctgtggctgttacggtatgattttgtgttcgaatacccccggccagtcatgcccaacatgatcttcattggagggaccaactgcaagaagaaggggaacctgtctcaggaatttgaagcctatgtcaacgcctccggagaacatggcatcgtggttttctctttgggatccatggtctcagagattccagagaagaaagcgatggaaatcgctgaggctttgggcagaattcctcagacgctcctgtggcgctacaccggaactagaccatcgaaccttgcaaagaacactattcttgtcaaatggctaccccaaaacgatctgcttggtcatccaaaggctcgggcgttcatcacacactccggttcccatggtatttatgaaggaatatgcaatggggttccaatggtgatgatgcccttgtttggtgatcagatggacaacgccaagcgcatggaaactcggggagctggggtgaccctgaatgtcctggaaatgactgccgatgatttggaaaacgcccttaaaactgtcatcaataacaagagttacaaggagaacatcatgcgcctctccagccttcacaaggaccgtcctatcgagcctctggacctggctgtgttctgggtggagtacgtgatgaggcacaagggggcgccacacctgcgccccgccgcccacgacctcacctggtaccagtaccactccttggacgtgattggctttctcctggccatcgtgttgacggtggtcttcattgtctataaaagttgtgcctatggctgccggaaatgctttgggggaaagggtcgagtgaagaaatcacacaaatccaagacccactgagaagtggcaggaagtgaaggagaagtattagtcccttatccaatcagttgaaacttggaaacaagtgttaaatccatgttgcttttattagggaaataattcaccatacactatacacccagaacatttttttttctttttctttttttcggagctggggaccgaacccagaacatcttctttttttaaataaaaacaacccaatcgccggcc

SEQ ID NO: 2396 - protein, 529 aa, Rattus norvegicus
  ref <308>: DATABASE ACCESSION NUMBER: SWISS-Prot / P08430
  ref <309>: DATABASE ENTRY DATE: 2001-10-16
MACLLPAARLPAGFLFLVLWGSVLGDKLLVVPQDGSHWLSMKEIVEHLSERGHDIVVLVPEVNLLLGESKYYRRKSFPVPYNLEELRTRYRSFGNNHFAASSPLMAPLREYRNNMIVIDMCFFSCQSLLKDSATLSFLRENQFDALFTDPAMPCGVILAEYLKLPSIYLFRGFPCSLEHIGQSPSPVSYVPRFYTKFSDHMTFPQRLANFIANILENYLYHCLYSKYEILASDLLKRDVSLPALHQNSLWLLRYDFVFEYPRPVMPNMIFIGGTNCKKKGNLSQEFEAYVNASGEHGIVVFSLGSMVSEIPEKKAMEIAEALGRIPQTLLWRYTGTRPSNLAKNTILVKWLPQNDLLGHPKARAFITHSGSHGIYEGICNGVPMVMMPLFGDQMDNAKRMETRGAGVTLNVLEMTADDLENALKTVINNKSYKENIMRLSSLHKDRPIEPLDLAVFWVEYVMRHKGAPHLRPAAHDLTWYQYHSLDVIGFLLAIVLTVVFIVYKSCAYGCRKCFGGKGRVKKSHKSKTH

SEQ ID NO: 2397 - DNA, 367 bp, Homo sapiens
  ref <308>: DATABASE ACCESSION NUMBER: EMBL / AV683870
  ref <309>: DATABASE ENTRY DATE: 2002-01-11
cgaaactgtctttgtgtttagttacaaggagaacatcatgcgcctctccagccttcacaaggaccgcccggtggagccgctggacctggccgtgttctgggtggagtttgtgatgaggcacaagggcgcgccacacctgcgccccgcagcccacgacctcacctggtaccagtaccattccttggacgtgattggtttcctcttggctgtcgtgctgacagtggccttcatcacctttaaatgttgtgcttatggctaccggaaatgcttggggaaaaaagggcgagttaagaaagcccacaaatccaagacccattgagaagtgggtgggaaataaggtttttgccattccctagtctttcccttg

SEQ ID NO: 2398 - protein, 534 aa, Homo sapiens
  ref <308>: DATABASE ACCESSION NUMBER: SWISS-Prot / P22310
  ref <309>: DATABASE ENTRY DATE: 2002-06-15
MARGLQVPLPRLATGLLLLLSVQPWAESGKVLVVPTDGSPWLSMREALRELHARGHQAVVLTPEVNMHIKEEKFFTLTAYAVPWTQKEFDRVTLGYTQGFFETEHLLKRYSRSMAIMNNVSLALHRCCVELLHNEALIRHLNATSFDVVLTDPVNLCGAVLAKYLSIPAVFFWRYIPCDLDFKGTQCPNPSSYIPKLLTTNSDHMTFLQRVKNMLYPLALSYICHTFSAPYASLASELFQREVSVVDLVSYASVWLFRGDFVMDYPRPIMPNMVFIGGINCANGKPLSQEFEAYINASGEHGIVVFSLGSMVSEIPEKKAMAIADALGKIPQTVLWRYTGTRPSNLANNTILVKWLPQNDLLGHPMTRAFITHAGSHGVYESICNGVPMVMMPLFGDQMDNAKRMETKGAGVTLNVLEMTSEDLENALKAVINDKSYKENIMRLSSLHKDRPVEPLDLAVFWVEFVMRHKGAPHLRPAAHDLTWYQYHSLDVIGFLLAVVLTVAFITFKCCAYGYRKCLGKKGRVKKAHKSKTH

SEQ ID NO: 2399 - DNA, 1687 bp, Rattus norvegicus
  ref <308>: DATABASE ACCESSION NUMBER: EMBL / J02669
  ref <309>: DATABASE ENTRY DATE: 2000-03-04
tcaatcctcactggccactatgctggacacaggactgcttctggtggtcatattggcctccctgagcgtcatgctcttggtgtccctctggcagcagaaaatcagggggagattgcctccaggacccactcctttgcctttcattggaaattatctgcagctgaatacaaaagacgtatacagttccatcacacagctcagtgagcgctatggtcctgtgttcaccatccaccttgggcctcgccgggttgtggtgctttatggatacgatgcagtcaaagaggctttggtggaccaagctgaggagttcagtggacgaggcgaacaggctacctacaatacactcttcaaaggctatggcgtggcattcagcagtggggagcgggcaaaacaactcaggcgcctctctatagccacattgagagattttggtgtgggcaagcgtggtgtagaggagcgtatcctggaggaggcaggctatttgatcaagatgttgcagggcacttgtggagcccccattgaccccaccatctacctgagcaaaacagtctccaatgttattagctccattgtcttcggggaacgcttcgactatgaggacacggagttcctgtcactgctgcagatgatgggtcaaatgaacagatttgcagcttcacccacagggcagctctatgacatgttccattcagtgatgaagtacctgcctggaccacagcaacagatcatcaaggttactcagaaactggaagacttcatgatagagaaagtgaggcagaaccatagtaccctggaccccaattccccaaggaacttcattgactcctttctcatccgcatgcaagaggagaaaaatggcaattcagagttccacatgaagaacctagtgatgacaacactaagcctcttctttgctgggtctgagacagtcagctccacactacgctacggcttccttctactcatgaagcatccagatgtggaggccaaggtccatgaggaaattgagcaggtgatcggcaggaaccgacagcctcagtatgaggaccacatgaagatgccctacacccaggctgtgatcaatgagatccaaagattttctaacttggctcccttgggcattcctcgaaggattatcaagaacacaaccttccgtggcttcttcctccccaaggccaccgatgtgttccctatattaggttctctgatgacagacccaaagttcttccctagccccaaagacttcgacccccagaacttcctggatgacaagggacagttgaagaaaaatgctgctttcctccctttctccactgggaagcgattctgcttgggagatggcctggctaagatggagctcttcctgctgctcaccactattttacagaacttccgtttcaagttcccaatgaaactagaagacatcaacgagtcccccaaacccttggggtttaccaggatcataccaaagtacaccatgagcttcatgcccatctgattctgagttgaatcaaggtggggcaagagggagagagagcctgaagtggggccagggtgcaggtggagagaacaggggaggtgaagatgagggttaagaagggaccacacccatggaagaaacacaaaagacttctcactttggtaaaattgtaacagtcctaataaaaagaaagaaatactcagtcgg

SEQ ID NO: 2400 - protein, 492 aa, Rattus norvegicus
  ref <308>: DATABASE ACCESSION NUMBER: SWISS-Prot / P11711
  ref <309>: DATABASE ENTRY DATE: 2002-06-15
MLDTGLLLVVILASLSVMLLVSLWQQKIRGRLPPGPTPLPFIGNYLQLNTKDVYSSITQLSERYGPVFTIHLGPRRVVVLYGYDAVKEALVDQAEEFSGRGEQATYNTLFKGYGVAFSSGERAKQLRRLSIATLRDFGVGKRGVEERILEEAGYLIKMLQGTCGAPIDPTIYLSKTVSNVISSIVFGERFDYEDTEFLSLLQMMGQMNRFAASPTGQLYDMFHSVMKYLPGPQQQIIKVTQKLEDFMIEKVRQNHSTLDPNSPRNFIDSFLIRMQEEKNGNSEFHMKNLVMTTLSLFFAGSETVSSTLRYGFLLLMKHPDVEAKVHEEIEQVIGRNRQPQYEDHMKMPYTQAVINEIQRFSNLAPLGIPRRIIKNTTFRGFFLPKATDVFPILGSLMTDPKFFPSPKDFDPQNFLDDKGQLKKNAAFLPFSTGKRFCLGDGLAKMELFLLLTTILQNFRFKFPMKLEDINESPKPLGFTRIIPKYTMSFMPI

SEQ ID NO: 2401 - DNA, 8778 bp, Homo sapiens
  ref <308>: DATABASE ACCESSION NUMBER: EMBL / U22028
  ref <309>: DATABASE ENTRY DATE: 2000-03-04
tgggtccaaccaaaatcaaagtcaattccctgggcccagtgctgggctgctgggcttttctgggagcacctgctgggcttgctacacactccacctcccagaaactccacacccacagccctgggtcttcctagccccaagactttcaagtccatatgcctggaatcccccgtcctgagacccttaaccctgcatcctccacaacagaagacccccagatgcacagccacacttccatctcaccctagtaaaacccagacctttggattcctctcccgtggaatgcccaaatccacaactttggggtgcagtctcactcccagatcccaaatccaaagaccaggtgctcccctgtgcaaatattccaaactcctcagttccacagtttatctgttgcccgctcctaaatccacaggccctgcagcaaccctcctgaagtagcagagttagactggagttcccctccctgttcatcttgccctggggtccctctcctcctcccttgctggctgtgtcctaagctgtgtgggattcagggttggggtgtagttgggaggtgaaatgaggtgattatataatcaaccacagtccatccctctttttcaggcagtataaaggcaaaccaccccagccatcaccatctatcatcccatggccaccatgctggcctcagggctgcttctggtgaccttgctggcctgcctgactgtgatggtcttgatgtcagtctggcggcagaggaagagcagggggaagctgcctccgggacccaccccattgcccttcattggaaactacctccagctgaacacagagcagatgtacaactccctcatgaaggtgtcctaaggcaggagatgggtggcacggggtgggggctgcccagttggctggggcttagtggcaggggattgaccagtgtggaccagagtcttaggaaagggagtcttggagtttcagcatcagggtcctagcaggaaagacaggatcttgggatgtccagctccctgactgtgagaacctgggggcgaagcatcccagtacatgatatctcagcgctgggcccattcagagtgggggctgctccctctaaccactcccacctgcctccaacagatcagtgagcgctatggccctgtgttcaccattcacttggggccccggcgggtcgtggtgctgtgcggacatgatgccgtcaaggaggctctggtggaccaggctgaggagttcagcgggcgaggcgagcaggccaccttcgactggctcttcaaaggctatggtgagggggtgccaagagggggaaggtggtcaggtggatgcaatggtctccgtgtccccagccttctccctgactctcctgcccactggaggatatgggagagccccctgtctggtcttctctccccatctccctacatcggggactctccctgtgagtcccacacctgtctccagcgcccctggcgtgattcctccctgcctctctctgccccgtctcctccttctctctcactggagtctcctcttacccctctctctccatctctgaggacatccggggtttctgtttaccagccctggtcctctgtcttcatttgtctttttgtcgctctcggcttctgtgcttctccgtgtttctcctctctctgcttccctctcccacttcttcctctgtcttaggatttcagggtattcctacttccacatctccagctcccaactcctggtaattgtctgtcctccttcccgatcctctctgtttctgtctccatatttttctctctcttctccagttcagattaagaatctttcaccatttttatttcctcctcccagatctccccatatctcacttcccctccctccatctctctctttctctccccactaccttcccttcctccatggagtatccccgtatccctctgtttctctgcatctgtctgtctggcctttctgcttctcttctgattctcttattctttctacccggactctctctctctctctctctctctctctctctctctctctctctctctctctctctctctctcgtgctctcgtgtttctctgactgagagtgtagctctcctgggcactcgcgctgaatccatctctctcccacaccactccctctctacaccacccttggggagccccttggaactggtccgctcctgctaccaccaccccctgacctctctccacccccgcgttcacctccccaggcgtggcgttcagcaacggggagcgcgccaagcagctccggcgcttctccatcgccaccctaaggggttttggcgtgggcaagcgcggcatcgaggaacgcatccaggaggaggcgggcttcctcatcgacgccctccggggcacgcacggtgagtaggggaccccgagtgcgagggcgggaacccgcgctttctgcctggggatggggactaggtggggaaaggggcccgcacttccagccctggagtctggcgctgggattcggctcaacagggccctgcctcctggaattctgactctcctcagacctctgagttgactctctccccaaccccccttctcccgccacacctgtaggcgccaatatcgatcccaccttcttcctgagccgcacagtctccaatgtcatcagctccattgtctttggggaccgctttgactatgaggacaaagagttcctgtcactgttgcgcatgatgctgggaaggttccagttcacgggaacctccacggggcaggtaactggatgcagcccgccagtgacgcccctaccacaacctgccaactgctcccctacctggagacaggtgccccaaactcccacccccctccagacagtgtcccctcaaaatcagtccccgatattggacaactggacggttggaccagaacccaggagggatgcccaatacccagtctccaaggacacctggatagctcaacagatgatccccaaaacagagcctgctggcaggatgcataccctcagctcagctctctcacctgggcacatgttcccatccccatcttaccgtaatttgtaacaggtgctccctacccagttcttctgaatatttaacacctggacaagtgactgtgtcaacccgcctcctgcatacctgaacacctggtgctgcaaaatccaggccatcataatcatttcacatctacacaaatgtcacagattagcccactggtaatatctggccaagggccctctacttcacccacttaaatgcctgaaaacatggacaggtgccctaaccaataccctaaacacataaatatctagatagattattccctgacacccaaataagtgttccccaaccctttccaatcacacaccttacagaggtgctcccagtgcatcccacttggataggtaaacacctcaacaggtatcccctccacttcagcatcttcaccagccccactttatacctgagcacctgaacaaaagcccccaatccagacccagtaagtatctggacagctgtctccaaccaagtccacttgaatgcctaaatacctagacaggtgccactcacctcataccagccccacctgaagagctaaacacctggacaggtgtcttccaactcaacttcacttgaatatctgaacacctagatgtgtgctccaatccagcctcatttgcatacctgaaacctggatatatgcctcagttcttctcacctaaattactagaccgtgcccctggcacctaatccacgtgaaaacttagatataagtttccatccaaccccactgaaatacctaaacacctggacagatgcctttaactccgttccttccttgctatgaaacaaatccccattcccatcagctcctgccccgtgacagctgtccttcccttcccatcctctctctgcaaccccagctctatgagatgttctcttcggtgatgaaacacctgccaggaccacagcaacaggcctttaaggagctgcaagggctggaggacttcatcgccaagaaggtggagcacaaccagcgcacgctggatcccaattccccacgggacttcatcgactcctttctcatccgcatgcaggaggtacatcccagcagccagtgcaggcaggtgcaaagccagggagagggaaatcaggatgggagtggggtgggcagacgacacaggcccattcaaattagccctcgtcataataatccttacaattggccaggcgcggtggctcatgacctgtaatcccagcactttgggaggccgaggcaggtggatcacctgaggtcaggagttcgagaccagcctggccaacatggtgaaaccccgtctctactaaaaatacaaaaatgagctaggtatggtggcatgcgcctgtaatcccagctactcaggaggctgagacagaagaatttgtttgaatccgggaggcagaggttgcagtgagccgggatcatgccactgcactccggcctgagtgacagagcaagaccctgtaaaaaaaaaaaaaaaaaaaaaaaaaaattccggaaaaccccaattacatcacccactgctgtcccatctactgagccctcacccacaaggacgggttatggaggtggattagattggaaagaacttctcaagaactaccgggtgccaggaactgggttaagtgttttatgatagtccgccatggaacacttttaacagttcttgagggaggttcactcatggccccagttgtacaaatgaggaaactgaggcccagagagtttaagtgtcttaactgaggtcacaacagtgaggaagaccatggtccccctagctcaaaccctggtctctctgagcctatagctggtgcttttagccaccatgctctctaaccgttcatgtcctggttagcagacacacctctgtggacaggtgacctggctttacattgcagggtccccgcctacctctggatgtcagcctcccatgtgggaaggctttaggaagccaaagctcagggagaaaggatcaagggagggattcctccacagtaagtttcaagatttttagggaagaaataggatgctgttgcttaaaattctgtgcttgtatctcagaaaaactctttttttctgactcttcatcttgccatctctgtactactttctcttcgtctcccctcatccttctctttccaaatattcctatcattaaaaaagtaacagactgggaaacatggcaaaaccccgtctgtacaaaaaaatggctaggcatggtggtgcatgcctgcggtcccagctactaaggaggttgaggtgggaggatatcttgagcccagggtgggcagaggtttcaatgagccgatatcacagccctgccctccagcctgggtgacagaataagaccgtgtctcccaaaaaaaaaaagaattaattttttaacagttaacaagtgagcctgcatagtcatgtgcatgtgcagttccagctactctggaggctgagaccggaggattccttgaacccaggagttggagtccagcctgtgcaacttagcaagaccaagtctgcataaaaaaaaaaaaaaccaactgacagctaagttgacaattaaaggatagatgatcagtgaggtaaagaaggtgagaaggaagagcattttgggcaaagccagcagccagggcaagggctggaacctggagcgagtttggcaaatctagggtccctctttccacctttggtctggaccaaagagaggtagctccaaaggaaaagccctagaagggccccaagagcatggagagtgagcttggtctaaaccgccctctccctgcaggaggagaagaaccccaacacagagttctacttgaagaacctggtgatgaccaccctgaacctcttctttgcgggcactgagaccgtgagcaccaccctgcgctacggtttcctgctgctcatgaagcacccagaggtggagggtaagactggaaagggaggaaagtgaagggccccagaccctcaaaactcccctgagcctggtgcagtgtacccacctatcccagatcccaggaccctgagacgtgccttgctgtccagagacaggacaatattcagctgataggcatcagctgagtctcattagctattaaaatattgaaaatgtctgcactgattggtcagtcactcctgtcccaagcccactgagtgtccgctgcctgctcctctggatcatcccctaagttcctcccttgtcctaccctgtgattctgacacaacctggtttaacagggatcctgctgcaaacaatgcgaatgggtgatgtcttgttcttgtttatgaatgggcttacccttcgtgtcagaggtggaagctatgtcaaccgccgtgttttagctagggggggcgatacatgccctgctctaagacccctagagagggtaaagatattcccctcctccgccagccaaggtccatgaggagattgacagagtgatcggcaagaaccggcagcccaagtttgaggaccgggccaagatgccctacacagaggcagtgatccacgagatccaaagatttggagacatgctccccatgggtttggcccacagggtcaacaaggacaccaagtttcgggatttcttcctccctaaggtgctgtctcccctccaccaccaccactcagactacggggacttccagcctctctctgtgtccccagaatcctgcccccattagtgttctagactctgtcccactccctcaatcagtcaaaaaagacttccccaaccaccacatctgttccacctttccacttagacagtcctgagtcctgcatctcgccagactctttgtgtcaggagaatacaccccatgttcccaatcttcctgtcttaagaaacagaagccccctttccattaggccttgtggcttagggacacaaatctcaggtccctcaaacaccctggctagtggaacatggaccccatgtctcccaaacttcctgtctcagagacatgaaacttctatcccccaaagctcctccctcagaggtccccaactcctccatgtcgtgccactccccgcacctgggggaccctagagccccctggagcccctgtgtactttcaccaatccccccaacctggctcataacacacaccttcctcctccctcccagggcactgaagtgttccctatgctgggctccgagctgagagaccccaggttcttctccaacccccaggactgcagtccccagcacttcctggatgagaaggggcagtttaagaagagtgatgcttttgtgcccttttccatcggtaagagacactgtttgctgccaggccacggctcacaccagcaggggcctctctcacccacctcccctctctgcggtgtagcctggtatttctccagcttggaagttcctgttagaatctaccattgagccgccaccagctgatactcccttaactgccaagcacccaatacctgcgcccaggtaaaagggaaggaaacatcttcccccatagatttatttgtctagggtcacacagcagattcttcagctccctgaaaaggagataatggtacagcacagcagtcatatttgcaagtgtatctggggggtaggggcatctaaacctcccattgctacacctggcatggatcaccccatctatgatggaggcatgacattatgcctttttcgaaacccatagaactgtataacacagagtaaaccctaatgtaaactatggactttggttagtaataatatatcaatattggttcaccattgttatatctcttatagaaggaaactgaagctcagggaggatcggagtctcctctgaaagtctctcaggccataatattcccacccctcctccctagagagtgcagccgggggtcagtaggggttgaggctgcactgagagtgggcttcaccttcacccctcctgcctctcctcctcaggaaagcggtactgttttggagaaggcctggccagaatggagctctttctcttcttcaccaccatcatgcagaactttcgcttcaagtcccctcagtcgcctaaggatatcgacgtgtcccccaaacacgtgggctttgccacgatcccacgaaactacaccatgagcttcctgccccgctgagcgagggctgtgctggtgcagggctggtgggcggggccagggaaacggccggggcaggggcggggcttgtgggaggggcggggctaagaatgggggcagtgggggaaggaaggggagaggtggttagagggaacagaagaaacagaaggggctcagttcaccttgatgatgtccttcagagctgtgatgagaggaagggaaaccttacagtatgctacaaagagtagtaataatagcagctcttatctcctgaacaagtccctccctgtcagctttgttcaaaaagcgttgcacgctcacctcacttatttgccacacacctctaccaatgggggaaaagtcttcattcccctttttacacgtgagaaaggtgcggctcagaaagttgtctctatctgaaaactcacaaaacgcaagtgtccagaggatcttggaacacagatctgggcccatagccctctagatcgatcctcaccatagcaccccttcttcacgtaaaatagcttagtatagcatcacatggcctgaacacccctgggccggggggttccccagagacctggcgggcggctgccctgcctactctgtacactcgcctactcgggacgatccgggcaccagggtgtcacctgagctcgcta

SEQ ID NO: 2402 - protein, 494 aa, Homo sapiens
  ref <308>: DATABASE ACCESSION NUMBER: SWISS-Prot / Q16696
  ref <309>: DATABASE ENTRY DATE: 2002-06-15
MLASGLLLVTLLACLTVMVLMSVWRQRKSRGKLPPGPTPLPFIGNYLQLNTEQMYNSLMKISERYGPVFTIHLGPRRVVVLCGHDAVKEALVDQAEEFSGRGEQATFDWLFKGYGVAFSNGERAKQLRRFSIATLRGFGVGKRGIEERIQEEAGFLIDALRGTHGANIDPTFFLSRTVSNVISSIVFGDRFDYEDKEFLSLLRMMLGRFQFTGTSTGQLYEMFSSVMKHLPGPQQQAFKELQGLEDFIAKKVEHNQRTLDPNSPRDFIDSFLIRMQEEEKNPNTEFYLKNLVMTTLNLFFAGTETVSTTLRYGFLLLMKHPEVEAKVHEEIDRVIGKNRQPKFEDRAKMPYTEAVIHEIQRFGDMLPMGLAHRVNKDTKFRDFFLPKGTEVFPMLGSELRDPRFFSNPQDCSPQHFLDEKGQFKKSDAFVPFSIGKRYCFGEGLARMELFLFFTTIMQNFRFKSPQSPKDIDVSPKHVGFATIPRNYTMSFLPR

SEQ ID NO: 2403 - DNA, 8377 bp, Rattus norvegicus
  ref <308>: DATABASE ACCESSION NUMBER: EMBL / J02722
  ref <309>: DATABASE ENTRY DATE: 2000-03-04
aagcttgcttctaatttccaaaatgttagagttggtttttctggagaatctcaggattaacaaaacaaagacacaaaaagtgaagtccttgttgagatcaaaagtcactttagagtaggagagatggccgggtggttcacagtacttgctgcccttacagaggacctgaattcagttccctacatgggcagctcactaccccctgtgactcccagtcatgggggacccaatgccctcttctttcttctcaggcatctatatgcacgtggcatgaatacatacatacatttacttgggtctacagacacacataaaataaataatatgttttcgttgttgttgtcttttccagacagggtttctctgtgtagccttggctgtcctggaactccctctgtagaccaagctggcctcaaactcacagagatgtgccagcctctgcctcctgggtgctaggctcaaaggcctgcctgtaccatcactacctggaaaacagtaaatactttttaaagaggtattttaagaagtaaatacttttaacaataacaaaaaaggacaactagaactacggaggctttgaagaaccacccagcatgtttgtgtattctctgtcctgtaccaaaggtccagctcgccaggaattcggagggtaattgtccaagtcctcccctctaagcttcggtgggttatctgccgttatagatgtgtcagagccatgtgtcctgacttcagtctccggtactcaggcaccaggaagtcacagtgtggcccaggttctaggagagcaccaaggaggcgccagaggtgggtgctgcactccatgagaccctgggcagaaagcttcatcctccagctcacattccccgcctgtaagactggagccatctatcccccactgtgacacatggggatgaaccttggaaaagtcagtctaggcaggtgttagtaaaacaaacaggactatgtacataaaggattgagaaaaccagtcatccttagagttccgggaaggtagactcaagtatgtagacttggggcccggatgggtcaatccctgggtttgcccaccagcatctcacagctagaattgtctcctagttctggaaccttccagattcctgagaggctggctactcctgccttcctatcactgaatagagtagagggttctggaaaggacccaaaaaattctgctaagaggcaattcactcagatttcctttttttttttttaagagcttgccagagtcatatgatttatccccatacaggccaggccgaccagcctcggggcggggtgttgcaacaacagccagaacgccggctcagctgggcggccaccacgtgactcgagtacttaaagggctggcgcgggcagctgctcgctcacagtcgccagtcgcctccagagtttccgcctccaaccagcgagtggagcctgccggagcagagccatctcgagcggagcccggagcctgaagcgagcggagccagcctgaactagcccagtcccgcgatggagcgcccacagctcgacaggcaagcgactacttggggacgggaactgtgatgtcccgcgtcccttgtccagcctagaaatgcaggctgcgggaccaaggaacgagttgccgcccagtctacctgtagccatgggcagctggagggagaaaatgtgattcacccctctgacacgctggaggtgaccggatgggtgtgtcttgtagtatccaggtttgagggatgaacagtgctgagtcctggatcctggactcaccgttctagggggcgggggttggggagcttggccctcttggtggcgcggagtggtcacatcaattcccaacttcagacgacttgtaagacgcagggaggcagccgtagcagaactagagggtgttgaggctgggtgttttttgtttggggatgggggggacaggaagttttttgtttgcttggtgttttgttctgttttgctttggggtccctgtgtagatcaagttggccttgaactccagttcgcttccctttgcttcctgagtactgagattgaaggtgccccgccaccacacttggcttctattcctcctcctcctcctcctcctccttctcctcttcctcctcttcctcttcctcttcttcctccttctcctcttcctccttctcctctttgattttttttgagacggagcgcctctttgtagccctggatgtcttcactctgtagatcaggctggcctagaactcggagatctgcctgcctctgcctccctagtgctgagattacaggcctgcaccactctgtccagctcttttttctttttttccttttataaagccagttttatttttatatttttatttaaagcgtctcgagttacatttaatttatcgtgcatgtagagtggccacatatatgacacactaaatatgtggaggtcagagttcgacttgaagaaagtcacttctcagtctaccatgtggcttccaagaaagattggcttatcaggtggcaagtgcgtttcctggctgagcttacactgtctagtcctcacctccaacttttagcagtaaggattgaacttaggacttcaaacattctaggcaagcgctttacccataaggtacagtatcagcaccttttttatttaaagacagtgcctaactaagttgaccaggctggtctggaactcttgaatcttctgctgcagaacctctctaaataaagctgggttacatagactatttaatgcagaaactttgagtatagtgtatagttggttttggatgggttttttgtttgttttttgttttgttttgctgagactcttcctacatagccctgtgctgaaattcattcactatatagatagacccaggttggctttaaactaagagatctgcctacctccacctcctgcatgctggaattaaaggtgtgcaccatcacgtcctgctgcttgtaaaatctgtaactgaaattttttaagaaatatcttcaggttggatctaaaagctcaccaaagtatctacccttagccgggctgtggtggcccatgtctttaatcccagcactcaggaggcagagggaagcacatctctagagttctgggccagcctgctctacagagtgagatccaggacagccagggctacacagagaaacgctgtcttggaaagagaaaatctgcccttgagtatggtccttggactggcgtggctcttccctgaggtcaggacataccttgcctcctcttcactgggaataactggcgtaggaatcctccctggggttttggggactacgtcacatagtgtttaatgactgacatctgtttgcatggttaagatcatggcttggcctacattggaggctggagctattctgcaggtctaatcattcataggcatccccggctgactctcctctcttcctccacagcatgtcccaggatttgtccgaggccttgaaggaggccaccaaggaggtgcacatccgtgcagagaattctgagttcatgaggaactttcagaagggtcaggtgtccagggaaggctttaaggtacgtgacgtgtaggttgaccagaccactggggtatagcaggtatacccagggcttaagccaatagtttaatggggaggttggtgccaggagtgatgagggcctgtccaaggacgccatcttggtaatgctgaccctgtagctcagagaggaaagggtctgctggtggaggagctggtgcagtggggtggttaagtgaacacgtattctatgttggtcattttatgttcttgaggagtgcctaaggagaaggaacagagaggttaaagaggccatcctgtcagctttcagtggaaaagaccaaaaccaaagatggccaaatttcagagcttgcgctcttgacctggttaccgcagggcctcatacatgccggctaggttctctaccactgacccacaatccaagctcttaggttactagatcgggtctcactacacagttcaggaactctcaatactcctgcgtcagcctcccgggtatttggaccatgggagacccaaatctcctgacccaatttcaacttgcctctgaaggaaaggagaagtttgccttagccctgcagtgtcctgttcccacagtgagattggctacctcatttaacctcccaagccctcttgcctgaggaatggggttttgacagctgggctgaaatgcacagtagacacaatagaccctgtttcctgccagctgtggaactgatgtctgcagcaaacatcagacacagggaagagagcactgactgggtggggagtggagggtggtggagacaggagaccgtccttccagaagggttcttctagcgacaagttgattctgtttttttcagctggtgatggcctccttgtaccatatctatacggccctggaagaggagatagagcgaaacaagcagaacccagtctatgccccgctctacttccctgaggagctgcaccgaagggctgccctagagcaggacatggccttctggtatgggccccactggcaggaggccatcccttacacaccagccacacagcactacgtaaagcgtctccacgaggtgggaggtactcatcctgagctgctggtggcccacgcatatacccgctacctgggtgacctctcagggggtcaggtcctgaagaagattgcgcagaaggccatggccttgccaagctctggggaaggcctggcttttttcaccttcccgagcatcgacaaccccaccaagttcaaacagctctatcgtgctcgcatgaacactctggagatgacccccgaggtcaagcacagggtgacagaagaggctaagaccgccttcctgctcaacattgaggtgagccccactgttccttcaagccccattcattccagttattggaggaagggtccccagagtcccagttagtacaaggacttggggccagccagggtcctgttttgctgcttaactagctgggtgattgtgggcaaatctcttcatcctcaggttctaaatctccaaaatagggataataatagcatccatcttcaaggcgagaggggcaagcaagttgtggttcagtccctgtgggaggagtgatacaggggaagttccctgatgtcattgctctcttgtgtggtgggctgtgatcctctgacaatggtgtagctggacctggggtgcctgagtactggtgcatggccaggccagcacagtccaggcttcggatgctgacatgtcccaggtggcatttgcttccttttctttgatttgcattgatgtgttgcccacgggtatatctgtttggtgtcagattcgttgggggtggagctacagacagctgggagctgccacaggggaaccgggaattgaacccgcatcctctggagagcaactaacgctcttaatctttgaactatctttagctcggtgttttgagcaaggccccgaaaggcagagctgggggagtagactgtcctatttatactatgggtgctatggtggtcagggttccaatttgggacctcctgtctctccccactttcagcctgagagcctttaaaagttccaccaggcaagcacctgttagagaagtaaccttcagatgtcctaaattcatctaggcccgttcacctgaggccttccgaggacatgatataaagaatgagtttagaagtggggaagtgatggcccattcctttaatctcagcactcagaaggcagagacaggaggatctctgtgagttccaggtcagcttggtctacacagctagttctaggacagccgaggctacacaaagaaaccctgtcttgaaaaacaaaacaaaacaccaacaagaaaagaggattagacacaggcccagctgagaactgggtctccatcctgacccctagtcgatctcaagaaagccctgctccaggagctgtggttccctgacctgcaaaagcagcgaccatactccattacacgacacaccgcctagcaaggaggagctcaagtacagtcatgaagagagcacgggatgtaggctgcacggctcccacacattcgtgtgttatttccgaagaggcaaactggttctcctcatagggatacagaaaagctcctgaagtctttattcagggcagccgttactggtggggtccaagcgagggtacagacagtatcggggacgcacaggcagggagccaactaaacctgtcacatctcatgagataagtgaaagacgcggtatgcgatagtttcctcaagtcgtgtcatttgtacaatatttcccaacaggcttcaagctgtgccttcccctgggtccccccacattgtgagtatcactaacaggcagtgtgtcttgtcttgtcttcagctgtttgaggagctgcaggcactgctgacagaggaacacaaagaccagagtccctcacagacagagtttcttcgccagaggcctgctagcctggttcaaggtaaagatggcctcttggcttctgctctccttagcccagctggaatttctttactcttctccattctgaacgttttaaattagagatagggtgcagacaaaagagcccagggtaagtctgtagtatgactgtgggtaagctatcagacttttctaccttagtttctccacattagaaaatcaggaggttgggggctgtgtagctcgttggctgaggggcatataaagccctcagaagtcactggcacagagatcctctcatttagatcccgcctcccacttcttttcccccaaggcagagccatgctgcatgacccaggctggtctcaaaccctgggagtcaaacaatcctcctgcttcaatctttcataaaaatctagggtgtgtttaccttttgaggcccactcaaggctcccatgcaggccccatatgaggcaaggatttgggaagctatttctagcgctgaccctccaggagacacgacggagttcatgtaattactggagtgtcagcccttttcctgtgccttgatacactacccttggagcaggagtaagggttcttaaaaagaccaaagtggcagaaaatgtgccttccctgagcctatcacccctgggacagtatggcccagggagtgggtgactgaaactgagcagggcaggttacgtgaagcttgattgcttgaatgggcccaccttttgcccaaggctctcccaagggaggcaggacccgccaccttgtcattagtggtactgtttctggtgggctgaaatatggtcagtgctgatagaattagttacctgtttgggtctggagtctttgacctgctgcggcctggcggagcacaggaggaacagcgtgggggagttggtgagctcctatctttgaaggtgtttaagcagtggctagtggttcaagctgtagcagaatcctggccttggactggaactgtagcagacacggcaccgagtgtcctctgctctgtgcagtgtcatccaccccaggctgtgtgtttgaccttgtctgtgtttctcctacagatactacctctgcagagacgccccgaggaaaatcccagatcagcactagttcatcccagacaccgctcctgcgatgggtcctcacactcagtttcctgttggcgaccgtggcagtgggaatttatgccatgtaaatgcagtgttggcccccagaggctgtgaactctgtctcatgtagccttctctctgcaggggagaatcttgcctggctctcttttcttgggcctctaagaaagcttttggggttcctcgcccccttcctgtgtcttcctttgtctctctggaatggaaggagatgcctggcacatttccctcaccaaaagcacagccaggggcctgaacttggaaaccagcagccccaaatcctgcaacagagccccagaactgtggtcggtagaggcggctgttctgagcccagtgcccttggtagtcggcgtccatgttgactgaccatgactgctttcccccagcgtcatggccactttgatatcagtgtgcagagattttctgtcttgtgtttctgtcttgtttttgttatttccccagttctaccagtgtaatggtattttttgttgtatcgattgtttttttattctaaccaagtagggctgtcttttgaggggtgggtggtatttaataattgtaaccttggtctctaacttctgtgtgaaataataaatggcattatctaataatcaccggaagttcgttcatgtctctgccgtccacgaacagggccctgctcctcctgtctcttcagtgtctggcaggaggagggcaggtggtggtggcatcagtagctttgacggtccactgtgtctgagagttggaagtgagcttcaagcatttgggc

SEQ ID NO: 2404 - protein, 289 aa, Rattus norvegicus
  ref <308>: DATABASE ACCESSION NUMBER: SWISS-Prot / AAA41346
  ref <309>: DATABASE ENTRY DATE: 2002-06-15
MERPQLDSMSQDLSEALKEATKEVHIRAENSEFMRNFQKGQVSREGFKLVMASLYHIYTALEEEIERNKQNPVYAPLYFPEELHRRAALEQDMAFWYGPHWQEAIPYTPATQHYVKRLHEVGGTHPELLVAHAYTRYLGDLSGGQVLKKIAQKAMALPSSGEGLAFFTFPSIDNPTKFKQLYRARMNTLEMTPEVKHRVTEEAKTAFLLNIELFEELQALLTEEHKDQSPSQTEFLRQRPASLVQDTTSAETPRGKSQISTSSSQTPLLRWVLTLSFLLATVAVGIYAM

SEQ ID NO: 2405 - DNA, 1550 bp, Homo sapiens
  ref <308>: DATABASE ACCESSION NUMBER: Refseq / NM_002133
  ref <309>: DATABASE ENTRY DATE: 2002-11-05
tcaacgcctgcctcccctcgagcgtcctcagcgcagccgccgcccgcggagccagcacgaacgagcccagcaccggccggatggagcgtccgcaacccgacagcatgccccaggatttgtcagaggccctgaaggaggccaccaaggaggtgcacacccaggcagagaatgctgagttcatgaggaactttcagaagggccaggtgacccgagacggcttcaagctggtgatggcctccctgtaccacatctatgtggccctggaggaggagattgagcgcaacaaggagagcccagtcttcgcccctgtctacttcccagaagagctgcaccgcaaggctgccctggagcaggacctggccttctggtacgggccccgctggcaggaggtcatcccctacacaccagccatgcagcgctatgtgaagcggctccacgaggtggggcgcacagagcccgagctgctggtggcccacgcctacacccgctacctgggtgacctgtctgggggccaggtgctcaaaaagattgcccagaaagccctggacctgcccagctctggcgagggcctggccttcttcaccttccccaacattgccagtgccaccaagttcaagcagctctaccgctcccgcatgaactccctggagatgactcccgcagtcaggcagagggtgatagaagaggccaagactgcgttcctgctcaacatccagctctttgaggagttgcaggagctgctgacccatgacaccaaggaccagagcccctcacgggcaccagggcttcgccagcgggccagcaacaaagtgcaagattctgcccccgtggagactcccagagggaagcccccactcaacacccgctcccaggctccgcttctccgatgggtccttacactcagctttctggtggcgacagttgctgtagggctttatgccatgtgaatgcaggcatgctggctcccagggccatgaactttgtccggtggaaggccttctttctagagagggaattctcttggctggcttccttaccgtgggcactgaaggctttcagggcctccagccctctcactgtgtccctctctctggaaaggaggaaggagcctatggcatcttccccaacgaaaagcacatccaggcaatggcctaaacttcagagggggcgaaggggtcagccctgcccttcagcatcctcagttcctgcagcagagcctggaagacaccctaatgtggcagctgtctcaaacctccaaaagccctgagtttcaagtatccttgttgacacggccatgaccactttccccgtgggccatggcaatttttacacaaacctgaaaagatgttgtgtcttgtgtttttgtcttatttttgttggagccactctgttcctggctcagcctcaaatgcagtatttttgttgtgttctgttgtttttatagcagggttggggtggtttttgagccatgcgtgggtggggagggaggtgtttaacggcactgtggccttggtctaacttttgtgtgaaataataaacaacattgtctg

SEQ ID NO: 2406 - protein, 288 aa, Homo sapiens
  ref <308>: DATABASE ACCESSION NUMBER: SWISS-Prot / P09601
  ref <309>: DATABASE ENTRY DATE: 2002-06-15
MERPQPDSMPQDLSEALKEATKEVHTQAENAEFMRNFQKGQVTRDGFKLVMASLYHIYVALEEEIERNKESPVFAPVYFPEELHRKAALEQDLAFWYGPRWQEVIPYTPAMQRYVKRLHEVGRTEPELLVAHAYTRYLGDLSGGQVLKKIAQKALDLPSSGEGLAFFTFPNIASATKFKQLYRSRMNSLEMTPAVRQRVIEEAKTAFLLNIQLFEELQELLTHDTKDQSPSRAPGLRQRASNKVQDSAPVETPRGKPPLNTRSQAPLLRWVLTLSFLVATVAVGLYAM

SEQ ID NO: 2407 - DNA, 1580 bp, Rattus norvegicus
  ref <308>: DATABASE ACCESSION NUMBER: EMBL / J02749
  ref <309>: DATABASE ENTRY DATE: 2000-03-04
ctaatcggtgggacgcacctccgcgatgcatcggctgcaggtagtgctgggccacctggccggccggtccgagtcgagctccgcgctgcaagccgcgccctgctctgcgggcttcccgcaggcctcggcctccgacgtggtggtggtgcacggacagcgcacccccatcggccgcgccggccgcggcggcttcaaggacaccacccccgacgagcttctgtcggccgtgttgaccgcggttctccaggatgtgaagccaaagcctgagtgtctgggagacatctccgtgggcaatgtgcttcagcccggggccggagccgcaatggcacgcatcgcccagttcctgagtggcatcccagagaccgtgcctctgtcagcagtcaacagacagtgttcatcgggactgcaggcagtggccaacattgctggtggcatcagaaatgggtcttacgacattggcatggcctgtggggtggagtccatgaccctgtctgagagaggcaaccctgggaatatttcctcccgtcttctggagaacgagaaggccagagactgcctgattcctatggggataacctcggagaatgtggctgagcggtttggcatctcacggcagaagcaggatgccttcgcgctggcctctcagcagaaggcagcaagcgcccagagcaaaggctgcttccgtgctgagatcgtgcctgtgacaaccactgtcctcgatgacaagggtgacaggaaaaccatcaccgtgtctcaggatgagggtgtccgccccagcaccaccatggagggcctggccaagctgaagcctgccttcaaggatggaggctctaccacggctggaaactccagtcaggtgagtgatggagcagccgccgtcctgctggcccggaggtccaaggctgaagaactgggcctccccatccttggcgtcctgaggtcctatgcagtggtcggggtccctcctgacatcatgggcatcggacctgcctatgccatccctgcggccttgcagaaagcagggctgactgtgaatgacatagacatctttgagatcaatgaggcctttgcaagtcaggccctctactgtgtggagaagctgggaattcctgcagaaaaggtgaaccccctggggggtgcaatagccctgggccaccccctgggctgcaccggagcaaggcaggtggtcacgctgctcaatgagctgaagcgccgaggcagacgggcttatggcgtggtgtccatgtgcatcgggactgggatgggagccgctgctgtctttgaataccctgggaactgaggccctgactgcaggcactacccagagagtcctatagtagtgtctggagagggatggtacagaagccatcttcgtgggacactcagcagtggagggatttgtcacagcactttaatttagaaaatgtaatcgcaatacgggcacaagggcatccaatccactcctctcagttgaaccaaagacagcgcacgtcacacgtgaccacaggacaacatgtttctgagggacagtggcctcatgaatagtgggcatgaggggcatagtaaatgtatgttatctc

SEQ ID NO: 2408 - protein, 434 aa, Rattus norvegicus
  ref <308>: DATABASE ACCESSION NUMBER: SWISS-Prot / P21775
  ref <309>: DATABASE ENTRY DATE: 2000-05-30
MSESVGRTSAMHRLQVVLGHLAGRPESSSALQAAPCSATFPQASASDVVVVHGRRTPIGRAGRGGFKDTTPDELLSAVLTAVLQDVKLKPECLGDISVGNVLEPGAGAVMARIAQFLSGIPETVPLSAVNRQCSSGLQAVANIAGGIRNGSYDIGMACGVESMSLSNRGNPGNISSRLLESDKARDCLIPMGITSENVAERFGISRQKQDAFALASQQKAASAQSKGCFRAEIVPVTTTVLDDKGDRKTITVSQDEGVRPSTTMEGLAKLKPAFKDGGSTTAGNSSQVSDGAAAVLLARRSKAEELGLPILGVLRSYAVVGVPPDIMGIGPAYAIPAALQKAGLTVNDIDIFEINEAFASQALYCVEKLGIPAEKVNPLGGAIALGHPLGCTGARQVVTLLNELKRRGRRAYGVVSMCIGTGMGAAAVFEYPGN

SEQ ID NO: 2409 - DNA, 1391 bp, Homo sapiens
  ref <308>: DATABASE ACCESSION NUMBER: EMBL / X12966
  ref <309>: DATABASE ENTRY DATE: 1993-09-12
tgcgcaatgcagaggctgcaggtagtgctgggccacctgaggggtccggccgattccggctggatgccgcaggccgcgccttgcctgagcggtgccccgcaggcctcggccgcggacgtggtggtggtgcacgggcggcgcacggccatctgccgggcgggccgcggcggcttcaaggacaccacccccgacgagcttctctcggcagtcatgaccgcggttctcaaggacgtgaatctgaggccggaacagctgggggacatctgtgtcggaaatgtgctgcagcctggggccggggcaatcatggcccgaatcgcccagtttctgagtgacatcccggagactgtgcctttgtccactgtcaatagacagtgctcgtcggggctacaggcagtggccagcatagcaggtggcatcagaaatgggtcttatgacattggcatggcctgtggggtggagtccatgtccctggctgacagagggaaccctggaaatattacttcgcgcttgatggagaaggagaaggccagagattgcctgattcctatggggataacctctgagaatgtggctgagcggtttggcatttcacgggagaagcaggatacctttgccctggcttcccagcagaaggcagcaagagcccagagcaagggctgtttccaagctgagattgtgcctgtgaccaccacggtccatgatgacaagggcaccaagaggagcatcactgtgacccaggatgagggtatccgccccagcaccaccatggagggcctggccaaactgaagcctgccttcaagaaagatggttctaccacagctggaaactctagccaggtgagtgatggggcagctgccatcctgctggcccggaggtccaaggcagaagagttgggccttcccatccttggggtcctgaggtcttatgcagtggttggggtcccacctgacatcatgggcattggacctgcctatgccatcccagtagctttgcaaaaagcagggctgacagtgagtgacgtggacatcttcgagatcaatgaggcctttgcaagccaggctgcctactgtgtggagaagctacgactcccccctgagaaggtgaaccccctggggggtgcagtggccttagggcacccactgggctgcactggggcacgacaggtcatcacgctgctcaatgagctgaagcgccgtgggaagagggcatacggagtggtgtccatgtgcatcgggactggaatgggagccgctgccgtctttgaataccctgggaactgagtgaggtcccaggctggaggcgctacgcagacagtcctgctgctctagcagcaaggcagtaacaccacaaaagcaaaaccacatgggaaaactcagcactggtggtggtg

SEQ ID NO: 2410 - protein, 424 aa, Homo sapiens
  ref <308>: DATABASE ACCESSION NUMBER: SWISS-Prot / P09110
  ref <309>: DATABASE ENTRY DATE: 2002-06-15
MQRLQVVLGHLRGPADSGWMPQAAPCLSGAPQASAADVVVVHGRRTAICRAGRGGFKDTTPDELLSAVMTAVLKDVNLRPEQLGDICVGNVLQPGAGAIMARIAQFLSDIPETVPLSTVNRQCSSGLQAVASIAGGIRNGSYDIGMACGVESMSLADRGNPGNITSRLMEKEKARDCLIPMGITSENVAERFGISREKQDTFALASQQKAARAQSKGCFQAEIVPVTTTVHDDKGTKRSITVTQDEGIRPSTTMEGLAKLKPAFKKDGSTTAGNSSQVSDGAAAILLARRSKAEELGLPILGVLRSYAVVGVPPDIMGIGPAYAIPVALQKAGLTVSDVDIFEINEAFASQAAYCVEKLRLPPEKVNPLGGAVALGHPLGCTGARQVITLLNELKRRGKRAYGVVSMCIGTGMGAAAVFEYPGN

SEQ ID NO: 2411 - DNA, 1580 bp, Rattus norvegicus; identical to SEQ ID NO: 2407
  ref <308>: DATABASE ACCESSION NUMBER: EMBL / J02749
  ref <309>: DATABASE ENTRY DATE: 2000-03-04

SEQ ID NO: 2412 - protein, 434 aa, Rattus norvegicus; identical to SEQ ID NO: 2408
  ref <308>: DATABASE ACCESSION NUMBER: SWISS-Prot / P21775
  ref <309>: DATABASE ENTRY DATE: 2000-05-30

SEQ ID NO: 2413 - DNA, 1391 bp, Homo sapiens; identical to SEQ ID NO: 2409
  ref <308>: DATABASE ACCESSION NUMBER: EMBL / X12966
  ref <309>: DATABASE ENTRY DATE: 1993-09-12

SEQ ID NO: 2414 - protein, 424 aa, Homo sapiens; identical to SEQ ID NO: 2410
  ref <308>: DATABASE ACCESSION NUMBER: SWISS-Prot / P09110
  ref <309>: DATABASE ENTRY DATE: 2002-06-15

SEQ ID NO: 2415 - DNA, 666 bp, Rattus norvegicus
  ref <308>: DATABASE ACCESSION NUMBER: EMBL / J02773
  ref <309>: DATABASE ENTRY DATE: 2000-03-04
ctcacgaccgacatcgacctcctttctcattgcaccatggcggacgcctttgtcggtacctggaagctagtggacagcaagaattttgatgactacatgaagtcactcggtgtgggctttgccaccagacaggtggctagcatgaccaagccgaccacaatcattgagaagaatggggataccatcaccataaagacacacagtaccttcaagaacacagagatcagctttcagctgggagtagagtttgacgaggtcacagcagatgacaggaaggtcaagtcggtcgtgacactggacggaggcaaactggtccatgtgcagaagtgggacgggcaggagactacgcttacacgggaactaagtgatgggaaactcatcctgactctcacccatggcaatgtggtgagcactcggacttacgagaaggaggcgtgacctggctgccccgtcactgactgctcctctgccaatggctacccctaactcagcaccacgttgcctcatgtttctcccctctgacgttttatataaatactctttggttgggcttttcctggagatatgggacaccagcctggacccaggtcccattgtgtatgtggtttattttttaaatgtatccaaagggtgctccaaggtcaataaagcagagccaaggccacc

SEQ ID NO: 2416 - protein, 132 aa, Rattus norvegicus
  ref <308>: DATABASE ACCESSION NUMBER: SWISS-Prot / P07483
  ref <309>: DATABASE ENTRY DATE: 2002-06-15
ADAFVGTWKLVDSKNFDDYMKSLGVGFATRQVASMTKPTTIIEKNGDTITIKTHSTFKNTEISFQLGVEFDEVTADDRKVKSVVTLDGGKLVHVQKWDGQETTLTRELSDGKLILTLTHGNVVSTRTYEKEA

SEQ ID NO: 2417 - DNA, 679 bp, Homo sapiens
  ref <308>: DATABASE ACCESSION NUMBER: Refseq / NM_004102
  ref <309>: DATABASE ENTRY DATE: 2000-11-01
gaattcggcacgaggtagcttctctcagcctagcccagcatcactatggtggacgctttcctgggcacctggaagctagtggacagcaagaatttcgatgactacatgaagtcactcggtgtgggttttgctaccaggcaggtggccagcatgaccaagcctaccacaatcatcgaaaagaatggggacattctcaccctaaaaacacacagcaccttcaagaacacagagatcagctttaagttgggggtggagttcgatgagacaacagcagatgacaggaaggtcaagtccattgtgacactggatggagggaaacttgttcacctgcagaaatgggacgggcaagagaccacacttgtgcgggagctaattgatggaaaactcatcctgacactcacccacggcactgcagtttgcactcgcacttacgagaaagaggcatgacctgactgcactgttgctgactactactctgccaatcggctacccctcgactagcaccacattgcctcatttcttcctctgattttgtacaaatccacgaattcttctggggtcaggtgccactgaccgggatccagttccagttcccatggtgtatgtggttttttttttttttttttttaactgcactcatagggtgctctgaggtcaataaagcagagccaaggccacc

SEQ ID NO: 2418 - protein, 132 aa, Homo sapiens
  ref <308>: DATABASE ACCESSION NUMBER: SWISS-Prot / P05413
  ref <309>: DATABASE ENTRY DATE: 2002-06-15
VDAFLGTWKLVDSKNFDDYMKSLGVGFATRQVASMTKPTTIIEKNGDILTLKTHSTFKNTEISFKLGVEFDETTADDRKVKSIVTLDGGKLVHLQKWDGQETTLVRELIDGKLILTLTHGTAVCTRTYEKEA

SEQ ID NO: 2419 - DNA, 1008 bp, Rattus norvegicus
  ref <308>: DATABASE ACCESSION NUMBER: EMBL / J02776
  ref <309>: DATABASE ENTRY DATE: 2000-03-04
atgagcaaacgcaaggcgccgcaggagaccctcaacggcggcatcacggacatgctcgtggaactcgcaaactttgagaagaacgtgagccaggcgatccacaagtacaatgcatacagaaaagcagcatctgtgatagcaaagtacccacacaaaatcaagagtggagcagaagctaagaaattgccaggagtaggaacaaaaattgctgaaaagattgatgaatttttagcaactggaaaattgcgtaaactggaaaagattcgtcaggatgatacaagttcatccatcaacttcctgactcgagttactggcatcgggccatctgctgcaaggaagcttgtagatgaaggaattaaaacattagaagatctcaggaaaaatgaagataaattgaaccaccatcagcgaattgggctgaaatattttgaggactttgaaaagagaattcctcgtgaggagatgctgcaaatgcaggacattgttcttaatgaagttaaaaagctggatcccgagtacatcgctacagtctgcggcagtttccgaagaggcgcagagtccagtggagatatggacgttctgctgacccacccaaacttcacgtcagaatcaagcaaacagccaaagttgttacatcgtgttgtggaacagttacaaaaagtccgtttcattacagatactcgttcaaagggtgagacaaagttcatgggtgtttgccagcttcccagcgagaatgatgaaaacgaatatccacacaggagaatcgatatcaggttgatccccaaagatcagtactactgtggtgttctctacttcactggaagtgacatctttaataagaatatgagagcgcatgccctggaaaagggcttcacaatcaatgagtacaccatccgccccctgggggtcactggggttgctggggagccccttccggtggacagcgagcaggacattttcgattacatccagtggcgctaccgggagcccaaggacaggagtgaatga

SEQ ID NO: 2420 - protein, 334 aa, Rattus norvegicus
  ref <308>: DATABASE ACCESSION NUMBER: SWISS-Prot / P06766
  ref <309>: DATABASE ENTRY DATE: 2002-06-15
SKRKAPQETLNGGITDMLVELANFEKNVSQAIHKYNAYRKAASVIAKYPHKIKSGAEAKKLPGVGTKIAEKIDEFLATGKLRKLEKIRQDDTSSSINFLTRVTGIGPSAARKLVDEGIKTLEDLRKNEDKLNHHQRIGLKYFEDFEKRIPREEMLQMQDIVLNEVKKLDPEYIATVCGSFRRGAESSGDMDVLLTHPNFTSESSKQPKLLHRVVEQLQKVRFITDTLSKGETKFMGVCQLPSENDENEYPHRRIDIRLIPKDQYYCGVLYFTGSDIFNKNMRAHALEKGFTINEYTIRPLGVTGVAGEPLPVDSEQDIFDYIQWRYREPKDRSE

SEQ ID NO: 2421 - DNA, 1259 bp, Homo sapiens
  ref <308>: DATABASE ACCESSION NUMBER: EMBL / M13140
  ref <309>: DATABASE ENTRY DATE: 2000-03-04
ccggagctgggttgctcctgctcccgtctccaagtcctggtacctccttcaagctgggagagggctctagtccctggttctgaacactctggggttctcgggtgcaggccgccatgagcaaacggaaggcgccgcaggagactctcaacgggggaatcaccgacatgctcacagaactcgcaaactttgagaagaacgtgagccaagctatccacaagtacaatgcttacagaaaagcagcatctgttatagcaaaatacccacacaaaataaagagtggagctgaagctaagaaattgcctggagtaggaacaaaaattgctgaaaagattgatgagtttttagcaactggaaaattacgtaaactggaaaagattcggcaggatgatacgagttcatccatcaatttcctgactcgagttagtggcattggtccatctgctgcaaggaagtttgtagatgaaggaattaaaacactagaagatctcagaaaaaatgaagataaattgaaccatcatcagcgaattgggctgaaatattttggggactttgaaaaaagaattcctcgtgaagagatgttacaaatgcaagatattgttctaaatgaagttaaaaaagtggattctgaatacattgctacagtctgtggcagtttcagaagaggtgcagagtccagtggtgacatggatgttctcctgacccatcccagcttcacttcagaatcaaccaaacagccaaaactgttacatcaggttgtggagcagttacaaaaggttcattttatcacagatacccgttcaaagggtgagacaaagttcatgggtgtttgccagcttcccagtaaaaatgatgaaaaagaatatccacacagaagaattgatatcaggttatacccaaaagatcagtattactgtggtgttctctatttcactgggagtgatattttcaataagaatatgagagctcatgccaaggaaaagggtttcacaatcaatgagtacaccatccgtcccttgggagtcactggagttgcaggagaacccctgccagtggatagtgaaaaagacatctttgattacatccagtggaaataccgggaacccaaggaccggagcgaatgaggcctgtatcctccctggcgcagacacaacccaatgggtcttaatttatttcttaacctttgctatgtaagggtctttggtgtttttaaatgattgtttcttcttcatgcttttgcttgcaatgtagtcaataaaacc

SEQ ID NO: 2422 - protein, 334 aa, Homo sapiens
  ref <308>: DATABASE ACCESSION NUMBER: SWISS-Prot / P06746
  ref <309>: DATABASE ENTRY DATE: 2002-06-15
SKRKAPQETLNGGITDMLTELANFEKNVSQAIHKYNAYRKAASVIAKYPHKIKSGAEAKKLPGVGTKIAEKIDEFLATGKLRKLEKIRQDDTSSSINFLTRVSGIGPSAARKFVDEGIKTLEDLRKNEDKLNHHQRIGLKYFGDFEKRIPREEMLQMQDIVLNEVKKVDSEYIATVCGSFRRGAESSGDMDVLLTHPSFTSESTKQPKLLHQVVEQLQKVHFITDTLSKGETKFMGVCQLPSKNDEKEYPHRRIDIRLIPKDQYYCGVLYFTGSDIFNKNMRAHALEKGFTINEYTIRPLGVTGVAGEPLPVDSEKDIFDYIQWKYREPKDRSE

SEQ ID NO: 2423 - DNA, 1866 bp, Rattus norvegicus
  ref <308>: DATABASE ACCESSION NUMBER: EMBL / J02791
  ref <309>: DATABASE ENTRY DATE: 2000-03-04
agagccaacagagcaggaaggcatcatggcagcagcgctccgcagaggctacaaggtcctgagaagtgtctctcattttgagtgtcgagcacaacacacaaaaccatctctcaagcaggagccgggactagggtttagcttcgagttgacggagcagcagaaagagtttcaaacaattgctcggaagtttgccagagaggaaataatcccggtcgccccagactacgataaaagcggggaatacccgttccctctcatcaagagagcctgggaacttgggttgatcaacacacacattccggagagttgtggtggtcttggcctgggaacttttgatgcgtgtttaattacggaagagttggcatatgggtgtacaggggtgcagactgctattgaagcaaattctttggggcaaatgcctgtgattattgctggaaatgatcaacagaagaagaagtatttggggaggatgacggagcagccgatgatgtgtgcctactgcgtgacagaaccctcagcaggctctgatgtggcgggcattaagaccaaagcagagaagaagggtgatgaatatgtcatcaatggccagaagatgtggataaccaacgggggaaaggccaactggtattttgtattgacgcgatctaacccagatcctaaagtacctgctagtaaagccttcaccggattcatcgtggaggccgacaccccgggaatacacatcggaaaaaaggaactaaacatgggtcagcggtgctctgacaccagaggaatcaccttcgaagatgtcagagtgcctaaggaaaatgtgttaattggtgaaggagcaggtttcaagattgcaatgggggcttttgatagaaccaggccgacggtcgcagctggtgctgtcgggctagcccagagagccctggacgaagctactaagtatgccctggacaggaaaacatttggaaagctgctagtggagcaccaaggagtttcatttctgctcgcagaaatggcgatgaaagttgaactggccagactcagttaccagcgagcagcctgggaggttgactccggccgccggaacacgtactttgcctctattgcgaaggcctttgctggagatattgccaaccagctcgctaccgatgctgtgcagattttcggaggctatggattcaacactgagtacccagtagaaaagctgatgcgggacgccaagatctatcagatttacgaaggtactgcacaaattcagaggctgatcatagctcgtgagcacattgaaaagtataaaaattaacagaaattactatcgaacgatgcttcaccctcatgtaactacgctcagagcactgttgctgcttcagggggaaagggctttacttgtcttcccacagaaatgagataaaagacgcgtgtcacagatctgtgcaatggggtcccacggcggagggtgcctctgttgagttccacagtgaccctttctagataggtttggttttggacagtgagtggtcagtccttggccccgaattgtgttaatttgctccttgatcacttgagatggagaaataccctggagttctaatgctcattcaagtgacaagaaaggtagcctgtcacgaaagaactcaggattctacacagacactgaggaatgtggcggattggacccatcacactgtgaagagagagcatttctgtgctgagctgtttcataattttgattatatttcccttgtattgcagaagagtaaaaaagtttatatgcattttctcccattataaaactaaaaactttctggaaaatcttaattctgaactggcattttatttgtcttgattacaatgattcaataaagctagccttaactt

SEQ ID NO: 2424 - protein, 421 aa, Rattus norvegicus
  ref <308>: DATABASE ACCESSION NUMBER: SWISS-Prot / P08503
  ref <309>: DATABASE ENTRY DATE: 2002-06-15
MAAALRRGYKVLRSVSHFECRAQHTKPSLKQEPGLGFSFELTEQQKEFQTIARKFAREEIIPVAPDYDKSGEYPFPLIKRAWELGLINTHIPESCGGLGLGTFDACLITEELAYGCTGVQTAIEANSLGQMPVIIAGNDQQKKKYLGRMTEQPMMCAYCVTEPSAGSDVAGIKTKAEKKGDEYVINGQKMWITNGGKANWYFVLTRSNPDPKVPASKAFTGFIVEADTPGIHIGKKELNMGQRCSDTRGITFEDVRVPKENVLIGEGAGFKIAMGAFDRTRPTVAAGAVGLAQRALDEATKYALDRKTFGKLLVEHQGVSFLLAEMAMKVELARLSYQRAAWEVDSGRRNTYFASIAKAFAGDIANQLATDAVQIFGGYGFNTEYPVEKLMRDAKIYQIYEGTAQIQRLIIAREHIEKYKN

SEQ ID NO: 2425 - DNA, 2019 bp, Homo sapiens
  ref <308>: DATABASE ACCESSION NUMBER: EMBL / M16827
  ref <309>: DATABASE ENTRY DATE: 2000-03-04
ccggaacggagagccaacatggcagcggggttcgggcgatgctgcagggtcctgagaagtatttctcgttttcattggagatcacagcatacaaaagccaatcgacaacgtgaaccaggattaggatttagttttgagttcaccgaacagcagaaagaatttcaagctactgctcgtaaatttgccagagaggaaatcatcccagtggctgcagaatatgataaaactggtgaatatccagtccccctaattagaagagcctgggaacttggtttaatgaacacacacattccagagaactgtggaggtcttggacttggaacttttgatgcttgtttaattagtgaagaattggcttatggatgtacaggggttcagactgctattgaaggaaattctttggggcaaatgcctattattattgctggaaatgatcaacaaaagaagaagtatttggggagaatgactgaggagccattgatgtgtgcttattgtgtaacagaacctggagcaggctctgatgtagctggtataaagaccaaagcagaaaagaaaggagatgagtatattattaatggtcagaagatgtggataaccaacggaggaaaagctaattggtattttttattggcacgttctgatccagatcctaaagctcctgctaataaagcctttactggattcattgtggaagcagataccccaggaattcagattgggagaaaggaattaaacatgggccagcgatgttcagatactagaggaattgtcttcgaagatgtgaaagtgcctaaagaaaatgttttaattggtgacggagctggtttcaaagttgcaatgggagcttttgataaaaccagacctgtagtagctgctggtgctgttggattagcacaaagagctttggatgaagctaccaagtatgccctggaaaggaaaactttcggaaagctacttgtagagcaccaagcaatatcatttatgctggctgaaatggcaatgaaagttgaactagctagaatgagttaccagagagcagcttgggaggttgattctggtcgtcgaaatacctattatgcttctattgcaaaggcatttgctggagatattgcaaatcagttagctactgatgctgtgcagatacttggaggcaatggatttaatacagaatatcctgtagaaaaactaatgagggatgccaaaatctatcagatttatgaaggtacttcacaaattcaaagacttattgtagcccgtgaacacattgacaagtacaaaaattaaaaaaattactgtagaaatattgaataactagaacacaagccactgtttcagctccagaaaaaagaaagggctttaacgttttttccagtgaaaacaaatcctcttatattaaatctaagcaactgcttattatagtagtttatacttttgcttaactctgttatgtctcttaagcaggtttggtttttattaaaatgatgtgttttctttagtaccactttacttgaattacattaacctagaaaactacataggttattttgatctcttaagattaatgtagcagaaatttcttggaattttatttttgtaatgacagaaaagtgggcttagaaagtattcaagatgttacaaaatttacatttagaaaatattgtagtatttgaatactgtcaacttgacagtaactttgtagacttaatggtattattaaagttctttttattgcagtttggaaagcatttgtgaaactttctgtttggcacagaaacagtcaaaattttgacattcatattctcctattttacagctacaagaactttcttgaaaatcttatttaattctgagcccatatttcacttaccttatttaaaataaatcaataaagcttgccttaaattatttttatatgactgttggtctctaggtagcctttggtctattgtacacaatctcatttcatatgtttgcattttggcaaagaacttaataaaattgttcagtgcttattatcat

SEQ ID NO: 2426 - protein, 421 aa, Homo sapiens
  ref <308>: DATABASE ACCESSION NUMBER: SWISS-Prot / P11310
  ref <309>: DATABASE ENTRY DATE: 2002-06-15
MAAGFGRCCRVLRSISRFHWRSQHTKANRQREPGLGFSFEFTEQQKEFQATARKFAREEIIPVAAEYDKTGEYPVPLIRRAWELGLMNTHIPENCGGLGLGTFDACLISEELAYGCTGVQTAIEGNSLGQMPIIIAGNDQQKKKYLGRMTEEPLMCAYCVTEPGAGSDVAGIKTKAEKKGDEYIINGQKMWITNGGKANWYFLLARSDPDPKAPANKAFTGFIVEADTPGIQIGRKELNMGQRCSDTRGIVFEDVKVPKENVLIGDGAGFKVAMGAFDKTRPVVAAGAVGLAQRALDEATKYALERKTFGKLLVEHQAISFMLAEMAMKVELARMSYQRAAWEVDSGRRNTYYASIAKAFAGDIANQLATDAVQILGGNGFNTEYPVEKLMRDAKIYQIYEGTSQIQRLIVAREHIDKYKN

SEQ ID NO: 2427 - DNA, 1639 bp, Rattus norvegicus
  ref <308>: DATABASE ACCESSION NUMBER: EMBL / J02827
  ref <309>: DATABASE ENTRY DATE: 2000-03-04
tccgcggccaagatctggaggccgagccgtggcctgcgccaggctgccctcttgctgttggggcgacctggggctcggggcttggctagattccaccccagcaggcagcagcaacagcagttcccatccctggatgacaagccccagttcccaggggcctctgcagagtttgtagacaagcttgagttcatccagcccaatgtcatctccggcatccccatctaccgcgtcatggaccgacagggccagatcatcaaccccagtgaagatccccacctgccccaggaggaggtcctgaagttgtacaggagcatgacgctgctcaacaccatggaccgcattctctatgagtcccagcgacagggccggatctccttctacatgaccaactatggcgaggaggggacacatgtggggagtgccgctgccctggagcgaacggacctggtgtttggccagtaccgggaggcaggtgtgctcatgtaccgggactacccgctggagctgttcatggcccagtgctacggcaacgtgagtgacccaggcaagggacgccagatgcccgttcactacggctgcaaggagcgtcacttcgtcaccatttcctctccactggctacgcagatccctcaggcggtaggggcagcctatgctgccaagcgggccaatgccaatcagatcgtgatctgttactttggcgagggggcagccagtgaaggggatgcccacgccggtttcaattttgctgccaccttggagtgtcctatcatcttcttctgccggaacaatggctatgccatctccacaccaacctctgagcagtaccgtggggatggcatagcggctcggggccctgggtatggcatcatgtcaatccgtgtggacggcaacgatgtgtttgcggtgtacaatgccactaaggaggcccgacggcgggctgtggctgagaaccagcccttcctcattgaggccatgacctacaggatcgggcaccacagcaccagtgacgacagctctgcgtaccgttcggtggatgaggtcaattactgggacaagcaggaccacccgatctcgagactgaggcagtacctgctgaaccagggttggtgggatgaggaacaggagaaggcctggcggaagcagtcacgaaagaaggtgatggaggcctttgaacaggctgagcggaagctaaagcccaacccaagcctcctcttctccgatgtgtaccaggagatgcctgcccagctgcgcaggcagcaggagtccctggctcggcacctgcagacctacggggagcactaccccctggaccactttgacaagtgaggccctaaccaccacaaggtgtcctgctctgagtggagctggggggcggcaggacgctgccccccgctgctaaccagtgctgctgacgtgctgagcagccagtgtggcacgcactgcggctcccccaggctacttcactggggcaccacatttgcagccattgctgcagctccatcactcccttcacctgttacagtgccttttaggggtggggaggaaccagggccagggcagaccctttggcagggtggccctggatttgctcagagaaatagctgattggcagagtaagtaaaccacagctctgcctttg

SEQ ID NO: 2428 - protein, 441 aa, Rattus norvegicus
  ref <308>: DATABASE ACCESSION NUMBER: SWISS-Prot / P11960
  ref <309>: DATABASE ENTRY DATE: 2002-06-15
SAAKIWRPSRGLRQAALLLLGRPGARGLARFHPSRQQQQQFPSLDDKPQFPGASAEFVDKLEFIQPNVISGIPIYRVMDRQGQIINPSEDPHLPQEEVLKLYRSMTLLNTMDRILYESQRQGRISFYMTNYGEEGTHVGSAAALERTDLVFGQYREAGVLMYRDYPLELFMAQCYGNVSDPGKGRQMPVHYGCKERHFVTISSPLATQIPQAVGAAYAAKRANANQIVICYFGEGAASEGDAHAGFNFAATLECPIIFFCRNNGYAISTPTSEQYRGDGIAARGPGYGIMSIRVDGNDVFAVYNATKEARRRAVAENQPFLIEAMTYRIGHHSTSDDSSAYRSVDEVNYWDKQDHPISRLRQYLLNQGWWDEEQEKAWRKQSRKKVMEAFEQAERKLKPNPSLLFSDVYQEMPAQLRRQQESLARHLQTYGEHYPLDHFDK

SEQ ID NO: 2429 - DNA, 1530 bp, Homo sapiens
  ref <308>: DATABASE ACCESSION NUMBER: EMBL / M22221
  ref <309>: DATABASE ENTRY DATE: 2000-03-04
atccagcccaacgtcatctctggaatccccatctaccgcgtcatggaccggcaaggccagatcatcaaccccagcgaggacccccacctgccgaaggagaaggtgctgaagctctacaagagcatgacactgcttaacaccatggaccgcatcctctatgagtctcagcggcagggccggatctccttctacatgaccaactatggtgaggagggcacgcacgtggggagtgccgccgccctggacaacacggacctggtgtttggccagtaccgggaggcaggtgtgctgatgtatcgggactaccccctggaactattcatggcccagtgctatggcaacatcagtgacttgggcaaggggcgccagatgcctgtccactacggctgcaaggaacgccacttcgtcactatctcctctccactggccacgcagatccctcaggcggtgggggcggcgtacgcagccaagcgggccaatgccaacagggtcgtcatctgttacttcggcgagggggcagccagtgagggggacgcccatgacggcttcaacttcgctgccacacttgagtgccccatcatcttcttctgccggaacaatggctacgccatctccacgcccacctctgagcagtatcgcggcgatggcattgcagcacgaggccccgggtatggcatcatgtcaatccgcgtggatggtaatgatgtgtttgccgtatacaacgccactaaagaggcccgacggcgggctgtggcagagaaccagccctttctcatcgaggccatgacctacaggatcgggcaccacagcaccagtgacgacagttcagcgtaccgctcggtggatgaggtcaattactgggataaacaggaccaccccatctcccggctgcggcactatctgctgagccaaggctggtgggatgaggagcaggagaaggcctggaggaagcagtcccgcaggaaggtgatggaggcctttgagcaggccgagcggaagcccaaacccaaccccaacctgctcttctcagacgtgtatcaggagatgcccgcccagctccgcaagcagcaggagtctctggcccgccacctgcagacctacggggagcactacccactggatcacttcgataagtgagacctgctcagcccacccccacccatcctcagctaccccgagaggtagccccactctaaggggagcagggggacctgacagcacaccactgtcttccccagtcagctccctctaaaatactcagcggccagggcggctgccactcttcacccctgctcctcccggctgttacattgtcaggggacagcatctgcagcagttgctgaggctccgtcagccccctcttcacctgttgttacagtgccttctcccaggggctgggtgagggcacattcaggactagaagcccctctgggcatggggtggacatggcaggtcagcctgtggaacttgcgcaggtgcgagtggccagcagaggtcacgaataaactgcatctctgcgcctggctctct

SEQ ID NO: 2430 - protein, 445 aa, Homo sapiens
  ref <308>: DATABASE ACCESSION NUMBER: SWISS-Prot / P12694
  ref <309>: DATABASE ENTRY DATE: 2002-06-15
MAVAIAAARVWRLNRGLSQAALLLLRQPGARGLARSHPPRQQQQFSSLDDKPQFPGASAEFIDKLEFIQPNVISGIPIYRVMDRQGQIINPSEDPHLPKEKVLKLYKSMTLLNTMDRILYESQRQGRISFYMTNYGEEGTHVGSAAALDNTDLVFGQYREAGVLMYRDYPLELFMAQCYGNISDLGKGRQMPVHYGCKERHFVTISSPLATQIPQAVGAAYAAKRANANRVVICYFGEGAASEGDAHAGFNFAATLECPIIFFCRNNGYAISTPTSEQYRGDGIAARGPGYGIMSIRVDGNDVFAVYNATKEARRRAVAENQPFLIEAMTYRIGHHSTSDDSSAYRSVDEVNYWDKQDHPISRLRHYLLSQGWWDEEQEKAWRKQSRRKVMEAFEQAERKPKPNPNLLFSDVYQEMPAQLRKQQESLARHLQTYGEHYPLDHFDK

SEQ ID NO: 2431 - DNA, 1639 bp, Rattus norvegicus; identical to SEQ ID NO: 2427
  ref <308>: DATABASE ACCESSION NUMBER: EMBL / J02827
  ref <309>: DATABASE ENTRY DATE: 2000-03-04

SEQ ID NO: 2432 - protein, 441 aa, Rattus norvegicus; identical to SEQ ID NO: 2428
  ref <308>: DATABASE ACCESSION NUMBER: SWISS-Prot / P11960
  ref <309>: DATABASE ENTRY DATE: 2002-06-15

SEQ ID NO: 2433 - DNA, 1530 bp, Homo sapiens; identical to SEQ ID NO: 2429
  ref <308>: DATABASE ACCESSION NUMBER: EMBL / M22221
  ref <309>: DATABASE ENTRY DATE: 2000-03-04

SEQ ID NO: 2434 - protein, 445 aa, Homo sapiens; identical to SEQ ID NO: 2430
  ref <308>: DATABASE ACCESSION NUMBER: SWISS-Prot / P12694
  ref <309>: DATABASE ENTRY DATE: 2002-06-15

SEQ ID NO: 2435 - DNA, 2144 bp, Rattus norvegicus
  ref <308>: DATABASE ACCESSION NUMBER: EMBL / J02844
  ref <309>: DATABASE ENTRY DATE: 2000-03-04
gggagtcgtggttcccatggtacataatggatacggctttttctaccacatcagagatgacaggtttgtggtgacatgttcatcctggaggtcatgtcttgagactgatgcagaaaagttagtggagatgatttttcatgctttccacgatatgatacatctgatgaacacggctcatctttagagactcagagacatacaggtcacagaaactgggtacagagaatgggatggtgatacgacatggaaggaatgttgacttaaaggaaacctgttaatgcagggattagagagggatgcactctagatttattctaccttaaagccttctgttgcaacagcaatgcaaactcagacatagtgaatagaactatgcaatgtcttaagcctcaacaatgcacatctgtatattttaacaatacaaatcctactctaatgttaaaatatttttgttggcacatgtgtaggttgcaagtcctctgtgactataccatggaaaatcaattggctaagtcaattgaagaacgaacattccagtaccaggactctcttccgcccttgcccgttccttcgcttgaagaatcactgaagaagtaccttgagtcagtgaagccatttgcaaatgaagacgaatacaagaaaactgaagaaatagttcaaaagtttcaagatggagttggcaagacattgcatcagaagttacttgaaagggctaaaggaaaaagaaactggctggaagagtggtggctcaatgtcgcctacttggatgtgcgtattccatcacaactgaacgtgaactttgtgggtccgtctccccactttgaacactactggcctgcaagggaaggcactcagttggaaagaggaagcatactactgtggcacaacttgaactactggcagctgctaagaagagaaaaattgcctgtacataaatctggaaatactcctctagacatgaaccaattccggatgctgttttctacctgcaaggttccgggaatcactagagattcgattatgaattattttaagactgagagcgaggggcattgtccgacccacattgccgtgctgtgtcgaggcagagcgtttgtcttcgatgtcctccatgacggttgtttgatcaccccaccagaacttctcagacaactgacatacatctaccagaaatgctggaatgaacctgttgggcccagtatagcggcattaaccagtgaggagcgaactcggtgggcgaaggcaagagaatatctgattggtcttgatccagagaacttgactttattagaaaaaattcaatccagtttatttgtgtattccatagaagacaccagtccacatgcaaccccagaaaatttttctcaggtctttgaaatgcttcttggtggagatccagcagtgcgctggggtgacaagtcctataatctgatttcctttgctaacggaatatttggctgtagctgtgatcatgctccttatgatgcaatgtttatggtgaacattgctcactatgttgatgagaagctcctagagacggaagggagatggaagggttcagaaaaagtccgggatataccgttgccagaggagctggctttcactgtggatgagaagatactgaatgacgtctaccaagccaaagcccaacacctcaaagcagcatctgatttacagatagcagcatctaccttcacatcttttggcaaaaagctcactaagaaggaggcccttcaccctgacacctttattcagctcgctcttcagctcgcctactacagacttcatggacgccccggttgctgctatgaaacagctatgacaagatacttttaccatggccgaacagagactgtgcgatcttgtacagtggaggccgtcagtggtgccagtccatgcaggatccttctgccagtctccttgaacgtcagcaaaagatgttagacgcttttgcaaagcataacaagatgatgagagattgttcccatggaaaaggatttgaccgtcaccttttaggccttttgctcatagcaaaagaggaaggcctccctgttccagaactgtttgaggatccacttttctccagaagtggaggaggtgggaattttgtgctgtcaacaagtctggttggttttaatacttac

SEQ ID NO: 2436 - protein, 612 aa, Rattus norvegicus
  ref <308>: DATABASE ACCESSION NUMBER: SWISS-Prot / P11466
  ref <309>: DATABASE ENTRY DATE: 2001-10-16
MENQLAKSIEERTFQYQDSLPPLPVPSLEESLKKYLESVKPFANEDEYKKTEEIVQKFQDGVGKTLHQKLLERAKGKRNWLEEWWLNVAYLDVRIPSQLNVNFVGPSPHFEHYWPAREGTQLERGSILLWHNLNYWQLLRREKLPVHKSGNTPLDMNQFRMLFSTCKVPGITRDSIMNYFKTESEGHCPTHIAVLCRGRAFVFDVLHDGCLITPPELLRQLTYIYQKCWNEPVGPSIAALTSEERTRWAKAREYLIGLDPENLTLLEKIQSSLFVYSIEDTSPHATPENFSQVFEMLLGGDPAVRWGDKSYNLISFANGIFGCSCDHAPYDAMLMVNIAHYVDEKLLETEGRWKGSEKVRDIPLPEELAFTVDEKILNDVYQAKAQHLKAASDLQIAASTFTSFGKKLTKKEALHPDTFIQLALQLAYYRLHGRPGCCYETAMTRYFYHGRTETVRSCTVEAVRWCQSMQDPSASLLERQQKMLDAFAKHNKMMRDCSHGKGFDRHLLGLLLIAKEEGLPVPELFEDPLFSRSGGGGNFVLSTSLVGYLRIQGVVVPMVHNGYGFFYHIRDDRFVVTCSSWRSCLETDAEKLVEMIFHAFHDMIHLMNTAHL

SEQ ID NO: 2437 - DNA, 2074 bp, Homo sapiens
  ref <308>: DATABASE ACCESSION NUMBER: EMBL / AF168793
  ref <309>: DATABASE ENTRY DATE: 1999-10-20
ggcgcgggcggtgaggacggacagtcaccgacttagtccagttccctgtcatctcaaaacaattgttgcagcaggctcctggcagtctcaagcagttcatcttcttggtgtactggtttcctattgtgattttatcatggaaaatcaattggctaaatcaactgaagaacgaacatttcagtaccaggattctcttccatcactgcctgttccttcacttgaagaatcattaaaaaaataccttgaatcagtgaaaccatttgcaaatcaagaagaatataagaaaactgaagaaatagttcaaaaatttcaaagtgggattggagaaaaattgcaccagaaattgcttgaaagagcaaaaggaaaaagaaattggctggaagagtggtggctgaatgttgcctatctggatgttcgtataccatcacaattgaatgtcaactttgcgggtcctgcagctcattttgaacactactggcctccaaaggaagggactcaattagaaagaggaagtataactctttggcataacttgaactactggcagctattaagaaaagaaaagttgcctgttcataaagttggaaatactcctctagatatgaatcaattccgaatgctattttctacctgcaaggttccaggaattactagagactccattatgaattattttaggactgagagtgaagggcgttccccaaaccacattgtagtgctgtgtcgaggccgagcttttgtctttgatgtaatacatgaaggatgtttggtcaccccgccagagcttctcagacaactgacatatatccacaagaagtgccatagtgaacctgatggacctgggattgcagcattaactagtgaggagcgaactcgatgggctaaggcacgagaatatctgattggtcttgatccagagaacttggctttgttagaaaaaattcagagtagtttactggtatattccatggaggatagcagtccacatgtaacaccagaggattattctgagattattgcagccatccttattggagatccaacagtacgctggggtgacaaatcctataacttgatttccttttctaatggagtatttggctgtaattgtgatcatgctccttttgatgcaatgattatggtgaacatcagttattatgtggatgagaaaatttttcagaatgaaggaagatggaagggttcagagaaggtacgagatataccacttccagaagagctcattttcattgtggatgagaaagttttaaatgacatcaaccaagctaaagcccagtatctcagggaggcatctgatctacagattgcggcttatgcctttacatcttttggcaaaaagctaaccaagaacaagatgcttcacccggatacgtttattcagcttgcacttcagctggcctattacagacttcatggacaccctggttgttgctatgaaacagctatgacaagacatttttatcatggccgtacagagactatgcgatcatgcacagttgaagcagtgaggtggtgccagtccatgcaggatccttctgtcaatcttcgtgagcggcagcaaaagatgttacaagcttttgcaaagcataataaaatgatgaaagattgttcagctggaaaaggatttgatcgtcaccttttaggtctcttactcatagcaaaagaggaaggtcttcctgttccagaactctttacggacccacttttttccaaaagcggaggaggtggaaattttgttctctcaacaagtctggttggctatttacgagtccagggagtggtagttcccatggtacacaatggttatggatttttctaccatatcagagatgacaggtttgttgtggcctgttcagcctggaaatcctgtcccgagactgatgcggaaaagctagttcagctgactttttgtgcttttcatgatatgatacagctgatgaactctactcatctttagagatgaatcatctattaagcacttaccaaaacatatcattaaactgagtgctgggagtgagttggtaatatgagatgggaaggaatgttgacttgctaa

SEQ ID NO: 2438 - protein, 612 aa, Homo sapiens [sequence omitted]

SEQ ID NO: 2439 - DNA, 948 bp, Rattus norvegicus
  ref <308>: DATABASE ACCESSION NUMBER: EMBL / J02962
  ref <309>: DATABASE ENTRY DATE: 2000-03-04
aacagctagcggagcggcaggaggagcactaaccaggaaaatggcagacggcttctcacttaatgatgccttagctggctctggaaacccaaaccctcgaggatggcctggtgcatgggggaaccagcctggggcaggaggctacccaggggcctcctatcctggggcctacccaggacaggctcctccagggggttatcctggacaggctcctcctagtgcctatccgggcccaactggccctagtgcttatcctggcccaactgcccctggagcttatcctggcccaactgcccccggagccttcccagggcaacctgggggacctggagcctaccccagtgctcctggggcctaccccagtgctcctggggcctatcctgctactggcccctttggtgccccgactggaccactgacagtgccctacgatatgcccttgcctggaggagtcatgcctcgcatgctgatcacaatcataggcacagtgaagcccaacgcaaacagtatcactctgaatttcaagaaagggaacgacatcgccttccactttaacccccgcttcaatgagaacaacagaagagtcatcgtgtgcaacacgaagcaggacaataactggggaagggaagaaagacagtcagctttcccctttgagagcggcaaaccattcaaaatacaggtcctggttgaagccgaccacttcaaggttgcggtcaatgatgttcatctgttgcagtataaccatcggatgaagaacctcagggaaatcagccaactggggatcattggtgacataaccctcaccagcgcttcccacgccatgatctaagccagaaggggtgggccggcaccagaactgccctgtgtgttatgagcgggaaactttgcatttctctctccttatacttcttgtaagacatccatttaataaagtctcgtgctgagaga

SEQ ID NO: 2440 - protein, 261 aa, Rattus norvegicus
  ref <308>: DATABASE ACCESSION NUMBER: SWISS-Prot / P08699
  ref <309>: DATABASE ENTRY DATE: 1997-11-01
ADGFSLNDALAGSGNPNPQGWPGAWGNQPGAGGYPGASYPGAYPGQAPPGGYPGQAPPSAYPGPTGPSAYPGPTAPGAYPGPTAPGAFPGQPGGPGAYPSAPGAYPSAPGAYPATGPFGAPTGPLTVPYDMPLPGGVMPRMLITIIGTVKPNANSITLNFKKGNDIAFHFNPRFNENNRRVIVCNTKQDNNWGREERQSAFPFESGKPFKIQVLVEADHFKVAVNDVHLLQYNHRMKNLREISQLGIIGDITLTSASHAMI

SEQ ID NO: 2441 - DNA, 914 bp, Homo sapiens
  ref <308>: DATABASE ACCESSION NUMBER: EMBL / M57710
  ref <309>: DATABASE ENTRY DATE: 2000-03-04
ccagccaacgagcggaaaatggcagacaatttttcgctccatgatgcgttatctgggtctggaaacccaaaccctcaaggatggcctggcgcatgggggaaccagcctgctggggcagggggctacccaggggcttcctatcctggggcctaccccgggcaggcacccccaggggcttatcctggacaggcacctccaggcgcctaccatggagcacctggagcttatcccggagcacctgcacctggagtctacccagggccacccagcggccctggggcctacccatcttctggacagccaagtgcccccggagcctaccctgccactggcccctatggcgcccctgctgggccactgattgtgccttataacctgcctttgcctgggggagtggtgcctcgcatgctgataacaattctgggcacggtgaagcccaatgcaaacagaattgctttagatttccaaagagggaatgatgttgccttccactttaacccacgcttcaatgagaacaacaggagagtcattgtttgcaatacaaagctggataataactggggaagggaagaaagacagtcggttttcccatttgaaagtgggaaaccattcaaaatacaagtactggttgaacctgaccacttcaaggttgcagtgaatgatgctcacttgttgcagtacaatcatcgggttaaaaaactcaatgaaatcagcaaactgggaatttctggtgacatagacctcaccagtgcttcatataccatgatataatctgaaaggggcagattaaaaaaaaaaaaaaagaatctaaaccttacatgtgtaaaggtttcatgttcactgtgagtgaaaatttttacattcatcaatatccctcttgtaagtcatctacttaataaatattacagtgaaag

SEQ ID NO: 2442 - protein, 249 aa, Homo sapiens
  ref <308>: DATABASE ACCESSION NUMBER: SWISS-Prot / P17931
  ref <309>: DATABASE ENTRY DATE: 2002-06-15
ADNFSLHDALSGSGNPNPQGWPGAWGNQPAGAGGYPGASYPGAYPGQAPPGAYPGQAPPGAYHGAPGAYPGAPAPGVYPGPPSGPGAYPSSGQPSAPGAYPATGPYGAPAGPLIVPYNLPLPGGVVPRMLITILGTVKPNANRIALDFQRGNDVAFHFNPRFNENNRRVIVCNTKLDNNWGREERQSVFPFESGKPFKIQVLVEPDHFKVAVNDAHLLQYNHRVKKLNEISKLGISGDIDLTSASYTMI

SEQ ID NO: 2443 - DNA, 1671 bp, Rattus norvegicus
  ref <308>: DATABASE ACCESSION NUMBER: EMBL / J03179
  ref <309>: DATABASE ENTRY DATE: 2000-03-04
cctttctttgcgagaagtgcaaaattggctagagccagagtctcgcccacctggtacagaaggagcgcgcgcctgtgtcccttggggacccacagttgcaaagagacagctgcttgatttggtcacccactcgcccagactataggagcctcccgggacactcttgagttgcacctttctgcagagcagactgtttgagcccccgcagtgctcgtaggatttgaagcgttctgatactggaggcttgctcgccgcgctcgcccgactctgggacacatttgtccgagccacaggagtgtgcgggtgactgacatatcatctcttcgactctccatgagctcatgaacctgggagcaggtgcccggaaatggcgcggcctctgagcgacaggaccccgggccccctgctgctgggtggcccggctggggccccccctggcgggggagcgctgcttgggctgaggagccttctgcagggaaacagcaagcccaaagaaccggccagctgtctcctgaaggaaaaggagcgcaaggcaactctgccctcagcccccgtcccgggacccgtcctggaaacggcgggcccagcggatgccccaactggggcggttagtggcggtgggtcccctcgggggcgctcagggcctgtggctggcccgagtctttttgcgccgctgctgtgggaacgcactttgcctttcggggacgtggaatacgtggacctggacgccttcttgctggagcacgggctaccgccgagcccgccgccccccgggggcctgtcgccggcaccctctccagcgcgcactcccgcgccctcccccgggcccggctcttgcagctcctcttccccccgctcctcgcccgggcacgcccccgcgcgggccactctgggagccgccggcggccaccgcgcaggcttgacctctagggacacacccagtcctgtggacccagacaccgtggaggtgctaatgacctttgaacctgatccggctgatcttgccctgtcaagcattccaggccatgagacttttgaccctcggaggcaccgcttctcagaggaggaattgaagcctcagccaatcatgaagaaggcaaggaaagtccaggtgcccgaggaacagaaggatgagaagtactggagccggaggtacaagaacaatgaagcagccaagaggtcgagagacgcaagaagactcaaggagaaccagatatctgtgcgggcagccttcctggagaaggaaaacgccctattgcggcaggaggtggtggctgtgcggcaggagctgtcccactaccgtgctgtgctttcacgctaccaggcccaacacgggacactgtgaggccacttccaccctgccagggcagagtcctgttccttgttcagacttacacctgacaccccccttcctccttgtcccatggccaatggtctggccagctaggtgcccaggaacgtcatgatgcagacaaatacatttatatttttaagaaaaagctagccttcccccacctcccttgtgggggtggggagggtcctgtgtgcacttttagcatgtcgaggaacccatccatccaaccgcctccatcaacacaatcctgaataaatcttgagaacccaaaaaaaaaaaaaaaaaaaaaaaaaaaaaaaaaaaaaaaaaaagaattc

SEQ ID NO: 2444 - protein, 325 aa, Rattus norvegicus
  ref <308>: DATABASE ACCESSION NUMBER: SWISS-Prot / P16443
  ref <309>: DATABASE ENTRY DATE: 2000-05-30
MARPLSDRTPGPLLLGGPAGAPPGGGALLGLRSLLQGNSKPKEPASCLLKEKERKATLPSAPVPGPVLETAGPADAPTGAVSGGGSPRGRSGPVAGPSLFAPLLWERTLPFGDVEYVDLDAFLLEHGLPPSPPPPGGLSPAPSPARTPAPSPGPGSCSSSSPRSSPGHAPARATLGAAGGHRAGLTSRDTPSPVDPDTVEVLMTFEPDPADLALSSIPGHETFDPRRHRFSEEELKPQPIMKKARKVQVPEEQKDEKYWSRRYKNNEAAKRSRDARRLKENQISVRAAFLEKENALLRQEVVAVRQELSHYRAVLSRYQAQHGTL

SEQ ID NO: 2445 - DNA, 1391 bp, Homo sapiens
  ref <308>: DATABASE ACCESSION NUMBER: EMBL / D28468
  ref <309>: DATABASE ENTRY DATE: 2001-11-15
cccccccccccggtggcccgtcgccggagccgtcgcccgcgcggacgcccgcaccctccccagggccgggttcgtgcggctcggcttccccccgctcctctcctgggcacgcccccgcccgggctgccctcgggaccgccagcggccaccgcgcaggcctgacctctcgggacacacccagccctgtggacccagacaccgtggaggtgttgatgacctttgaacccgacccagctgatcttgccctatcaagcattcctggccacgagacctttgaccctcgaagacatcgcttctcagaagaggaacttaagccccagccaatcatgaagaaggcaaaaaaaatccaggtgccggaggagcagaaggatgagaaatactggagccggcggtacaagaacaacgaggcagccaagcggtcccgtgacgcccggcggctcaaggagaaccagatatcggtgcgggcggccttcctggagaaggagaacgccctgctgcggcaggaagttgtggccgtgcgccaggagctgtcccactaccgcgccgtgctgtcccgataccaggcccagcacggggccctgtgaggctgccccacatccccacctggcggagctctcctccgccttgctgagacttacgccctgttcccttcctgccctgtggcccacgggccggccagctgggtgccccagggacgtgataatgcagataaatacatttatatttttaagaaaaagcgagcctcccccctcccttgcgggggcggggagggttctctgtgtgtgtccccggcacgtcagggaccctatcctcccaccgcctccgttaacacgatcctgaataaatcttgagaaccccagagccagctgttgtggaagaagagggcagctccctggcatactggctgcagcccgtgggcagctccgggctgtcgtccatagagggcaggcgctgctggaagtgctggagtctgagtcctcccgcgggctgtcggatggaggaagggcagaaggtctgagaggaatgaagcgactgcctttattgcatagaccttttcaattgctttttagattggggacggaggacgcgcatgagacgaacaggggatatgaatttccccgcccccacccgcggggagaggaacattagtgcaaatcctagcgccggccccggggaacctgcccctcctgggctgattggccagctaaatggaggcaccggagtggatggggcgaggctgcgggccctgaccggccgactcactgaggcctaccccagccagtacattccaggtcctgtcattgggcgacgcgtaaaatagactccgccctcagccatcctggccgggtaggagcaggtggcaagcgtcaggactgagccctgccccgtaa

SEQ ID NO: 2446 - protein, 325 aa, Homo sapiens
  ref <308>: DATABASE ACCESSION NUMBER: SWISS-Prot / Q10586
  ref <309>: DATABASE ENTRY DATE: 2001-10-16
MARPVSDRTPAPLLLGGPAGTPPGGGALLGLRSLLQGTSKPKEPASCLLKEKERKAALPAATTPGPGLETAGPADAPAGAVVGGGSPRGRPGPVPAPGLLAPLLWERTLPFGDVEYVDLDAFLLEHGLPPSPPPPGGPSPEPSPARTPAPSPGPGSCGSASPRSSPGHAPARAALGTASGHRAGLTSRDTPSPVDPDTVEVLMTFEPDPADLALSSIPGHETFDPRRHRFSEEELKPQPIMKKARKIQVPEEQKDEKYWSRRYKNNEAAKRSRDARRLKENQISVRAAFLEKENALLRQEVVAVRQELSHYRAVLSRYQAQHGAL

SEQ ID NO: 2447 - DNA, 1671 bp, Rattus norvegicus; identical to SEQ ID NO: 2443
  ref <308>: DATABASE ACCESSION NUMBER: EMBL / J03179
  ref <309>: DATABASE ENTRY DATE: 2000-03-04

SEQ ID NO: 2448 - protein, 325 aa, Rattus norvegicus; identical to SEQ ID NO: 2444
  ref <308>: DATABASE ACCESSION NUMBER: SWISS-Prot / P16443
  ref <309>: DATABASE ENTRY DATE: 2000-05-30

SEQ ID NO: 2449 - DNA, 1391 bp, Homo sapiens; identical to SEQ ID NO: 2445
  ref <308>: DATABASE ACCESSION NUMBER: EMBL / D28468
  ref <309>: DATABASE ENTRY DATE: 2001-11-15

SEQ ID NO: 2450 - protein, 325 aa, Homo sapiens; identical to SEQ ID NO: 2446
  ref <308>: DATABASE ACCESSION NUMBER: SWISS-Prot / Q10586
  ref <309>: DATABASE ENTRY DATE: 2001-10-16

SEQ ID NO: 2451 - DNA, 2052 bp, Rattus norvegicus
  ref <308>: DATABASE ACCESSION NUMBER: EMBL / J03190
  ref <309>: DATABASE ENTRY DATE: 2000-03-04
cgggacactttgcagacatggagactgtcgttcgcagatgcccattcttatcccgagtccctcaggcctttctgcagaaggcagggaaatctctgctgttctatgctcaaaactgccccaagatgatggaagtcggggccaagccggctcctcggaccgtgtccacttcagcagcacagtgccagcaggtcaaagaaacccctccagccaatgagaaagagaaaactgccaaagccgcagtccagcaggctcctgacgagtcccagatggcacagactccagacggcacacagctcccgcctggacacccgtcaccctctacaagccagagctctgggagcaagtgccctttcctggcagcacagctagccagacgggcagcagcgtcttccgcaaggccagtctggagcttcaggaggacgtggcaggaaatgcatgctgtgaggacagaggttgctcaaagcccagtgctccccagcttggtcaatgcaaaaagggatggagaaggtccaagcccactgctgaagaacttccaggacatcatgagaaagcaaaggccagaaagagtgtctcatcttcttcaggataacttgcccaaagtcgtttccacttttcaatatgatcatttctttgagaagaaaattgacgagaaaaaaaatgaccacacctaccgagtttttaaaactgtgaaccggagagcacagatctttcccatggcagatgactacacggactccctcatcaccaataatcaggtgtcggtctggtcgagtaacgactatctaggcatgagtcgacacccacgggtgtgtggggccgtcatagagactgtgaaacagcatggtgccggtgcaggtggaactagaaatatttctggaacgagcaagttccatgtggaactggagcaggagctggctgacctccacggcaaggacgcggcgctcttgttctcttcctgcttcgtggccaacgactccactctcttcaccctggctaagatgatgccaggctgtgaaatttactctgattccgggaaccatgcctccatgatccaagggattcgcaacagtcgagtgccaaagtatatcttccgccacaatgatgtcaaccatctcagagaactgttgcagagatccgacccctcggtccccaagatcgtagcattcgaaactgtccattcaatggatggagcagtgtgccccctggaagagctgtgtgatgtggcccatgagtttggagcgatcacgtttgtggacgaggtccatgcagtagggctctatggggcttcaggtggagggatcggtgatcgggatggagtcatgccaaaaatggacatcatttctggaacactcggtaaagcgttcggctgtgttggaggatacattgccagcacgagtttgctgatcgacaccgtccggtcctacgctgcgggcttcatcttcaccacctccctgccaccaatgctgctggctggagccctggagtctgtgcggatcctgaagagcaatgagggacgtgcccttcgccgccagcaccagcgcaatgtcaagcttatgaggcagatgctaatggacgctggcctcccagtcatccactgccccagccacatcatccctgtgcgggttgccgatgctgctaaaaacacagaaatctgtgatgagttgatgaccaggcataatatctacgtccaggccattaattacccaacagtgcctcgtggggaggagctcctccggatcgcccccaccccgcaccacacaccgcagatgatgaactacttcctagagaagctgctgctcacgtggaagcgagtcgggctggaactgaagccacattcgtcagctgaatgcaacttctgcaggaggcccttacacttcgaagtgatgagcgagagagagaaagcctatttctcaggcatgagcaagatggtgtctgcccaggcctgactgtgactcagttattcacaaaccccagaccattaccatacccaaatagtagccagaattgtctttagatgtgaagtaaattatatattaaatcttaatctatagt

SEQ ID NO: 2452 - protein, 642 aa, Rattus norvegicus
  ref <308>: DATABASE ACCESSION NUMBER: SWISS-Prot / P13195
  ref <309>: DATABASE ENTRY DATE: 1999-07-15
METVVRRCPFLSRVPQAFLQKAGKSLLFYAQNCPKMMEVGAKPAPRTVSTSAAQCQQVKETPPANEKEKTAKAAVQQAPDESQMAQTPDGTQLPPGHPSPSTSQSSGSKCPFLAAQLARRAAASSARPVWSFRRTWQEMHAVRTEVAQSPVLPSLVNAKRDGEGPSPLLKNFQDIMRKQRPERVSHLLQDNLPKVVSTFQYDHFFEKKIDEKKNDHTYRVFKTVNRRAQIFPMADDYTDSLITNNQVSVWSSNDYLGMSRHPRVCGAVIETVKQHGAGAGGTRNISGTSKFHVELEQELADLHGKDAALLFSSCFVANDSTLFTLAKMMPGCEIYSDSGNHASMIQGIRNSRVPKYIFRHNDVNHLRELLQRSDPSVPKIVAFETVHSMDGAVCPLEELCDVAHEFGAITFVDEVHAVGLYGASGGGIGDRDGVMPKMDIISGTLGKAFGCVGGYIASTSLLIDTVRSYAAGFIFTTSLPPMLLAGALESVRILKSNEGRALRRQHQRNVKLMRQMLMDAGLPVIHCPSHIIPVRVADAAKNTEICDELMTRHNIYVQAINYPTVPRGEELLRIAPTPHHTPQMMNYFLEKLLLTWKRVGLELKPHSSAECNFCRRPLHFEVMSEREKAYFSGMSKMVSAQA

SEQ ID NO: 2453 - DNA, 2146 bp, Homo sapiens
  ref <308>: DATABASE ACCESSION NUMBER: EMBL / X56351
  ref <309>: DATABASE ENTRY DATE: 1991-02-11
agtgcccgcctccttcgccgccgcctctgcagtcctcagcgcagtctttccacaggagccagcatacttcctgaacatggagagtgttgttcgccgctgcccattcttatcccgagtcccccaggcctttctgcagaaagcaggcaaatctctgttgttctatgcccaaaactgccccaagatgatggaagttggggccaagccagcccctcgggcattgtccactgcagcagtacactaccaacagatcaaagaaacccctccggccagtgagaaagacaaaactgctaaggccaaggtccaacagactcctgatggatcccagcagagtccagatggcacacagcttccgtctggacaccccttgcctgccacaagccagggcactgcaagcaaatgccctttcctggcagcacagatgaatcagagaggcagcagtgtcttctgcaaagccagtcttgagcttcaggaggatgtgcaggaaatgaatgccgtgaggaaagaggttgctgaaacctcagcaggccccagtgtggttagtgtgaaaaccgatggaggggatcccagtggactgctgaagaacttccaggacattatgcaaaagcaaagaccagaaagagtgtctcatcttcttcaagataacttgccaaaatctgtttccacttttcagtatgatcgtttctttgagaaaaaaattgatgagaaaaagaatgaccacacctatcgagtttttaaaactgtgaaccggcgagcacacatcttccccatggcagatgactattcagactccctcatcaccaaaaagcaagtgtcagtctggtgcagtaatgactacctaggaatgagtcgccacccacgggtgtgtggggcagttatggacactttgaaacaacatggtgctggggcaggtggtactagaaatatttctggaactagtaaattccatgtggacttagagcgggagctggcagacctccatgggaaagatgccgcactcttgttttcctcgtgctttgtggccaatgactcaaccctcttcaccctggctaagatgatgccaggctgtgagatttactctgattctgggaaccatgcctccatgatccaagggattcgaaacagccgagtgccaaagtacatcttccgccacaatgatgtcagccacctcagagaactgctgcaaagatctgacccctcagtccccaagattgtggcatttgaaactgtccattcaatggatggggcggtgtgcccactggaagagctgtgtgatgtggcccatgagtttggagcaatcaccttcgtggatgaggtccacgcagtggggctttatggggctcgaggcggagggattggggatcgggatggagtcatgccaaaaatggacatcatttctggaacacttggcaaagcctttggttgtgttggagggtacatcgccagcacgagttctctgattgacaccgtacggtcctatgctgctggcttcatcttcaccacctctctgccacccatgctgctggctggagccctggagtctgtgcggatcctgaagagcgctgagggacgggtgcttcgccgccagcaccagcgcaacgtcaaactcatgagacagatgctaatggatgccggcctccctgttgtccactgccccagccacatcatccctgtgcgggttgcagatgctgctaaaaacacagaagtctgtgatgaactaatgagcagacataacatctacgtgcaagcaatcaattaccctacggtgccccggggagaagagctcctacggattgcccccacccctcaccacacaccccagatgatgaactacttccttgagaatctgctagtcacatggaagcaagtggggctggaactgaagcctcattcctcagctgagtgcaacttctgcaggaggccactgcattttgaagtgatgagtgaaagagagaagtcctatttctcaggcttgagcaagttggtatctgctcaggcctgagcatgacctcaattatttcacttaaccccaggccattatcatatccagatggtcttcagagttgtctttatatgtgaattaagttatattaaattttaatctatagtaaaaacatagtcctggaaataaattcttgcttaaatggtg

SEQ ID NO: 2454 - protein, 640 aa, Homo sapiens
  ref <308>: DATABASE ACCESSION NUMBER: SWISS-Prot / P13196
  ref <309>: DATABASE ENTRY DATE: 2002-06-15
MESVVRRCPFLSRVPQAFLQKAGKSLLFYAQNCPKMMEVGAKPAPRALSTAAVHYQQIKETPPASEKDKTAKAKVQQTPDGSQQSPDGTQLPSGHPLPATSQGTASKCPFLAAQMNQRGSSVFCKASLELQEDVQEMNAVRKEVAETSAGPSVVSVKTDGGDPSGLLKNFQDIMQKQRPERVSHLLQDNLPKSVSTFQYDRFFEKKIDEKKNDHTYRVFKTVNRRAHIFPMADDYSDSLITKKQVSVWCSNDYLGMSRHPRVCGAVMDTLKQHGAGAGGTRNISGTSKFHVDLERELADLHGKDAALLFSSCFVANDSTLFTLAKMMPGCEIYSDSGNHASMIQGIRNSRVPKYIFRHNDVSHLRELLQRSDPSVPKIVAFETVHSMDGAVCPLEELCDVAHEFGAITFVDEVHAVGLYGARGGGIGDRDGVMPKMDIISGTLGKAFGCVGGYIASTSSLIDTVRSYAAGFIFTTSLPPMLLAGALESVRILKSAEGRVLRRQHQRNVKLMRQMLMDAGLPVVHCPSHIIPVRVADAAKNTEVCDELMSRHNIYVQAINYPTVPRGEELLRIAPTPHHTPQMMNYFLENLLVTWKQVGLELKPHSSAECNFCRRPLHFEVMSEREKSYFSGLSKLVSAQA

SEQ ID NO: 2455 - DNA, 2052 bp, Rattus norvegicus; identical to SEQ ID NO: 2451
  ref <308>: DATABASE ACCESSION NUMBER: EMBL / J03190
  ref <309>: DATABASE ENTRY DATE: 2000-03-04

SEQ ID NO: 2456 - protein, 642 aa, Rattus norvegicus; identical to SEQ ID NO: 2452
  ref <308>: DATABASE ACCESSION NUMBER: SWISS-Prot / P13195
  ref <309>: DATABASE ENTRY DATE: 1999-07-15

SEQ ID NO: 2457 - DNA, 2146 bp, Homo sapiens; identical to SEQ ID NO: 2453
  ref <308>: DATABASE ACCESSION NUMBER: EMBL / X56351
  ref <309>: DATABASE ENTRY DATE: 1991-02-11

SEQ ID NO: 2458 - protein, 640 aa, Homo sapiens; identical to SEQ ID NO: 2454
  ref <308>: DATABASE ACCESSION NUMBER: SWISS-Prot / P13196
  ref <309>: DATABASE ENTRY DATE: 2002-06-15

SEQ ID NO: 2459 - DNA, 2052 bp, Rattus norvegicus; identical to SEQ ID NO: 2451
  ref <308>: DATABASE ACCESSION NUMBER: EMBL / J03190
  ref <309>: DATABASE ENTRY DATE: 2000-03-04

SEQ ID NO: 2460 - protein, 642 aa, Rattus norvegicus; identical to SEQ ID NO: 2452
  ref <308>: DATABASE ACCESSION NUMBER: SWISS-Prot / P13195
  ref <309>: DATABASE ENTRY DATE: 1999-07-15

SEQ ID NO: 2461 - DNA, 2146 bp, Homo sapiens; identical to SEQ ID NO: 2453
  ref <308>: DATABASE ACCESSION NUMBER: EMBL / X56351
  ref <309>: DATABASE ENTRY DATE: 1991-02-11

SEQ ID NO: 2462 - protein, 640 aa, Homo sapiens; identical to SEQ ID NO: 2454
  ref <308>: DATABASE ACCESSION NUMBER: SWISS-Prot / P13196
  ref <309>: DATABASE ENTRY DATE: 2002-06-15

SEQ ID NO: 2463 - DNA, 2052 bp, Rattus norvegicus; identical to SEQ ID NO: 2451
  ref <308>: DATABASE ACCESSION NUMBER: EMBL / J03190
  ref <309>: DATABASE ENTRY DATE: 2000-03-04

SEQ ID NO: 2464 - protein, 642 aa, Rattus norvegicus; identical to SEQ ID NO: 2452
  ref <308>: DATABASE ACCESSION NUMBER: SWISS-Prot / P13195
  ref <309>: DATABASE ENTRY DATE: 1999-07-15

SEQ ID NO: 2465 - DNA, 2146 bp, Homo sapiens; identical to SEQ ID NO: 2453
  ref <308>: DATABASE ACCESSION NUMBER: EMBL / X56351
  ref <309>: DATABASE ENTRY DATE: 1991-02-11

SEQ ID NO: 2466 - protein, 640 aa, Homo sapiens; identical to SEQ ID NO: 2454
  ref <308>: DATABASE ACCESSION NUMBER: SWISS-Prot / P13196
  ref <309>: DATABASE ENTRY DATE: 2002-06-15

SEQ ID NO: 2467 - DNA, 1307 bp, Rattus norvegicus
  ref <308>: DATABASE ACCESSION NUMBER: EMBL / J03481
  ref <309>: DATABASE ENTRY DATE: 2000-03-04
gtgcttttgggtttggcgatcagttccgcgggagtcttgtcaggagcaggatggcggcttcgggcgaggcgcgccgagtgctggtgtacggcggcaggggtgctctgggctcgcgctgcgtacaggccttccgggcccgcaactggtgggttgccagcattgatgtggtggagaatgaagaggccagtgccagcgtgattgttaagatgacagattcattcacggagcaggctgaccaggtcactgctgaggtcgggaagctcctaggtgaccagaaggtggatgccattctctgtgtggctggaggatgggccgggggcaatgccaaatccaagtcactctttaaaaactgtgacctgatgtggaagcagagtatttggacatccaccatctctagccacttggccacaaagcacctgaaggaaggaggcctcttgaccctggccggggccaaagctgcgttggatgggactcctgggatgattggctacggcatggccaagggagccgtccatcagctctgccagagccttgcagggaagaacagtggcatgccgtctggggctgccgccattgctgtgcttcccgtcaccctggatactccgatgaacaggaaatcaatgcccgaggcagacttcagctcctggacacccttagagttcctggtggagaccttccatgactggatcactgggaacaaacggccaaactcaggaagcctaatccaggtggtaaccacagacgggaagacagagcttactccagcctatttctaagttgcacctcagtgcccaggagaaccctcttgaaactctactaacctgtgtctgtattgccgcacctggccccatgttgtctgtattcctgtttgtggtacgagataactagtcccgtttgtctcttacgtagtgctccttttttgtcctgggctggtgaggtatgtttatggggaatgagtgggggcctgtaagtagcaccatcagtgctgaggcccagggaggtatgtgtgcaggccgtcatcccagcatcccagactgctttggagacccgtttgatagttcattttttagcatttggggcactttgaaatccaacttgtttttaaattccatgttagtgccatagatgtagtttttgctgcctgaaaattaactgccatgaaaattcattggtgatgtaagtaagcaaaacctaatggactctgttggatatcatttgtgttccagcctaggctaagtgtttatgagaactattcgtgagtgttcggagtgttcttcctaataaacacatttcatgtccccgaattc

SEQ ID NO: 2468 - protein, 241 aa, Rattus norvegicus
  ref <308>: DATABASE ACCESSION NUMBER: SWISS-Prot / P11348
  ref <309>: DATABASE ENTRY DATE: 2002-06-15
MAASGEARRVLVYGGRGALGSRCVQAFRARNWWVASIDVVENEEASASVIVKMTDSFTEQADQVTAEVGKLLGDQKVDAILCVAGGWAGGNAKSKSLFKNCDLMWKQSIWTSTISSHLATKHLKEGGLLTLAGAKAALDGTPGMIGYGMAKGAVHQLCQSLAGKNSGMPSGAAAIAVLPVTLDTPMNRKSMPEADFSSWTPLEFLVETFHDWITGNKRPNSGSLIQVVTTDGKTELTPAYF

SEQ ID NO: 2469 - DNA, 1394 bp, Homo sapiens
  ref <308>: DATABASE ACCESSION NUMBER: EMBL / BC000576
  ref <309>: DATABASE ENTRY DATE: 2001-07-13
ggcacgagggggagccgggctggcaggagcaggatggcggcggcggcggctgcaggcgaggcgcgccgggtgctggtgtacggcggcaggggcgctctgggttctcgatgcgtgcaggcttttcgggcccgcaactggtgggttgccagcgttgatgtggtggagaatgaagaggccagcgctagcatcattgttaaaatgacagactcgttcactgagcaggctgaccaggtgactgctgaggttggaaagctcttgggtgaagagaaggtggatgcaattctttgcgttgctggaggatgggccgggggcaatgccaaatccaagtctctctttaagaactgtgacctgatgtggaagcagagcatatggacatcgaccatctccagccatctggctaccaagcatctcaaggaaggaggcctcctgaccttggctggcgcaaaggctgccctggatgggactcctggtatgatcgggtacggcatggccaagggtgctgttcaccagctctgccagagcctggctgggaagaacagcggcatgccgcccggggcagccgccatcgctgtgctcccggttaccctggataccccgatgaacaggaaatcaatgcctgaggctgacttcagctcctggacacccttagaattcctagttgaaactttccatgactggatcacagggaaaaaccgaccgagctcaggaagcctaatccaggtggtaaccacagaaggaaggacggaactcaccccagcatatttttaggcctcatctcagtgcctatgaggggcctgccagaaaagtcactaacctgtctcagtgtggccttgtccagccttgtgttttctgtaacccctgtttgtggtacgagataatgagtcctatttttctctcacataatatgcatttgctctcctaggacagtgtaatacatttatgtgaagtaaagacatgcgagactggtggcctgcaaatagcatccgtcaatctgtgttaactgcatagggagggctctgcatagcacctgctatagcggtgtcatgttggatcgcttttgtgactgttcatctgtccttgacagtggctgtcatcttgactactttgttgatttgttggtattggggacattttaaaggctgagttatttttgaatgtcatgtttatgtcatagacgtagttttcgcatccttgaattaaactgccttaactccttttgtggtataagcaaaactccatggactctgtcctggtatccttttcctgtgtggttgccctgtgtcctctggcctagggttaagtgtgcaagataactactcgtgagtattcagaatgttgttcctaataaatgcacttgttgtctgtcttctttaaaaaaaaaaaaaaaaaaaaaa

SEQ ID NO: 2470 - protein, 244 aa, Homo sapiens
  ref <308>: DATABASE ACCESSION NUMBER: SWISS-Prot / P09417
  ref <309>: DATABASE ENTRY DATE: 2002-06-15
MAAAAAAGEARRVLVYGGRGALGSRCVQAFRARNWWVASVDVVENEEASATIIVKMTDSFTEQADQVTAEVGKLLGEEKVDAILCVAGGWAGGNAKSKSLFKNCDLMWKQSIWTSTISSHLATKHLKEGGLLTLAGAKAALDGTPGMIGYGMAKGAVHQLCQSLAGKNSGMPPGAAAIAVLPVTLDTPMNRKSMPEADFSSWTPLEFLVETFHDWITGKNRPSSGSLIQVVTTEGRTELTPAYF

SEQ ID NO: 2471 - DNA, 1307 bp, Rattus norvegicus; identical to SEQ ID NO: 2467
  ref <308>: DATABASE ACCESSION NUMBER: EMBL / J03481
  ref <309>: DATABASE ENTRY DATE: 2000-03-04

SEQ ID NO: 2472 - protein, 241 aa, Rattus norvegicus; identical to SEQ ID NO: 2468
  ref <308>: DATABASE ACCESSION NUMBER: SWISS-Prot / P11348
  ref <309>: DATABASE ENTRY DATE: 2002-06-15

SEQ ID NO: 2473 - DNA, 1394 bp, Homo sapiens; identical to SEQ ID NO: 2469
  ref <308>: DATABASE ACCESSION NUMBER: EMBL / BC000576
  ref <309>: DATABASE ENTRY DATE: 2001-07-13

SEQ ID NO: 2474 - protein, 244 aa, Homo sapiens; identical to SEQ ID NO: 2470
  ref <308>: DATABASE ACCESSION NUMBER: SWISS-Prot / P09417
  ref <309>: DATABASE ENTRY DATE: 2002-06-15

SEQ ID NO: 2475 - DNA, 1307 bp, Rattus norvegicus; identical to SEQ ID NO: 2467
  ref <308>: DATABASE ACCESSION NUMBER: EMBL / J03481
  ref <309>: DATABASE ENTRY DATE: 2000-03-04

SEQ ID NO: 2476 - protein, 241 aa, Rattus norvegicus; identical to SEQ ID NO: 2468
  ref <308>: DATABASE ACCESSION NUMBER: SWISS-Prot / P11348
  ref <309>: DATABASE ENTRY DATE: 2002-06-15

SEQ ID NO: 2477 - DNA, 1394 bp, Homo sapiens; identical to SEQ ID NO: 2469
  ref <308>: DATABASE ACCESSION NUMBER: EMBL / BC000576
  ref <309>: DATABASE ENTRY DATE: 2001-07-13

SEQ ID NO: 2478 - protein, 244 aa, Homo sapiens; identical to SEQ ID NO: 2470
  ref <308>: DATABASE ACCESSION NUMBER: SWISS-Prot / P09417
  ref <309>: DATABASE ENTRY DATE: 2002-06-15

SEQ ID NO: 2479 - DNA, 1307 bp, Rattus norvegicus; identical to SEQ ID NO: 2467
  ref <308>: DATABASE ACCESSION NUMBER: EMBL / J03481
  ref <309>: DATABASE ENTRY DATE: 2000-03-04

SEQ ID NO: 2480 - protein, 241 aa, Rattus norvegicus; identical to SEQ ID NO: 2468
  ref <308>: DATABASE ACCESSION NUMBER: SWISS-Prot / P11348
  ref <309>: DATABASE ENTRY DATE: 2002-06-15

SEQ ID NO: 2481 - DNA, 1394 bp, Homo sapiens; identical to SEQ ID NO: 2469
  ref <308>: DATABASE ACCESSION NUMBER: EMBL / BC000576
  ref <309>: DATABASE ENTRY DATE: 2001-07-13

SEQ ID NO: 2482 - protein, 244 aa, Homo sapiens; identical to SEQ ID NO: 2470
  ref <308>: DATABASE ACCESSION NUMBER: SWISS-Prot / P09417
  ref <309>: DATABASE ENTRY DATE: 2002-06-15

SEQ ID NO: 2483 - DNA, 2415 bp, Rattus norvegicus
  ref <308>: DATABASE ACCESSION NUMBER: EMBL / J03572
  ref <309>: DATABASE ENTRY DATE: 2000-03-04
cacggcgctccttagggccaccgctcggcgcgccgggacagaccctccccactcctgcctgcaggatcggaacgtcaattaacggctgacactgccccccacctcttcccacccatctgggctccagcgaggaacggatctcggggtacaccatgatcttgccatttttagtactggccatcggaccctgccttaccaactcatttgtgccagagaaagagaaagaccccagttactggcgacagcaagcccaagagaccttgaaaaatgccctgaaactccaaaaactcaacaccaacgtggccaagaacatcatcatgttcctgggagatggtatgggcgtctccacagtgacagctgcccgcatccttaagggccagctacaccacaacacgggcgaggagacacggctggagatggacaagttcccctttgtggctctctccaagacgtacaacaccaacgctcaggtccccgacagcgcgggcactgccactgcctacttgtgtggcgtgaaggccaacgagggcaccgtgggagtgagcgcggccactgagcgcacgcgatgcaacaccactcaggggaacgaggtcacgtccatcctgcgctgggccaaggatgctgggaagtccgtgggcatcgtgaccaccactcgggtgaaccacgccactcccagtgcagcctatgcgcactcggccgatcgggactggtactcggacaatgagatgcgcccagaggctctgagccagggctgcaaggacatcgcctatcagctaatgcacaacatcaaggacatcgatgtgatcatgggtggtggccggaagtacatgtaccccaagaacagaactgatgtggaatatgaactggatgagaaggccaggggcaccagactggatggcctggacctcatcagcatttggaagagcttcaaacctagacacaagcactcccactatgtctggaaccgcactgaactgctggcccttgacccctccagggtggactacctcttaggtctctttgagcccggggacatgcagtatgagttgaatcggaacaacctgactgacccttccctctcggagatggtggaggtggccctccggatcctgacaaagaatcccaaaggcttcttcttgctagtggaaggaggcaggattgaccacgggcaccatgaaggcaaggccaagcaggcgctgcatgaggccgtggagatggatgaggccatcggaaaggcgggcaccatgacttcccagaaagacacgttgactgtggttactgctgatcactcccacgttttcacgtttggtggctacacccccaggggcaactccatttttggtctggctcccatggtgagcgacacggacaagaagcccttcacagccatcctgtatggcaacgggcctggttacaaggtggtggacggtgaacgggagaacgtctccatggtggattatgctcacaacaactaccaggcccagtccgctgtccccctgcggcacgagacccacggtggggaagatgtggcggtctttgccaagggccctatggctcacctgcttcacggcgtccatgagcagaactacatcccccacgtcatggcgtatgcctcctgcattggagccaaccttgaccactgtgcctgggccagctctgcgagcagcccctccccaggggccctgctgcttccactggctctgttccccctacgcaccctgttctgagggcccaggtcccacaagagcccacaatggacagccggctcccctccctttgtggcctgccacctggccgcccacactcaacggggaggcccaggcaacctcgagcaggaacagaagtttgctacctgcctcacttccgcccggaaccctccgtgggtcggattcctggctctgccgttgtttctctattcactgccttttggccagcagggtgggtttctctcttgggccggcaggacacagactgcgcagattcccaaagcaccttatttttctaccaaatatactctccagaccctgcaaccatcatggaacattccagatctgaccttctctcccctaccccttctctctggaacactgggtcccatagtcacagccagtccctcaacccaaccctccttggagggaagaccaggtctgctcagggtgagactcccaggaagccacctccggggttggctgtctacccagggtggccaggctgggaagaacaacccagccggacaggacgcacacactccccacccagctccagagactcgccaacccttcactgaagcgactcccctgtttggaatagcaaaaaaaaaaagaaagaaaaaaaagaaaaaaattttaatttctctttttggtgttggttaaaagggaacacaagacatttaaataaaatgttccaaataaaaaa

SEQ ID NO: 2484 - protein, 524 aa, Rattus norvegicus
  ref <308>: DATABASE ACCESSION NUMBER: SWISS-Prot / P08289
  ref <309>: DATABASE ENTRY DATE: 2002-06-15
MILPFLVLAIGTCLTNSFVPEKEKDPSYWRQQAQETLKNALKLQKLNTNVAKNIIMFLGDGMGVSTVTAARILKGQLHHNTGEETRLEMDKFPFVALSKTYNTNAQVPDSAGTATAYLCGVKANEGTVGVSAATERTRCNTTQGNEVTSILRWAKDAGKSVGIVTTTRVNHATPSAAYAHSADRDWYSDNEMPPEALSQGCKDIAYQLMHNIKDIDVIMGGGRKYMYPKNRTDVEYELDEKARGTRLDGLDLISIWKSFKPRHKHSHYVWNRTELLALDPSRVDYLLGLFEPGDMQYELNRNNLTDPSLSEMVEVALRILTKNPKGFFLLVEGGRIDHGHHEGKAKQALHEAVEMDEAIGKAGTMTSQKDTLTVVTADHSHVFTFGGYTPRGNSIFGLAPMVSDTDKKPFTAILYGNGPGYKVVDGERENVSMVDYAHNNYQAQSAVPLRHETHGGEDVAVFAKGPMAHLLHGVHEQNYIPHVMAYASCIGANLDHCAWASSASSPSPGALLLPLALFPLRTLF

SEQ ID NO: 2485 - DNA, 2590 bp, Homo sapiens
agaaactcccggtgtggcagctgagatggcccaggaaagaactatattaccttcaaaaagagaggtacatgcgatgtttgaggtggcatgaagctcagtggtgttatattggaatgagtgagtgaccatcctggagccttcctgaaagaggattggaacatcagttaacatctgaccactgccagcccaccccctcccacccacgtcgattgcatctctgggctccagggataaagcaggtcttggggtgcaccatgatttcaccattcttagtactggccattggcacctgccttactaactccttagtgccagagaaagagaaagaccccaagtactggcgagaccaagcgcaagagacactgaaatatgccctggagcttcagaagctcaacaccaacgtggctaagaatgtcatcatgttcctgggagatgggatgggtgtctccacagtgacggctgcccgcatcctcaagggtcagctccaccacaaccctggggaggagaccaggctggagatggacaagttccccttcgtggccctctccaagacgtacaacaccaatgcccaggtccctgacagtgccggcaccgccaccgcctacctgtgtggggtgaaggccaatgagggcaccgtgggggtaagcgcagccactgagcgttcccggtgcaacaccacccaggggaacgaggtcacctccatcctgcgctgggccaaggacgctgggaaatctgtgggcattgtgaccaccacgagagtgaaccatgccacccccagcgccgcctacgcccactcggctgaccgggactggtactcagacaacgagatgccccctgaggccttgagccagggctgtaaggacatcgcctaccagctcatgcataacatcagggacattgacgtgatcatggggggtggccggaaatacatgtaccccaagaataaaactgatgtggagtatgagagtgacgagaaagccaggggcacgaggctggacggcctggacctcgttgacacctggaagagcttcaaaccgagatacaagcactcccacttcatctggaaccgcacggaactcctgacccttgacccccacaatgtggactacctattgggtctcttcgagccaggggacatgcagtacgagctgaacaggaacaacgtgacggacccgtcactctccgagatggtggtggtggccatccagatcctgcggaagaaccccaaaggcttcttcttgctggtggaaggaggcagaattgaccacgggcaccatgaaggaaaagccaagcaggccctgcatgaggcggtggagatggaccgggccatcgggcaggcaggcagcttgacctcctcggaagacactctgaccgtggtcactgcggaccattcccacgtcttcacatttggtggatacaccccccgtggcaactctatctttggtctggcccccatgctgagtgacacagacaagaagcccttcactgccatcctgtatggcaatgggcctggctacaaggtggtgggcggtgaacgagagaatgtctccatggtggactatgctcacaacaactaccaggcgcagtctgctgtgcccctgcgccacgagacccacggcggggaggacgtggccgtcttctccaagggccccatggcgcacctgctgcacggcgtccacgagcagaactacgtcccccacgtgatggcgtatgcagcctgcatcggggccaacctcggccactgtgctcctgccagctcggcaggcagccttgctgcaggccccctgctgctcgcgctggccctctaccccctgagcgtcctgttctgagggcccagggcccgggcacccacaagcccgtgacagatgccaacttcccacacggcagcccccccctcaaggggcagggaggtgggggcctcctcagcctctgcaactgcaagaaaggggacccaagaaaccaaagtctgccgcccacctcgctcccctctggaatcttccccaagggccaaacccacttctggcctccagcctttgctccctccccgctgccctttggccaacagggtagatttctcttgggcaggcagagagtacagactgcagacattctcaaagcctcttatttttctagcgaacgtatttctccagacccagaggccctgaagcctccgtggaacattctggatctgaccctcccagtctcatctcctgaccctcccactcccatctccttacctctggaaccccccaggccctacaatgctcatgtccctgtccccaggcccagccctccttcaggggagttgaggtctttctcctcaggacaaggccttgctcactcactcactccaagaccaccagggtcccaggaagccggtgcctgggtggccatcctacccagcgtggcccaggccgggaagagccacctggcagggctcacactcctgggctctgaacacacacgccagctcctctctgaagcgactctcctgtttggaacggcaaaaaaaaatttttttttctctttttggtggtggttaaaagggaacacaaaacatttaaataaaactttccaaatatttccgagg

SEQ ID NO: 2486 - protein, 524 aa, Homo sapiens
MISPFLVLAIGTCLTNSLVPEKEKDPKYWRDQAQETLKYALELQKLNTNVAKNVIMFLGDGMGVSTVTAARILKGQLHHNPGEETRLEMDKFPFVALSKTYNTNAQVPDSAGTATAYLCGVKANEGTVGVSAATERSRCNTTQGNEVTSILRWAKDAGKSVGIVTTTRVNHATPSAAYAHSADRDWYSDNEMPPEALSQGCKDIAYQLMHNIRDIDVIMGGGRKYMYPKNKTDVEYESDEKARGTRLDGLDLVDTWKSFKPRYKHSHFIWNRTELLTLDPHNVDYLLGLFEPGDMQYELNRNNVTDPSLSEMVVVAIQILRKNPKGFFLLVEGGRIDHGHHEGKAKQALHEAVEMDRAIGQAGSLTSSEDTLTVVTADHSHVFTFGGYTPRGNSIFGLAPMLSDTDKKPFTAILYGNGPGYKVVGGERENVSMVDYAHNNYQAQSAVPLRHETHGGEDVAVFSKGPMAHLLHGVHEQNYVPHVMAYAACIGANLGHCAPASSAGSLAAGPLLLALALYPLSVLF

SEQ ID NO: 2487 - DNA, 924 bp, Rattus norvegicus
  ref <308>: DATABASE ACCESSION NUMBER: EMBL / J03588
  ref <309>: DATABASE ENTRY DATE: 2000-03-04
cctggtggttccgcagccgtactctcctggcctggtgtgcacagcctcaccatgagttcttctgcagccagcccgcttttcgcgcctggcgaggactgcggccccgcgtggcgcgcggcccccgcggcctatgatacgtctgacacgcacctgcagatcctgggcaagccagtaatggagcgttgggagaccccctacatgcattcgctggcggctgctgctgcctccagagggggccgggtcctggaagtgggctttgggatggccattgcagcctccagggtgcagcaggcccccataaaggaacactggattattgaatgcaacgatggggtcttccagcgtctacaaaactgggccctgaagcagccacataaggttgttcccttgaaaggcctgtgggaggaggaggcacctacactgcctgatggtcactttgatgggattctatacgacacatatccactgtctgaagagacctggcacactcaccagttcaactttattaagactcatgctttccgtttgctgaagcctgggggtatcctcacttactgcaacctcacgtcctggggggaactcatgaagtccaagtacacagacatcactgccatgtttgaggagactcaggtgcctgcactgctggaagctggcttccagagagaaaacatctgtacagaggtgatggcgctggtgcccccagccgactgccgctactatgccttccctcagatgatcacacccctggtcaccaagcactgagcggctggcccagggctacaaggagaatatgtcctcctcagtgcctttgtagctggagtgtggctccagcctctccactatccctgcagtgtgacatcctaacctctgcctggtacggccatctccccagagctcaggagtaaaataaatgctaccaagact

SEQ ID NO: 2488 - protein, 235 aa, Rattus norvegicus
  ref <308>: DATABASE ACCESSION NUMBER: SWISS-Prot / P10868
  ref <309>: DATABASE ENTRY DATE: 2002-06-15
SSSAASPLFAPGEDCGPAWRAAPAAYDTSDTHLQILGKPVMERWETPYMHSLAAAAASRGGRVLEVGFGMAIAASRVQQAPIKEHWIIECNDGVFQRLQNWALKQPHKVVPLKGLWEEEAPTLPDGHFDGILYDTYPLSEETWHTHQFNFIKTHAFRLLKPGGILTYCNLTSWGELMKSKYTDITAMFEETQVPALLEAGFQRENICTEVMALVPPADCRYYAFPQMITPLVTKH

SEQ ID NO: 2489 - DNA, 993 bp, Homo sapiens
  ref <308>: DATABASE ACCESSION NUMBER: EMBL / Z49878
  ref <309>: DATABASE ENTRY DATE: 1996-02-29
cggcggcgcgcgatcgaggtcgggtcgccgtccagcctgcagcatgagcgcccccagcgcgacccccatcttcgcgcccggcgagaactgcagccccgcgtggggggcggcgcccgcggcctacgacgcagcggacacgcacctgcgcatcctgggcaagccggtgatggagcgctgggagaccccctatatgcacgcgctggccgccgccgcctcctccaaagggggccgggtcctggaggtgggctttggcatggccatcgcagcgtcaaaggtgcaggaggcgcccattgatgagcattggatcatcgagtgcaatgacggcgtcttccagcggctccgggactgggccccacggcagacacacaaggtcatccccttgaaaggcctgtgggaggatgtggcacccaccctgcctgacggtcactttgatgggatcctgtacgacacgtacccactctcggaggagacctggcacacacaccagttcaacttcatcaagaaccacgcctttcgcctgctgaagccggggggcgtcctcacctactgcaacctcacctcctggggggagctgatgaagtccaagtactcagacatcaccatcatgtttgaggagacgcaggtgcccgcgctgctggaggccggcttccggagggagaacatccgtacggaggtgatggcgctggtcccaccggccgactgccgctactacgccttcccacagatgatcacgcccctggtgaccaaaggctgagcccccaccccggcccggccacacccatgccctccgccgtgccttcctggccgggagtccagggtgtcgcaccagccctgggctgatcccagctgtgtgtcaccagaagctttcccggcttctctgtgaggggtcccaccagcccagggctgatcccagctgtgtgtcaccagcagctttcccagcttgctctgtgagggtcactgctgcccactgcagggtgccctgaggtgaagccg

SEQ ID NO: 2490 - protein, 236 aa, Homo sapiens
  ref <308>: DATABASE ACCESSION NUMBER: SWISS-Prot / Q14353
  ref <309>: DATABASE ENTRY DATE: 2002-06-15
MSAPSATPIFAPGENCSPAWGAAPAAYDAADTHLRILGKPVMERWETPYMHALAAAASSKGGRVLEVGFGMAIAASKVQEAPIDEHWIIECNDGVFQRLRDWAPRQTHKVIPLKGLWEDVAPTLPDGHFDGILYDTYPLSEETWHTHQFNFIKNHAFRLLKPGGVLTYCNLTSWGELMKSKYSDITIMFEETQVPALLEAGFRRENIRTEVMALVPPADCRYYAFPQMITPLVTKG

SEQ ID NO: 2491 - DNA, 1684 bp, Rattus norvegicus
  ref <308>: DATABASE ACCESSION NUMBER: EMBL / J03621
  ref <309>: DATABASE ENTRY DATE: 2000-03-04
gctcctactgggcctgactttgctggtgagctccctgcaagctttggtgtgctttgagtgtggcaacctcaattctatggggatttgtaactttagaacagctgtatgttacgctcatcctggtgaggtttgtgcctcagttttaacctataaagatggaaaatttgtatatggaaaccagagctgtgctgagtgctccgggaggactgttgagcatggaagtctgatagtatcaacaaactgttgctcagccacctctttctgcaatatagtacgtccctgatacttaattgtatggaaggattttagtgctctttactgagtcttgacactggagcatgccagaaagaattatctactgaccgtgtctggagaacgcactaagatttctacatcatgttttctgactacgtgtacatcatatcatatgatcttcagtgatctgtaataaattgaaggccttacaaattttgcggctgccactgcaaccatggtctccggcagcagcggccttgccgccgcccgcctgctgtcgcgcaccttcctcctgcaacagaatggaatacggcacgggtcttacacagcctctcggaaaaatatctatattgataaaaatacgaaggttatttgccagggtttcacaggcaagcagggtacctttcacagccagcaggctttggagtacggcaccaaactcgtgggaggaaccactccagggaaagggggcaagaagcacctgggcttacctgtctttaatactgtgaaggaagccaaagagaaaacaggagcgacagcttctgtcatttatgtccctcctcctttcgctgctgccgccatcaatgaagcaattgacgcagagattcccttggttgtgtgcattactgaaggtattccgcagcaggacatgttgcgggtcaagcacaagctgacacgccaggggaagacgaggctaattgggccaaactgccccggtatcatcaaccctggagaatgcaaaatcggcatcatgcctggccacattcacaagaaaggaagaataggtatcgtgtccaggtccggtactctgacttatgaagcagttcaccaaacaacccaagttggattggggcagtccttgtgtattggcattggaggtgacccttttaatgggactaattttattgattgccttgacgtcttcctgaaggatccagctacagaaggcatcgtactgattggtgaaattggtggtcacgctgaagaaaatgccgcggagtttctgaaggagcataactcaggtccaaaggccaagcctgtagtgtccttcattgctggtataactgctcctcctggcagaaggatgggccacgcaggggcgattattgctggaggaaaaggtggcgccaaagagaagatctctgctcttcagagtgcgggtgtaattgtcagcatgtcccccgcacagctgggaacctgcatgtataaggaatttgaaaagaggaagatgctttgaaggacacgacatgaattttaaggctgtggaggaaatctcacagactggagagcccgtccagactgcagcccaggcacctgaccctggtctctcagtacaggggaagtccaggcatgttttagaatgtcctaaattgagctattttcacttactgtgtaacagagacagataataaatctatcatttgatttg

SEQ ID NO: 2492 - protein, 333 aa, Rattus norvegicus
  ref <308>: DATABASE ACCESSION NUMBER: SWISS-Prot / P13086
  ref <309>: DATABASE ENTRY DATE: 2002-06-15
MVSGSSGLAAARLLSRTFLLQQNGIRHGSYTASRKNIYIDKNTKVICQGFTGKQGTFHSQQALEYGTKLVGGTTPGKGGKKHLGLPVFNTVKEAKEKTGATASVIYVPPPFAAAAINEAIDAEIPLVVCITEGIPQQDMLRVKHKLTRQGKTRLIGPNCPGIINPGECKIGIMPGHIHKKGRIGIVSRSGTLTYEAVHQTTQVGLGQSLCIGIGGDPFNGTNFIDCLDVFLKDPATEGIVLIGEIGGHAEENAAEFLKEHNSGPKAKPVVSFIAGITAPPGRRMGHAGAIIAGGKGGAKEKISALQSAGVIVSMSPAQLGTCMYKEFEKRKML

SEQ ID NO: 2493 - DNA, 336 bp, Homo sapiens
  ref <308>: DATABASE ACCESSION NUMBER: EMBL / BM723664
  ref <309>: DATABASE ENTRY DATE: 2002-03-07
ggaaaaggtggcgccaaagagaagatctctgctcttcagagtgcgggtgtaattgtcagcatgtcccccgcacagctgggaacctgcatgtataaggaatttgaaaagaggaagatgctttgaaggacacgacatgaattttaaggctgtggaggaaatctcacagactggagagcccgtccagactgcagcccaggcacctgaccctggtctctcagtacaggggaagtccaggcacgttttagaatgtcctaaattgagctattttcacttactgtgtaacagagacagataataaatctatcatttgatttgaaaaaaaaaaaaaaaaaagac

SEQ ID NO: 2494 - protein, 333 aa, Homo sapiens [sequence omitted]

SEQ ID NO: 2495 - DNA, 1684 bp, Rattus norvegicus; identical to SEQ ID NO: 2491
  ref <308>: DATABASE ACCESSION NUMBER: EMBL / J03621
  ref <309>: DATABASE ENTRY DATE: 2000-03-04

SEQ ID NO: 2496 - protein, 333 aa, Rattus norvegicus; identical to SEQ ID NO: 2492
  ref <308>: DATABASE ACCESSION NUMBER: SWISS-Prot / P13086
  ref <309>: DATABASE ENTRY DATE: 2002-06-15

SEQ ID NO: 2497 - DNA, 336 bp, Homo sapiens; identical to SEQ ID NO: 2493
  ref <308>: DATABASE ACCESSION NUMBER: EMBL / BM723664
  ref <309>: DATABASE ENTRY DATE: 2002-03-07

SEQ ID NO: 2498 - protein, 333 aa, Homo sapiens [sequence omitted]

(The sequence listing continues in the following parts.)
